United States Patent Application Publication US 2007/0059710 A1 - sequence listing, part 3

SEQ ID NO: 9873 - DNA, 380749 bp, Homo sapiens
  misc_feature (42818)..(42818): n is a, c, g, or t
  misc_feature (243254)..(243254): n is a, c, g, or t
ctagcagtcctatcaccttacagcagcatctgctctgctcgagtgtctgtacccgtcaggtctctgcaaaccgggctctcataatcagtggggagtgtctaaacctccatttagggtcctcctacggtacactcacacagaccccagaaatgcaagcagtcccttgggggagacaaggaggatgttagagagttatggttgggaagctttgtcagggagaaattagcatttcccatcggagaccatgggaagggcactctagaaaaaagagcacaggaaaaagtatggctcaatacagggtccagaaatactcwcctggaggaactatgtgtatttcctgctatagtaatatagcatagtatttgtaatgaaaaattgtattctaaacctaaagattactaagccaattggcttgtattaagagccttagatatctacctagctttgacctagtagttaagcatttaggaaataatgagaggcagataaaaatctacaaatgtataagcaaaaagaaaaaaaaagatattagagaaaggaaggattaaaaagactaattaatcttaagagtttttcctttttcttttctttctagagacaaggtctcactgtgtcatccaggctagagcatagtggtggaatcatagctcactgtagcctccatctcctgggctcaagtgatcctcccatctcagcctcccaagaagttaggactacaggtgcataccaccatgtccggtcacttttttcgccctagagatgaggtctcactatgttgtctcaaactctggcctcaagcaatcttcccatcttggctttccagaagttgggattacaggcatgagcaactgtgtctggcctccaagacttttttgaggcttctgaaaagccaatgttgttttcaccccaacatttaatcattccaatattcctctctgcagtgaggcaggagggagcagagcagtataaccatcacttcttttgcattgttacagtagcagtaacaattcaacaaagtatgtatgtaactgtttaattgtttaacaatgtaactgtttaacaaagtaactgtggagagcaattttgcacagcttatagaaaacgccaatgctaggtgagctgatagagcatgctgttcagtttgcagccactaaggctaatggaaaaccttcagattccttcttgaagtgagagcataaaggaatggagggcatttggttgccatttccgttgggaaattggacaagaggttcagtttttcaaaagtctccattccataaagcaaatctacattttgcatggccaggtttgaaatagtatgcctctcccctccagctggtgaccctggagacacgcccttcaggtcaagtctctgtaaaacagcttattctggcaactaggaaattgagctcactcttgagctcagattatacraataactaatacatgtttagcgttttatggttaggaaatgctgtcctgagaagctcatcaataggtttattagttattggtatccttgttttattgatttactaaaattacacagytgttcgggcctgggagttaaattctcttcaccagatgccaaatcctacgtttttcttaccacatcatggygccacaggttaaggaatacagtgcagggttctgaatctctctcctgtaggacagtgcttcccaagcctggctacttgacaaatctcccaagaggtgttggaaatgcagattcctgggccttgcccctagattctgacctagagtgttattagtaaatctgtatttttaaatagttgcctggtggtctaatatacagtcaggattgacagctactgtttagttaaatcaaacaccaatgctataatttttaaccgatatcatttttagggtttggtttccaaagttggaaatcagtgtgttttagatcagtggtttcctgtcttctaaaacctaccttacctttaaagaatctgttgaaatctgtggatctttccctaagaaacacacaaacacacacatacacacttttatatataattctagagggctatattagtttcctgcttctgctataacaaatggtcacaagcatagcggcttaaaacaacaacatttattatcttacagttctggatgtcagaagtgggacaggagtctcactggattaaactcaaggtgttgcctttctggaggctctaggagataatccattttattgtctcttccatcttctagaagctgcctgtattacttggctcatgggtcccttcttttatctccaaagccaacaatgtggcatctctctgaccccacttccacttcacatctctttctcgtgctacagccaaggaaaggttctctgcttttaaggattcacataattagactgtgcccagccagataatcctggaaaatctttccatctcaagacccttaaccttaatcacatttkcagtccttttttgccatataaggtgacatattcacaggttccagggattaggagggggactattagtctaccaaccacaggggatcttaggacctctgaagcaacatggaaaatgagtgaactctaggttaggagcatctgttctagattccattcattctagatgttaaatcaacaagaaattctgcttgcctacraataacagaatccctaaaagcagtggctcttataaattaggtgtttactttttttcaggtagtaagaagtccccaggaaggcatcccatgtcaggtgcagcagttctagcatgtgacagctgaagtctctgcaattctcctggcctttcctttgaggtggccctcaaaacagctgctgcatctccagccatgacctctgtgcttcatgcaagaggggcaagggcacaggacaaaagccataagtcagctgagttgcctctcctttaagaaacctcctgagaagcctaccacccaaataacatgctcatayctcattggccagacactgcacatggccactctgtctgcaaaagagactgggaaacatagttttatttatttttaaagctaggcatattaacactccactaactctgggctttgttagtaaggaaaatgggaagtataaatattgggaagatactagtgctctctaccacagatgaaaacttcagccaggcacagtggctcatggctgtaatcccagcactttgggaggccaaggcaggtggatcacttgagctcaggagtttgacaccagcctagacaacatggcaaaacctcgtttctaccaaaagtataaaaattagccgggcatggtggtacatgtctgtggtcccagctacttgggaggctgaggtgggaggattgctggagcctgggaggtcgaggctgcagtgaacagtgattgcaccactgcactccaacctgggggacaggagcgagacactgtctcaaaaacaacaacaaaaccaaaaaaagaaaaacaaaagaaaaccttgtgttttgtgttctacaacgagaattgatcatttttcactctcacacaaccaaaacatgaagaaagttaaaagtctccttcaaaatctcccccatagtgcctcatcctcttactaagcttgcttttctttaagcagktcattctttttttttttcatttttcttgagatggattcttactctgtcacccaggctggagtgcagtggcacgatctcggctcactgtaacctccgcctcacaggtaaaagcagttctcctgcctcaacctcccaagtagctgagataacaggcgtgcggcatctcgtctggctaatcttcttatttttaatagagatggggtttcaccatgttgaccatggttggccaggctggtctcgaactcctgacctcaggtgatctgcccgctttggcctcccaaagtgctgggattaaaggcatgagccaccgtgcccagctattctttttctttcttttcttttttttttttttttcagatggagtcttgctcagtcacccaggttggaatgyagtggcgcactgtcggctcactgcaagctcgacccctcagcttcaagcgattctcctgcctcagcctcccaagtagctggaattacaggcatgtgccaccatgcttggctaattttttgtatttttagtagaaacaaggtttcactgtgttggccaggctggtcttgaactcctgacctcaatccacccacctcagcctccccaaagtgctgtgattacaggagtgagccactgcgcccagccagttcattctttcaacaatgtttaagcatctacctaagcctggcactgagctgggccttgggggctacaaagatatctaagacttttttctccttagagagctataccgtctatggagagggacagagagcccccaaaatgatgaacatgttctaagtgttgagatagaggcatgtgaacactctttggcagcccagaaaagaaaggggaagaggaaatggcacagaaagggtgaggcaagaactggcctggaagtctaggatggataggattttgccagttgaagaggggtaggcacatttcaggaagaaagaacagcgttggagaaggcacagatgtgtgtgaaaacccctgttggacacgttcaggggacagctagaagttgtgtgtggatacattgtagggtttgtgggaagtgagtcaggaaaggggcataaaatggggctggaaagagagatggagcctccatgtgaagttatgctaaggagatcgggctccatcctataggcaggagtaggtggtggggggcaacgggaagttttcaaccattatccaaactctgttgtagaattaaaaagtggaaagaagagaacacaggcagggaaaccataatagtgtggtcagacttcaacatgatagcagtcaattcagtaggaatcttgaatttgagtagtcaagttcatagagacagaaggtaggaaggtggttgccagaggctgggggtggggatgggggtagggttagggggaaagaggagttattgtttagggtataaagtttgttttccaagatgaagagttgtggagatggatggtggtgaaggttgcataacatgcatatacttaatcccccgaactgcacagttacaaatggttaagayggtaaactttctgttatgcatatttacaattmcacacacacacacacacacacccttcagtgcacgcaaaccctgctggactccaaccttcagagcttccgatttagcagggctgagtgggacctgaggatttgcattttctgacaagttcccagatgacgttgatgctgctggtccggagaccacacttcgggaatcactggtgtacgagaccaagtgactagaatatggaggggtgctctgctcgcttccacgtggctactattgttatgaacaacaacagccggcgtttactgagcactgctcctacagcttatctcacaactgggtgaaggagcagaggatgcgcagggctagaacctggagtctaaactcgtccttcacccgggttgctctggatcttactggttgtgagacagggagggaaagagagacaaaggcagggagacaggcccagcagggccggcagagcctgtagtgacggaggggagcagccttatctccgggaacccgagcgccccgtscgcggcgggragggggcagttcggggcgccccggcgggtcccaggggctgactcccgcccgggaagtgcgcgcagggctcacggcccgcagggggcgctgccgcgccgtccagccgccgccgcccgggccgcccacctcgcgggcgcgcccctccgcagaccagcgccgcccggcccgggacccgctcgcgcagacttctcgggcggactgaggacgccgccgctcggggccgcccctgtgctcgccttcagcgcccgctcagcccgccgtccgcgccccggtggcgggcccgacgcccgcattccgcccgtgtccaggcgcagagctcccgccccggggagcttcctggccgtcggcgggccccgcggcccgcgcgctsggcgccctgctygccgggcagaggggaaggcggcggccggctggggatgggcggcccggctgcgccgaggggcgccgggaggctccgcgcgctgctgctggcgctggtggtcgcggggatccccgcgggcgcctacaacctygacccgcagcgccccgtgcacttccagggccccgctgactcgttcttcggctacgcagttctggagcatttccacgacaacacgcgctggtgagtgcccgcccgactccgcgaccctggcccgcgcggccaccgccccggcccccaggccagcgccgccgccgcctttccggtctcttccacgccgccgtcccgagggggcgatttaaatgtctccgttgcgcgcggctcggccgccgggggacggcgggagaagggaggacgccgtccggggcccgctaaggtcggggtcggcgcctggaggcgggcgggggcgtccgggtgcctccctggggtcccagcccagagcgtggggggagagccgctaragttgtctcctccgccgcccagctaractcggcttcactctctgaatcgaaaagtaacttggctcctctgcctccgggcggccgccgctggcccagcgagcctcctgaacctcgcagggcctggaggagtcggggcactggagctgcacccctccccggttttggggaacccctgaggaaggagtatagcctctccagcgccgctgcgcggggtggggctccccaggggcagggtgtctgggatccactggggcgcactggagcccagagccccggcgcccccsccccccccagctcctacaagaccctgggtggaagtggagcggagaagctcctaggatatagggaagaggaaggtgagggagcacttcccagtgacaccgccggtggggcaggtagttatctcttgggagagcctgagtctcatctcatatgggccattcgacccggagaccttcaccagaagccttaagagagagacgtgtttctatagtggccaaggggtccagttgtcccctgagtccggaggggtgggcctaagaagggggcagctctcccccattaagcaccataagccgagtggtacagagcttgtgcccaaccccagcagagaagcactaagggggggttggtgccctccttggccacatcctctggaccagagggtataaacagccacayagtggtcacttcttgataggagagagagttaggctgcgggaagttcccccgttcaaggtcgtgcctcatgggggcccaggtgacagccaggccggggttgattttattgtgtattcaccagcctgagcgtccttaggggtggcaggcagggaggtcraggtcactgatgctggtgctctcagcatgtagttatgcaggagagtcactgctctgtattggacagaggctgatggaaaagggtggtttgtggatcgcagtactcaagcattcctggaaaaggggactctgagaccagcccactaagaatcatgctgttcaggagatcagccttcaagagaaccagttttcaaagccctcacatagctctcgcccagctccacatctccctctctcacttactccagttgctgggtataagaccgagtgtgtctgttcttaacacttgtcaaattccccttttaaagcggagcaggctgaacatttttctgtgtcctgcagactcagggtctgaggttgaagaacacatcccagatccccacactaggcaccaggcacgcgggaagcactgtcaaaaatgggagggctgctgtggacagcgggctgctgagaaagggcgggcagctgagcaggcagccaagccagccggagcattgtgtgtgatctgcaggctgaggctggctcaactgccttggagctctttgacagctagagggagagaggccaggccactgtcactgtggatttgcatgggccacaggtcaaagccacactgcctgggaaaggaatgggtagagacgagagcagatctgacagagaaaaggtgttcagcctacttkgatttaaaacggggatgaagaaaagctgtgtgacatgagcagatttggccagtgtgggaaaagacagtctggccttcagcttggtacccagggtaaatggtagggagtgggtgtggagcagtaatgctgtgcatattcttgttgccagttgagatgtgggactggtatttcaggggtccatgggaacccatgtgtctgggctgctgagctcaaaagtgccctctcttgttctgatacaagctggctactctttgtattggagtgcttgtccccatagctgttcaggcaccaacttaactctactgaaatctttttaaaataatgcttctttttcctccctcacccaccatattgacttaattttttcttagattgtgttctccccttgatttctgttctcatgctgttgttttcaagtattttcctccccatccttttttctctttscctttttcccagtattctttgtcttagaccttgaatgtattttttgctgtatgtatgcttgaatgtgttttttacccaggcttggtaaactatggcctttggagcaagtgacttccaacatcttctttctcctttttctttcctctagaggctagacttattgtgcaaggctgctgaaacttaagccaaaggattcttgcttgcataggcccctattaatgccttgtccccaattttataattttatgttaattttcttaaagttagtcaccctaaatttgtaagatcaggtcctgtgaattctggatctgtcctaagtctgtaccttaacttcaactgtggggttggttgattgacttggtaactgattgttggtcgcttactcctaagcagtacctgagccctggatcttctagtcctgcttgagggacrtgtcagtcattttcaattattcgtgattgcaaacagcagcaggggtaaacaacctttaacgaaacccttgaggacaatcttaattatttcctttgaataaattcctgggcttagaattgctgggtcagagaggatggaagcttcaaggcattctttatgtattaccaaagtgccagtgaagtgtgtgtactttagaaaaatacattaatttattcagacactggaggcttgggagtagttttgcaaagggctgctctagtgcactgaaagagtatagaacctacatgggggtgacttaaaaggatcacaaatactcgtcaaaatgagtgaggaaggtaaaatatagacatgaaagggaaaagcagtatagcaaaactttgaaaggaaaagaagacatgttaattaagccttgtatcttacgtctctcttctcgaagaaattattctttgttacttaattcaatattttgcagtctaagatatttgcttcatgctaattaactacctgttttacaggtgaaaagatgtgttgtctctagggaaagggagggagaagaatgtgctggaagtggtagggggagagcacagaccccaaagtcagcacggactctgcaggyggcagagtagagcgttcccatgttgagggacctgcgggtgtacatctcaaagcatgtgaatgtgctctgttggtggaactagcacttctctaatcccataactgagcatttctctcaattattttgtagaccaaaattgtcactaatcggaggatcctagatccctgtgtaagtgtgggggtgatcttgcttttcccagccctggtgactgaacccagctctgtagccatatcacactgagcacagagccccagacccagcttctctcagagtacttgcttgagtggtcccgctgtcactgtgctctgggcagtgagaactgtccccatggctagatggaccagaatatcctggacaatgttccagatgacgtttgtatcagctaggatacaaacatgcaagggactcaattttctttttttctaataacacccagagtgtctgcctgcccagagccagcttcctctcctatagctcccactccctgagtcttctggcgtcctttgaacaacaacagtaagtgccagggaacatggacaaagccgatttctgtccccttcctttagacatggaccggttactcagctgcagggctgacaactgtaacaccctgtgatataaataaatgctgcctggctggcgtgcagcyyccagagcggacgtctttcacaccccaccccgtcccctcctccttctctgccccagacgccctggagtccaaagtggttgggtgcactggcttcctttctggagacgtgcttcctgctccctctcctgggacacatcaagacggctgtgcttaggcacagagcgagtgctcggaaatggaagatgtgctgggctttttgctttgttaaagttgtcagagygttgttcagtgaggaataggaggcaattccaagccaaggagaacatatccttgatttgcatgaaggttgagaattaaaagaacaagctagatagttctggtgagctgtctgatgtagtcaccactagccagatatattggtatgtaaattaactaaaaataaaatttaaaatgcagcttctcagttgcacttgccacatttcaagtactcagtagccacatggggctagtagctactgcattggacacaacacagagagaacattttcatcatcacggaaagttctactgggcagtgtgggtttagagcaatgatgtaagtcttaaagggctagacaaggatcaaaaggagaggtaagaaaaagaaaaagaaaaaaaatcaacccatagcatatgtgagtactaaaaccgaaacgggtgcttacatctaactaaaaattattgcctgctgaagaggttgaattgtctttctactcataaaacaccgcagggcctgatctatatttagggctgggggttcaacaatgaaaactttttgctcacaatctgkcaggtgagaaaattgtggggttctagttgtgtgtctcaaatgaaatttaagatctaggctctgatgggggagaggcttgtcctcaggcaggcatgagttgttcagaggggcagaagagaaactcctgtgaagggaaaacatttagaaggggagccctgggatcataggacctgctgcccctggccctgcccgtcttgctgaggaaacacccagaaatggtggtgggagccctgccttctcataacctcagtggtgagcatctttgcagagttcctctgtcctgtgccagactctaggggaaggtgtaggtccgcttcctcakttgaatttttctagggaaatggcattttcagacattgttcctggtcctcactcaccctacagagcctgctttctcaagctctcaagaaggaacaacacatatatgaggcctgagttccaaggggatccaaaaagcatcttctcggggtttctgggaaatttctctgaagatctggagaagctggcaagggtgctgttttctgagctagtgctgaatgctggctgggggcagagacagctgtcttgcccagtggagaaccttccagggcaagaagacagtcttgtctcaaccagtcattaacggccctgagtgtgagagtgtgaagggccgggccmcagccagctctgattccctggtgacatgctgctgttcaggaaatggtctcctgataacttctattgtgatttgttcagggaaaatgttgtttttacatttgttaaaagcagccatggtgttctctgaaattccttgctttcaaggggttgcatggaattttaacaaccaaaatgaatttcgtcagatagtatctacaagaagtcagatgctttcacaggcataatattctttagttgagtctttgtaacatcctggtgagtggtttccagtttgctatttggggaactgaggcttacagagttacacgccttgttcaaggcccaccccagcctgagagatcaatgcacattcactgggggcttgtgtcagtttgcatcctttaggaagcagatgctaggacagagataggagtgtgagagaattgttgggggcgggtattgcctgtgaaagacaaatggggaagttggatgggacagagagagcctctgactctatgcagatctgattaaagtctcagtcaactcaacagagatcactgggcagaaatagctgtcctctgccagggtcaggtattggctggagctgtctgggaagagcacagcctcagctggaatcctgcagcagatcccaagaaagctgcagctggaggctgtcagctgacattccgccttgcagctgaacagcatgaagtgacccacacctctgtggctgccctggagcctgccacgcgtgaatcactgtgttgggagggtgtgagatgtgctccttggcctgcagtgtggctggggatcatctttgctcatacctctgtaatcagtgtgtggagcgtcaggactgacagtagggccattgggactggcccagaaacagaatcctgagcaatcttgccaccagctgactcacaaggtgcctctttctgatgtcagagaagtcacaggtgatggatttcagaagaaaggagctctgctttacgctgagccaccgagttctctgaactgcaaatccttttagccaagtggatttggcgatcaaccaaagcagaataaaatgttttatcccaaccttcctttttgccagaaggagtcctaggaagccgatgtaagtccaagattgggaaaaatctacagtctttgaaaccacgggctcacttggtccaccaatgtctgttctgaccaaaaaggacttctgtgttgagtttaaattagcaacagtagcaacaataacaccaaaagcagcaacartgtatctgaatattcagtagatgtcaagtgctatctacattggtactcataccagctcatttaatgttcccaacagtcctttcagctggtagccatttgggctgccataacaaactgttataggttgggttgcttataaatgacagaatttatttctcacagatctagagccttggaagtccaagatcagggccccagcagatttgctgtctggtaagcacctgtttcttggttcatagatagtggtgttctcactctaagctcacacagtgaaagggatgagggagctctctggggccacatttataagggcactaactcattcataggttatatcctcatgacctaatcacctcccaaagtccccacctccaaataacattaccttggggtgaagatttcaacatatacattttgagggaacacaagcattcagtctgtagcagctggctatcattttatccccattcatggaggggaagctgaggtacagaggcattattgcccaagttacatggctaatgagttgtcgagcacaggcctgtgcctttgcccmcccaggctgactgcctgtcaggaagtcaagaatccgagtttgggggcttcagggcgctcaaacatctgtcttgtgaagttctgttctgcctgctttcctggaaaagttattgaattgcaatagcagtagcttctctgcggcaccctttggggatgcttattcatgacccactggctactcttggggggatgctagggttctgttttctggagatgtttgatcactgagtgaacagggacccaatgattctgccagggacatttgaagggcctcttctcacaccaaggctgtctagcattaagacagaagtgtcccaggaaagatggagtactctgcaatattccatgtatccctctaacctcctggggctgctttgttactatccccccatccactctgagttctactggctcccaccacttatttaggaatctctgaattggggaaggtagccatggtggccagtgtttcagaatcactcctgggtttgtaactttattaaagaaacccacacagagtcaaacttctgcaccagtgaccaacaatatgtgagaggatgatttgtatcctcaaatatttgaacacttaataaaaggcatgaatgggtacaaaaaattagaaagaatgagtaagaatgagtaagaactagtatttgatagcacaacaaaatgacaatagtcaacaataatttgattgtagtttaaaaataactaaaagagtataattgaatcacttgtaacataaaggataaacgcttcaggtgatggataccccatttaccctgctgtggttattacatattacatgcctgtaacaaaatatctcatgyacctcataaatatgtacctactgtgtgcccaaatcttttttttttttttttttttgagatggagtcttgctctgtcacccaggctggagtgcagtggtgcgatctcggctcactgcgagctccaccttctgggttcacgccattctcctgcctcagcctcccgagtagctgggactacaggtgccccccaccacacccggctaattttttgtatttttagtagagagtgggtttcactgtgttgggcagaatagtctcgatctcctgacctcgtgatctgcccactttggcctcccgaagtgctgggattacaggcgtgagccaccgcacccggactatgtgcccaaatttttaagaaaaataaaaaatcacggaacaaatttcctccatcttagctgatctgttggtrtgttaaggccacctgggagatggcctttcctaccccttcctatctagtgtccaagtgctgtgatgtatgtggatcccagagtaaacttggtgttgtgcagtacacaccagtaggcagcattgcagagggtcttggcacctcttttgcaccaggatgggtcctagagggtggatgttccagattcagctgagtagtgttcctgtctctaccttcattgaatccctggttccacagcaacaaccagatccacgatttttgtgccataaaagggggcactgctgagatgcacaagtgcctggtggccaagagagtgggctccagcattagccctgccctcagcctgccttactcagctctctgcttaggagctgtgtgatcttgaccaattacttcagctgtttgaacctcagtttccttttctgtaaagagtaataagggtacatccctcattaggttggtgggggcattaaatgagatgatatctgcaaagcccagagcacaacacggcacacagtaagcccttgatagatgctcgtagttatttctcttgttacttgatctgatttatgaaaccaatggtctttttcatcctgacttgagatgctgagttttctttcagtatttttgttgattcattcatttattcatcagactttgagtgttgacactcaacactgaaatgaatgagatattctaacatagacacactcttcattatgtgtggcctctaacatttttgttatgctctacataaatctgcatttttgtgcattcatttacaccctgtctgcttccaaaaaggatctgagatggctactttaaatggagatctttgggattgtaaatcctagaattttgcctgcctgtttcttctctgtgctcttggaaagccaaggagcagatgggaggccacccttgttatggggagctccagctcccaccccaggctccagataagtctgggaggtagatctacagttccaggatgggatacttttttaaaaagtaaatgtaaatgtattgccatatttctcttgaaaaaaaattatcacaagaaaccaacaagaagatatcaaggctttttcttagatctgccagaagtctgtaatttgctctatcccttggattttagtgttcacttgctgctttcagatgtggaaggaaaacctcagtccttttgccttgcctccttctccagttgcctcccctcagtgtgtctgccaagacctgagccccaggccagggcagcagcctctgacctttcactccctaacacacaagctggggaccaatgtcactccaaggttggaccctgccccygtgcctctgcttttcccagttgggcatggactccaccaatttcattctctgacttagcgttatgtggtgtggattgtactgctctccctccatttactgtaacctaggctctccaggataaaaattattattgccaaccttttatgaatactttctatatgccagaaccactgtgttcatagttccctttatgcagagcaggctaccactcccgaagcacagagaagccaagtcacttgtccaaggttacccagcaagtaagtaaattacagagttgtgctttgaaccaaggtgggactgatttaatgctaaactgactgttctcagggttagccatgctaccctccctacctccacctccatcaaggccctgtccaaggtatcaggtttctaaggaaaaaggagaagggccctgaaaggaaaagggcttcttcggagggcatttgtgtctgctcttggccttgcagataaaataccataatctactcttgcaaatcargccatcctggggtgcatggtcccccaaacactttcatctgccttttccttttgtgcctcatcactgccttgggagggggatcatgcatttgttattatccttgttttacagaaaaggaaaggaagggtcagagtggccaggggacttgtctaaagtcacatagctgtagctggcacactcctgggtgtgacttcggatacactctttagggcctattctactactccaccatgcctgtcccatctcagggccttcagtaaaagtctgtggtcctggttggtgatgagattcctttgagggagggaaaggagaccaggtagctagaggagccatagcaatagttgtcagctgcatagttggataattggtttggacttagcgggaattagtgggcgatggaattaccacggtccagattccgtcagaagtggcatgccttagcttgatgacgtatctgttttctatcascacaatattgctgcatccctaacaaaccaccccaaaacttagtggcttaaatcaaccaccacctgtagcttattctctggttggcagcttaggttgggttcagctgggtggttcttctgttctctscaggactcactcatgcatctgtggtcaacttctgggttagctggttggctggctggcaaaggatggcttcagctgggagggcttatttttgctccatatgtatttcatcctcttgcaggctagcctgggcttgtacacatggtggttgggtagggtaccaacagaacaatcagaggcttgcatgatttcttgaagcctaagctcagaagtcaaaccatgcccctctgccacattcttttggccaatgtaagtcacaggtccagactacatcaagaggaggcagaaacacatttcatctcttgacaagagaagctgcaaagtcacactgaaaagagcagggatacaggaaggatggggaattgtggccactttgtaatatattacyggtggtgaaagcatcctggctgtccctgaattactgtgacagtctgaataaattcctgcccagcgcaccagaaaagggaacaaggttctattaacctaaatagcaaacacagagagaggctctctaaaagaaaatgtttactcaggaatagggcattgcagtgggaatacatgtgtcacagtaatctgcatgaatattcagggaggtaaaggaaaacaaaggcttttaaaggaaaaatgaggattacttaattgttttgagataattatctttggatacaaggatcagtgacaagggtggcaccagtttgaggttggatagagagttgctaggtagatttcctcacagaaggtgtgagtgtgtgtktgtgtgtgtgtgtgtgtgtgtgtgtgtaaggttgtgatggcctttgtgcaagattgtgtttttgcagatttttttgtgctagttcttgttatcagttgtttatgcatgaaaacctttccttcatggcgtcccacagctctatttgtcagggttttttttttttttttaaacataagtgactccattttgattctgacaacttttgcaattctaaggatctatgagctcttgggtgctgccaggagttagaactgggatgagttgagtgtcaaggtgtttgacctactactgcccagcagtctaacatttctttraacacctactttgtagcaggcactatgatgggtgttttataaacattcttttgcttaaaycttacaagaaaccttcttaggtacacttttattcctcctgttttacagaagaggaaaactgaggcttggagtgtttaagacacttgtctaagagacacagcttgtcagcagtagaggcaggacttaaaccctatgttactgcctgtgcttcttacactttatcaccatgcataactttcccataaagcttagaagccaggtagaactactggcttaaaaccctagaaagcagtcagtatccactgcttaaataccaggagcctcagtttccccaaatataagaagagcttatgaggcctttcaggtcccatggctccattgggcaagcattggtccctagtgagtcccctccctctggaaatgaagggtttggtgtggtyagaggtggctatcctggcaccagctcttcctttactcaagcctgggctgctttctgcccagtaagggatgcggacaattcctggggtttccccgtggtggacacacagtgaagaatttgactcatgtaaccaaaacrtgggtccctggggaagctttggctttgggatcaaatgctgaaagcaaacctaatgggtttaaagtttttaatccccagttgctgtccttgatctggctataattttgcctgtggaatcgctgctgtggtgtttgtggggagggagggaatctttgagacactgtcagttctcagtcctgcccagggaggcagctgcggctcagtccttctctgtcacccgctctccagagaatttacctgcagattaccctcaaaacatgagacaggttcagagcgaggtgggcggytggaatggagccttcacagacagcttgaccacacacagrgagctcaggaagcagctttgttggaaaaatgcagggcacttaaactgccacaccaggagggggtttggagaggytggaaagagcatgccattggacacagacactctgggttcaaatcccagctctgccacttactggtggtgtgacccaacatctctgaatggaaaacacatgagaggctgcctgacaggatggccatgagcaagaaagcacccttgtgagcataaccagtgttggtgcatgaaccgatgcacccacactgcttattaagagaggcaaacctctggttaacaccatgacagcagtgtcaatgctttggaaaagcaaggtgattgaagttcaccttttgagtcacctgagcctgatggggaggggaaggtcttttctcttccaaaccccagcatgccctttgacatgacggagctttcacatcagagttctcacttcagagctgccctcaaaggctcactggggcttgctcaggtggggattacatatgtgagtagctggcaccagagggggcactgggtacctgttggttcccttttcctcctttcaggctgatgtggggtgggtagaatagggcacgggtgatgtatttgactactggggtgcrtgctacagcttggcatcttaacatgaataaccatcttaacctcctctggccacctgcttccctatctgtaaaatggggataatattagtacctcccgtagggttgctgtgaagagtaaatttgatcctgcccgcaatgagcctaacccagcacctgcacactctaygtgcctgctacatgctggttgccctaattagaagtttagagtcctgcattgatgagaggacctaaaaggcttatgaggccaggcatagtggctcaggcttgtaatcccaacactttgggaggctgaggcagktggatcacctgaggtcagaagttcaagaccggccttaccaatatggtgaaaccccatctctactaaaaatataaaaattascggggcgtggtggcgtgtscctgtrgtacccagytactagggaggctgagacaagagaattgcttgaacccgggaggtggaggttscagtgagcggagatcgccgcactgcactccagcctgggtaacagagcaagacaccatytcaaaaaaaaaaaaaaaaaaaaaaaaaaaaaaagggcctttgagtttgtggcatctttaactggggatgggataggaggagagagccttgcttctcaagggcaatctcttctactggctccaaatgaacataattatttgtaatcagtttagatagttacatagtacttcttaaactatcaatcacctggagagcttgttaaaatgcattctgatttaatgggctggggcctaagattctgcatttccgacaagtgccaggtgttccccatgctgctggtctgaggaccacacttgaagtagcaagcaaagcagagaagtagcttgatgctttgttgatggcagcctgttggtggggacactcaggcccttttatgtggtaaccatagcagaaaggaacatagtcttgttgagagtaccaggagagttggggcgatgtttgaagtggctaggatgtctttttataacttagcagatggcatcttttcagtggcttgttctgaactctgggccatggtaatctctgtatcccttgggatcagcctggtaaacagccagctgaattaacttcagaaaagacycactcatgggctggcctgcggtagtcttgctggatggtggcctaggtacagagcagtgctgggctgcggaggaagccacgatgttctgtaaacacatagatacaagcacattcccgcgtgccacctygtgagtgtcatgcatgtgtgtgcatgcccccttatctctagcctgattttccattgcacaggatttgggaaaaacctttcatctgaccagctgatcagaagttttgaactgaaaggttgttatcagggtttgaatcagctattgttgttagaaccattgagtaccttgggcttggaaggaaataataattcagcaggttcctttccactttagattttggtgtaaactttgtccctgtcagtcttggctctaggctggaggaagcagtgcctgggaataagctctccagggtcccctcctgcttagataacctatgaatctgtgtctgtgaatttggagccatggcattatctgaaatttccagggttccaatgccagtttgggagacacagtggaggaagaacctgttgtttcttgcagccttttcccttccctcggacgtgatgaattctcactcttgtgaatttttttgtgatttttgtaaaataaattacaagtggcaattagtcactgtgctgatgtaaatttggagttggtgggaatttttggactctgctgtgtggccctggggtttttgagtggaagaggtattttatgctccccaggtcttaraacctgacctgtggaaaggctgaggatgtttcagcagtttagacagggcaaactgctaattcttctcacctgtgaaaacagctggtcttatgaagcgcaatatgtgacttaccccagtggctctaaagctcagccgctacagcaagggggaaaattgatcccttaatgtggctttcttctcactggagttttgttttgtacgtcattgtgcatttgagttacagcagacaagggccagccaaactgctcttgtgtgggtgagggaggcaatgtgatctgtttgggaaagtgcttgctttgatttccaaagggctgtgggttccagccctgcttctgcttgggaattctgcagttgtgcccagcaaacacctggggaggtgcatcccagggcattattgaggagccgcagggcagcctgggtacctgcaccattgggagtcttgcttctctcactccccagcagggcatcttcctcatggaatcagatacagaccctccaagactgacctggaaggagacactccagtgaggggtgggtctccctggctctttgtaccctccaattcttcaggttctaggtgttgagctcagggcagtgggaattaagatgggacccacacacattcccatgaaccttaacaccatgtctctgagccaggttagtgacgatgtcctttgtgatatctgccagcctttgctggagtcccctttgagggcctcagacttctgttgtatgatgtagaggmcttgtttgtctgcccctttgcctagctggagtgttgcaggaggagcagcagcattccaagaccagggtgcagtgaatgactgagatcccaagatgaaggtggctttcagggcagagggaagggagcctgggtcagctttctacatccccaggaaagctgtccagggtcatcctaacctctgctaaacaccttttccacaaatacataatatgtaatgcactctattccaaggcatgtgggagatgatctatttcatgatacagaagaaacccttgtgaggtgaattccctctcttttctaggctgctggagataaggaacaacgcctgttctcactaagaagtggcttggcattttctactctttgaacatcagtgtggattttgtttgaagtctcattgtccaagaccttttccaaatggctcgtagctcagcacaaaccgtgcctgattagtgttgtttggtattctttgctatagatcttctgttgactgctttccggaaacaatgcataaaactgtaggtcagaattatttttgtaacatctggaggggagcttactgccatttcccccgtgttctgcactcacacaggcccaaacctgcctcttctgtcttctgggtgggtcttgcccctttcctgtagccgggggatgctcctgctggggatggcccaccctaggcagcttttcagttcaagatggaggatacagaggttcattcttgctcctstttgcatgcaaactgttctatttctgttttgcagtgggagagaggatacggtttataattccgcactgctgctattttttttcctatttgcccctaaatgtccatgctgtgtgtgtggtgggtggtaggaggaggagagggagacagaagagaaatagcgtttctaaattttctatttgttactgaaatgtaacacatccaggaaagtgtccatatcatatrcagttatcacaaatttgtataatgtcactgaggttgaatgacaacattatccgcacccccagcaattcccctccctaattgcaaccctgctttctcctctccagaggtaaccattatcctgccttctaacactatagttaaatttcacctgcttttgaactttagataaatggaatcagactgtgagtatgctattgtatctggcatcttttgttcagtattgtatttgtgcagttcatctctgtggttgcagttgaatgctgttcatttgttttcattgctgcatagaactctttttttgttttgttttgtttttgagacagagtctcactctgttgcccagactggagtgcagtggcatgatctcagctcactgtaacctctgcctcttgggttcaagcgattctcctgcctcagcctctcaagcagctgggattacaggcacctgccaccatgcccagctaattttttgtatttttagtagagacagggtttcaccatgttgcccagactggtcttgaactcctaagctcaggcagtctgcccacctcggcctcccagtgctgcatagaattctgttgtattgctgtaccatgatttacctgtccactctagcactgatgggcctttaggtttcttcttgtttttttttttttttttttgatattacatatgcagctttgaacattttgcatgtctcctggtagaaatgtatgcatctctattaggtatagtcctagaaatggaattactgggtcaaagggtaggtgcatgttcagctttattaggaactgttgaatagttttcccagtggttttaatggtttatactgccactagcagtgtatgaaggttctagttactctatatccttgccagcacttgggattttcagtctttttggtttgagccttctggttggtatgaagttgagtttctctgataactaacatagttgagcaccttttcatgcatttattggccatttggctatcttcttttgtgaagtatctatgcttgtctttggcctattctgttgacttgtcttttcttattaatcaatgaggagtttttaaaatagattttggataggaaccttttgttggttgtacgtgttcccacccatccatcgcagtctcctgggtaggtgggactaaaagcgtgcgctgccttgcctggccatttttttttgtgaagatgggatttgccatgtcacccaggctggcctggaattcctgggctcaagcgatccacccgcctcggcctctcaaaatgctaggattacaggcatgagccaccacattcagcctccttaagctttaatatgcctgggaaagatctaacaggtttcactttaggacctctcccccaagcccacacagaaaagtataataatatgattttcaaagtgagcactcagagagcccacccgtggttgggtgaatacttagccatctgcctcctattttcttatcgtaggttgtgacagaatgcctttttctcttgctgcagggtccttgtgggcgcaccaaaggcagattccaaatacagcccttcagtgaagtctcctggggctgtgtttaagtgccgtgttcacaccaaccctgaccggagatgcacmgaactggacatggctcgaggtgggtgaccattactgctgysgtggaaatgggttctgtacccttatacctwgctcttcttcttcccaggatggcctgaycattcactcacccatccatccttccctccttccctccctccttctstccaacaagcatgtattgagtacgtaatagttattaagcactgggatacaccagtgaacaaaaaaaacaaggatgctgccatccctagtcccataaattagtgggcaaaagagatattaagacaagtaaytgagagagaaaagaccagagggaaggtgagtatttgatttaatctagataggagggtcaagaaaggtctgggacctttcgacatgattagaaggatgcgtagtcgttagctgggcaggtgcaggaagcacagccttcaagcagaggtgccatttggaagcacagagcgaggttgtgcagctggagagggagccaggagagtggagcacaggagggcagcaaggcaggctggggccaggccacgtggggcctagcaggccagggcaatgtgctggaattttatyctgtgtgtgagtggggaggccactgaaatcaattttgggtrttacaktttaactagggaaagatatgatcagatggatgtttttaaaagctcactttgcgctgggcatggtggctcatgactgtaatcccatyactttgggaggctgaggtgggcacattgcttgagcccagaagttcaagaccagcctgtgcaacatggtgaragcctatctctactwaaaatacaaatattagctgaacgtggtgatgcatgcctgtagtcccagctactcaggaggccgaggcaggaggatcacttgaacccaggaggtcaagggtgcagtgagctgagattgtgccactgcactccagcctgggtgacagaactgagactcttgtctccaaaaagataaaaaaataaaataaaagctcactttgatctagcagaaaatataagatctttggaatcagatggttctgactgcattcaaagcccagctgggactgattgggaatgtcctatagcttcttgggcctcagttccctcaccttcaagatcaagactaatatacctacctcgcaaggatggtcttgagaagattaagtgagataatacaggtgagtacacagaactgtgcttggcacatcagtacaaaggaggtattttgttataatcatgactgcaagcatttctttctccaaagtctttttgcataaagattttctaatttttttgttgttttttgtttgyytgtttgtttttgagacagagtcttgctgtgtcacccaggctagagtgcaatggtacaatctctgctcactgcaacctctgcctcccaggttcaagcgattctcctgcctcagcctcccgagtagctgggattacagtgtatgaccatcttcggctaatttttgtgtttttagtggagacggggtttcgccatgttggccaggctggtctcgaacttctggcctcaagtgaaccgcccacctcagcctcccaaagtgctgggattacaggtgygagccaccatgcctggccaagatcttctaattattttttaaataaagagttattgtgattttctttagcagaaaaagaggtttgtgaactgtttgttactggtgcataacaaattaaggagcttacttcagaacataaatcaaggccctgcctctttccatgagaaagtcttgccatgtggttgggtgcagtggcttatgcctataaccccagcacttcgggaggttggggtgggcggatcacttgaggttaggagtttgagaccagcctggacaacatggtgaaaacccrtctctgctaaaaatatgaacattagtgggatgtggtggcgcacacctgtaatcccagctacttgggaggctgaggcagggcaatcgcttgaacctgggaggcagaggttgcaatgagctgagatcgtgccactgcactccagcctggacgacagagagagactgtctcaaaaaaaaaaaaaaaaaaaaaaaaagaaagaaaaagaaagccttgctatgtaaaaaaacagttgtctggattaaacagtatagtacatagtgatggagttgatttacattttgtggaaagttccttatttcctcatagggctgtggaccaccctttgaaagcagccagcagamcatcactcctcaacccaagtctggctcttctcctctttctccagggaagaatcggggcacgtcctgcggaaagacctgccgggaagaccgcgatgatgagtggatgggggtgagcctggcccgrmagcccaaggctgatggccgtgtgttggtaagtccctcctgggggtgctgtgggaagggggtggcactctgagaatgaatgatctgttaggaaggctggatggcatggtgacaagtgcatggctttgaggttgcttattctggactactgcttagacaaatgacttatcktcttattttctttatctgtcaaatgtgaataatgtctgtcccaaggtgctgagatgtgactattgaaaaataaaacatatgtgaaaagtgctttgtacatctcattcattacataggtatttgtgtgtgtgtgtcttaaattgaggtataatttacagtacacaaatcttaagattacagtcttgattttcacaattgtacacacctgtgtaaccatatgcccactgagatatagaatatttccatygtcccaaaagtctccgatgtccctttccagccaactcctctcacctgagacaaaccacagctgtgakttgtataatacattacttttgckttttctagaatktcatataaatggaatcctacagtatgtgctcttttatataagacttctttcactcaaaataatattttctgaaattaatccccattgtaygtatcagtagttcattcctgtttatctctacataatattacattttatgaaataaatgttatttttaactagttatttatcggacctccaaagcacctatgctgtattttgatccgtaggtgctttgagggagatagaaagaaaagtctttgcatttgagactcctgagatcctggagttgtgctgtgcagtaaggtggccaccagccctgtgtccttatttaaacttaaatttatccaaattaaactagaaattcaggtttttagtcatattagccacatttaagtggctcartaatcacaaatggttactggctactctattggaaagcagagagagagaatattttcatcatcacagaaagttttattagactcaacacraaaggaatktctaacactgcagaggttttgtttttgtcaatttttcctttaagcktttctatgaggtataatactaaagcacttaacacacccagctgtgagtgcacagcccgatggkttttcacgcatgtacacttatgcatccccattgccagtactccggaagracccctgcaccctttcccagtcagttcctctgcccttggtgagtgaacaactrttctgacataggctttctcttgcccttgacttttatcagaagctgtaygaagatttttgttataaaagcrtaagctcaagaggggaaagtaatactagctgccgcttatggagggcttcatttgggtcacatgctgcaaagctgagggtttcgtgtgtattttatcccagggaaacaggttttccttaaggcactaggcaaagtgtttttgtcccctctctaaggagcccacttttgtgttaaacttcttcatggcataagctgttaatctgaattccgtcctcagcacaattaagcatctcccccttgtcgggccccttgggagaggaggaagcagctggatgctgtcgccagcatggtgggggcctccctcctggaagccgttgtaggtcctgcacaggctccctgagcccgctgtttgccttggtttccagtcctttcatcactgtcatggctggccctggaccctctccaaacttccacattccyccaggcatggtggcctgaccctgactggacaaatgggccccagaggggctgaacccttgtctgccattctggggaaagaaagggaagaagctgactcatctgtaaatyaaagggtagcccaaggtcctgattcagaacaaaaaggaggtggtggccccgtggcagcataacacaagatgctcttaagggcatcgagcctagagtcagagtttgctcctgtgaaaatatttcctctctgcaaggaaggataacctctctgtggctgagggcttgtttccagaggggcaagacagaattctgtgttaccacagatcagtatcacaaaggagtcatttctggggacagtgaacagcaatgaggaccacagggaagatttagcaaagggagccaagaaggcagcactrgagcatttgtggataatggtgccatggatagtcctgtctaattaattgcatgcaggactatttttttaatgttttatgaagttattgcatcatccactcagtaagccactgtatatgggtgctgggcaaagaggagcatctgacaccatctgctttccttgtgccttttgtttgkttttctaattgtggccaaacacatgacataaaacttaccaccttaaccattttgagtgtacagtagtggtaaatgtatggcacattgttgtacaacaaacctttaaactttatcttgcaaaacttacatccattgracaacactctcctttttctccttcccgtggttcctggcaacattgtatttctattaagagtttgactactttagatcttatgtgagtggagtgtggtgttcgtccttttgtgacgaacktayttcatttagcataatgtcctcaaggttcatcatgttgtagcatgtgacyggatctccttcctttttaaaggcagaataatatttcattgtatgaattcaccatgttttctttattcatctattgacggacatttaggttggttctatctcctggctgccgtgatgaatgctgctataaatgtgtaccaatatctctttgagatcttgttttcagttctttggggtatacacccggaagtgggattactggatcaaatggtacttctatttttaatttttaagaaacctccatactattttcccaaatggctgcagcattttaagttctcaccaacagtgcacaagggtttcaatggctccacgtccttgccaacatttattgttttcctttttttttttaaatagtggccctcctaatgggtgtgagataatattttattgtgattttggtttgcatctccctgatgattagtaacattgagcattgtttcatcatctgcttgttggtcattttatatcttttttggagraatgtttaggtcctttgcccaattttaaattggattgtttggtttttattgttgttgagtyatcstcatggcattttgcacatgggcagtcttgctaggaaakgcttgtcctaagtcccctctgcccctgccccactctgtcctcggcacttctctttcttcccctgtatgggctctgcctccttcgtgaagcctgttaagggttttctggaacaagctgagcatcttttgtgtcattaggaactcaacatcatcttattacttatattgtgtgtataatttattttgtggccayatgtccccttttatggaagccacttggggatagagaccaaatctacccactttcattctcagcatctggaggacatctctctaaggaatggcatctgaaagtgtgtttgaataatacagggactgagggtcaatgttaaaacaattagaaaccaaattagttgccatcttttcttggtggctgattctaagtggctgaaggaaacaccaggaaacattctgtaaaatgttccttggaaatggcaggcaaaaacaagawacagtgagtgtccctatttacatttggaggtctcatagccatttgcttttttctttaatgtttcaaccctacctgtcagagctttctgggaggcaagtatttacttttaaattaaaaatgggaaggatatgtgttgttcaggtgcattttgagaacttgagaagtgcctgggggtgtaggcaagagaccagtatccccaaggagcacaatattggattccaaggttgggkttgaagagggagaggtgggctagctcttttgaaagtggtgtctggtgctgatagaaaacctaagaacaaatggagaatttgaaagctgcaatggggcgtgaaatgtctcagtgaccaaaggcattatgtggaccmtggacccagcaaccagctctggcaaggaccagattgtcaggctggtctggcaggttgaccttggcttagtgcctgcccatctcagctccatggacactgttgcacctcccaggttttccccagaaacaaatgatactggatgtaaagatagcatcaggattagaggcaagccccttcccttctcactctctcatcctgagcttcctgtgtgcagacgacattttaagaaatgagcggggaggggaatcacttcttgaaataaccactgaacaaactctgtataggcactgactgctgctcagactttggaggacaactcaaaatgttcaagtctaatgtcgccccttttcatcagacttgccaaggctcagacaacaaataatttaagcttctagattatttttgtgcagaagcagtattctctggttctctttgtcatttcctttctaattatcagggctgtccttatctgttcagkgcttcccatctgtccatttttttttttcaaagccacagggtacatttttgcatttacttctgttgctctgtttcctgattttttttaaagtgaactttttattgagctgtaacacacatgcagaaaaaggtataaatcatcaatgtatacctcaataaattttcattaggtgaacgtcctcagaataacattttcacaccccagcagccccttcccaatgcccctcctggccacttcctcctcggttggggagcttcttaggggagtctcatggcatctcagcctctctgtgatcctgctccccaccacacaccattcttagcagccaggcccagttgtggccgtgcactgtggacctggatgcatgacaaaggctttggccatctctatggcaggtgcgaatgtaggagggttggcagggactgatgtgcctttgtggccgaagcacccggaaagtgccattacccacctctaggagggatgtgttgtttccatacaacaaaaaaggcctttgaaataaagtgtttattttctttctctttttcctcttttgggaggaagagcaatccttataccttgaaatgtgtcagattctaatatttggagtgggmcaaggccctccttcccctttcttatgattagttgaaatctgagtttgagcaagtcttgctgttttcagagaatgctctccytcycctgtycttccctcacagccgaactcatttggagagattgatggagttactaatgctttggagacagtccctaggaatttttttaaaatgtagtggtcagattgacatgtgtgtatatataatgataatcaaggctaaacacagtcttctctttctgtaatttatattcagagacactttgcattgttttcctacatgaatccttcctttgacactttgatctctgacctcccagaatgcttttagtttagtatgaaatgcaatatttggatcttctaggaattttccaagatcaccccttaaatagtttatggcacttaaaaaatgagacaatacaccagacattaagtacagcaaagccttcctataagtgtcagtgtgcagctggctatcagacagcaccatgataaacatccgcctcttttcacagcccctccaactcagaaatacaataaaacatggtcaacccttgargccaagggctttgctaagtccaaaaacttagcaaaaccaaaacataactgatttacccacaaattagataacaataagtgattcargtttgcgagccataagaattgagtcagaactttaaaaatcaattatttagcagtatggagtgrttatttacttagtgatatattttttatagttctctgcctcatatcatttcagtctatttagaaacctgctattttagcacaaaacartatcaargagaggagtgaatgtggtttgcagcagraaaaataacaatagattgttttctgtagtttaatgtcatacgacaagaggcagaatgtgggcaagctcaggttttgagagtcattctgagtgtgtcctcttttgccattgggcagagagtggccttgtccagggccttggtggcagtggcttgaaggatgaagagcagagagcttagaaggctgtgatcttatcatagaatgatgtcagggagaaccaggccccaagagccccctcactcactcggtgacgtggggcattccattcgaccccagagtggttatttcacatgtcctgggacatgtggcaggggggctgtaaagaggataaagtcaccaggcctgccccagggggtgggttttgatggcctctcaggtaggaatgagaagttttaagatggaaaatgcttcatagtgaaacaaggaagactcagaattcctggattccagtgctgtttgcagcacttactagctctgccacttaggcaaagcactctttgatacatggtgctcttgtacagaaaatgggaattctaaagacacctctgctcaccttccaggattgcagaagaggtcagaggtaggccataagaacgctaaatgttatcacttacgaaaacaatgcgtttgagggaggcaaaccaagatgttaaaaactgattattttcaaaagcaatattttaagaaaatgcattcactggctggggtgaagtgaactgatatcagaagtgagtagtgaatgcccaggagaagtggaacgggctgggcagggtagagtgtgtgcctctgagtaagcagctcggctcttcatcagcacagcagtgacatctggatgtgcagagacatgcacgggaactggggccactgtcatgtccaagcagaaggcaggggcatgtttagtgtggcagaaggacgatccaggcctgcatcctggctgctggcactgctccagtgtctgttagcagagctgccctgcctcatggtgtcttgcgtggcttcgaccctagtgctgagaggctcctctggagagctggccaatgcatctgtccatcttcttcgccagtatgcggasctctcrtgcaccccaagacccttggccatgaaccttccttcagctttctcctcagagaggccttccttgacctgcctggcaaaaccagccactccctggcatgagggaactttctggtgagatggagatgttctgtgtcttgctagggccttggtgacatgagtgtgtacatttgtcaaagcycatttgtgcattttgctgtatgtaagtttccataaaaaaacaactctccacacacatttacttctagttaatgagatgcatgctgaagtgtttctgtgggtagaaacatggttgaatatcagccattcctcccttccctgctgtctccacatcggttcagtcccttgggcctgtcagctctgaagccacccccgtcgcccatctccactgcccctcctggtccagacctgcatcatctctcacctggtgttcatttgcacttttgccctcctgcagtctccaccaagcagccaaatggtctttccaaactgtcacttggatcatgcttctcaactgtgtaagactctccaccacttcccattgcagatctgctgaagtcacagccattcctacgtccccctgtggtccaaccttggccgcctctttgatcttatctccttcccaccatggkcactccagaccggcctttctttctcttgagcctctgagcctttctcacgatgtatcctttacattctgctatcctttgaatcctcccagaaccctcttcccctcatgcttcaggccttcccgacctctggtggaaactatccttcccactcccagattctctattctataaccttgtttctttccttcccaatgctcaggactagctacaattctcatttgttgatatatttatttcctgtctcctagtaggctcccagtggcttgttcctgttcatgcagttttctgatgcccaraaaagtgcctgttatgaaggtgtggctttctggtccctctgctcctctcttctcccacagaaagaaacatctggcactgacaggagtctgctttgtgatcttttggggccaactttcctgctctcaactgctctctatccctttaggcctgtgctcatcgctggaagaacatctactatgaagccgaccacatcctaccccatggcttctgctacatcatcccctccaacctccaggccaaaggcaggacrctgatcccttgctatgaaggtgagcatggattgatttttcctcatccccctacccacctcatgccctaagcccgccttcccacctctatgcaccaccagctgaacatttccccagctttccacatgctcatgatagggcagcactgtttgctcccagatggtctcttggtccccaaggccctgcccagagaagaggcaggtacagagggggcagcagtcccaggcctttccaaccctcacctgacttggctgcagagcccacggtgcttaccaagcattatgaagtctcagggaccgaaattcaccaagcctcagccaagtgacctaacagctgccttggttttctggtaatgccaggtgctgtgttgccttgggaaacttaccttctctctctggacctcagtttccttgtccgaatattcagtggttggcccagatgatctctacagccccaggcagctccaagtcagtcattaggctcccacacagcttctggctgcactgtggacagatgtcctgaggctggggggagaggagacccaggattcataaagcarcagctggacagaaacctgacactctgaactttcagcatttcatgacatttgaggtctgactttccttcccatgtggtcctgcagcccaggcagatgctggagaattgggcgcatcctgaatgtggttttaagagctcctcgccaaggggcacttggaaggaaaatgtatcctctcagacttagaaccttcaaatgcctgggcatcgaggacagtcactaatagtgattgagtcagtcactatttagcccagtcgaatctgagctttaagcgttcagaaaacacggttattttcttcagtttgatagctcgtagtttcaagttttctcagcctaattttgggtaagctggaacctgctccttctgtaagtgctggactatttatttcttaattcccctcctactttatttggacagaagtctcactggcttatgtccacattgcctttgggcctccctgggttttcctaggtttcaaattttgtggacactaaaaaggattcatkagaaacactatatggacactgggacccttctgggtactgaggtgacacaggtagggtgctctgggaaacgtcccccacagaagagccagcaagatctctgcaggaggcacaaaccctctcccctatagagtgagccttcctttggtttttctttctcctctgtatcagcatttgatcagctctggctgggccatgtagggaaatgaaactctggccctgtttatatctgtattgtcccaaacagaagaagaacaaacttcatcttaaaaatagaggatgatataatcaatcaagagtggagggatcgttggtttcagaaaygcaaagcatgtgtcaagcctgggtttccactgccccagtttactcctcctttttcctaaggaagaaaaaggaaaagcctctggaacaaccggtggggcagctcttcaggctgagaaggagcgatgggctcagcagggtgatggaggcagtgattgttgaaccatactagttatgcataggaccagtactttggttttcccagaagatgacatgttgtgacagggacacatgatggtccctgatgattcctctatatataccacaagcacaaggacagccctcygaagagggaggtggagttcaatgtccatgtgtacgcaggtccacgaggctcataattctgcattactttctattaagtagctgtggatcatcagtaggccagtgttgatctgaggtctttacacattctctcatctaatcttcccagaagctgtgaaaaatgtttgtttcttttttttcttgggtctgattacaggtatttwattttggaaattgttctagaagacaccagtgaggcagggggaagtaagaatgggaagggaaggcagcccatggaagatgtactcctcagcacgttacctgggcgagtgggtgcagtctctggggtgggtgctggggccagtgtggagcacacatctagagtcctcctgcctgagggctgaggggaaggggcttcctccacctggcatcctgtcctgccatgtgtgtgggctgggaaagcctccaggacagaggtgctggcaggtggcagtcaggccacatcataggaacggtggtaggagctggggggagacaggtgggatgcccaaaggccagcttctgtgttgtcattctcctgtgacaggagtaagtggagactcagagtgtatgtgaattgccccaggtcactcaaacaataaatggtggagcaggattttgaagctggcctctgtctgactcagcaaaccattttgtgtcctggtaattaatggtaatttctgttagtttgttttttagggtttctaatttaaatgagaagtaaaagccagtcarcaaccctcacaaagcaagaaagggtgactgaactatcccaaaaatacaatggacttaatgatggttaaawggaactggtgaagaaattagcaaaatgattatgcccctgcccaatcttccttcccatgggcgcacacacacttttatatgctaacccattcattggcccagggtgggaaataagggatggatgggkctggcatgtggagtaytggggtgtaagagcagccccttagaaaaatgggggactaaattgaaagtttcygtagttcttggccctgtaagaggagaggggtagaagatgctgagtatttttctagaagactggactggacgggtggggctgggaggatgcyggccgtagtgagagggctcttgtctgtgctctgttggctttaggcatctccacctccctgttttgtggtttaaactagacctactwtggcttttaaggccaccattatttcctyaatgtggagaaactcagtaatgcaagttctctgttccacrttagggrtcacattatggttaaagacaatgggaagattttagagtttgacaggacctttcagataccacctagaacagcctcctgtctttcatgaggtccagagaggtgatggcctgagtttttctttctaatctgtwattcacatgccacacaatggagaggcagagtagcttggtggccaatgcacagattctggacacagactgccggagttcaagtcccggctctgctacttcctcttattaacagtgtaatctcagatgggttatttaagttctctgtgcctaaccaacctcaagggtctatgaagaggactgagttaatgcttctaagtccttagaacagtgtctggcatatacttgctaatatatgctaagcatatatatactaatatgccatgtacaacatactgtattctgagcaagtgtttgttaatcatcatagggtgactgacttgtgtaccgggaatagaatccacttaatcttaagtacttgttagttgccagatagacaaaacccaagtgacacagttccagctaccaagaagctccccatctacaggggaaaacagagaggggacagggtgttttaaaagtgggagggccgtgtggagagagaatttcctgccagtgtgtactgctggagcccgtccccaagggcttgagctgcatccaagtgcaaggtggcattatttcattttacaattggaaaaactgaaacccacttaaagtctgcaggctgttgagactatggaagagagggatggtggaaattcgagactggtcatggtggtgggaacagggcaagggaggagggggacggctgcctctaaacccacttcttgtgggatggtggaaagaccgtgggaggggctgtgggttgaggacggctctgctgcacttctgcccctttagcctcaggcctgtcacttggcctctcagtgggagtcgatgctgtgatgcctccactgcatttacygctttgggttatggtgaggagctcccgagaaaactcaggtgaaagtgctcagcaaggccacccattgttctataactgtggcctcatggtaagtctccatatgggccagctgtgctcctwtacaacattggaaggtcggtttggttgcagagactctaaatatgtggggatctctccaaaatgtctcaagcttttgaattcttaaaaaattggtctctggtttggcactaggacatggcttctcaggtgcttcctgtttctggttggatgggaaaagctaccagaatatcctgttggaaccaggaaaaacagaggaaatgggaaataaaaatgaatttaggacataaactcatggagcatatccttcagtcagtttagtttgtgtttgtctgatgtgagaacatcattacctaccatatgttctttggttttatcagaatgtgtgagaaaacgagakctttggtgggacgatgtatagggaaaactacttgtaaattaaagggcaagcactataaaacattaattactattaaccaagctatgatattttaggactccgaaatgttaagtcaatgcatgtgataaaatcaagtacagagatttctttcatcctttgcccttgagaccactgaggcaagaagccggaacttagcaggagtgagactgcaaacaagttgyctttttattgtgaccgaaaaacctgatgagtgtggaatagtttgggagcagcatggcaaattaacaaagcctgttcaagattaaactctgagaaagaaatgcaagaggtaattatgatgccatggtatgttagacctaaattgtggaatctggctttactactcacttattgctatgattaaacctatatgctcctactttctgacttagtgaccttaggcaagctccatgagcctggtgccctcatctataaaatggggagattaagatctacttaagaggtatgtgaggtataaagtgcctaccacagtgctcagtcgagagtgaatgctgctcattgccttcaattagaaaatgtaaattttctaattaattttcaagcaacataatagtattcttaaatattctcagaaggtgtctaacatatcctgttttagtgactagataatgaagggtagaaagctggatattcctaaaatgattttaagagcccttggcaagttataatttctcaaatactgttgaagatcatattggcacaatttggttggtaagtgttccttccctctttttgtagatgacctaaaactttaactcatgccatgtttaaatgttcttaaatttgggattgttgaagtctgaattttactgtgctttaaaattgtgatggaaaaacttcctatggattccaaagatttstgtaccactctattatcagggaatgactggcttttatttctagtgtgtgtttgcatttcctaggacagtgatcatttccagggaaggaaatagattacccattcaaaggtgaagatttttttcccctttaatgttaaaagtggtctccacaagggataaaaatcaacgaaggtccatttacaaatgaaaaggaattggggttttgttgtatttttgttttgtttttgttttggagagaaccataaaaggctaagttgatccatttaaaaattcaagaacaagcctcataaatttttattaaataaagacctctacatttacataggattttatggtttccaaggagctttaataaacatatcttatttaaataaatagagcaaattaaagagaagaggatgcagttgtacattatggccagttaaacagagagggattctgagggggaggaagggagggwggccccagaggacagccatggctgtaaggaggaggccagaggtctccagcagggcctctctggggctttccaggtttccttggagccaagaattttaatcttgggcaaacctgtctcctatacttcaaacgtgtttccatgtattacgtggaattatagactacctaaactgmatcttttgtttctctcagaaaaattcacagattcagattcacctaatatttattgagcacctacctggtgccaggggttgtgctaggtacttaacatttttgatcttactgagtaatcacatcattctcagataagtattcttatccttgttatacagatgagaaaactgaggcccagggagcttgatgaaggtcacaggcttattagtcagaggaggggttgacggcttttaagtgtgtagtaggtttctttgtagctacctgttctgttgggatcctggttttcttggtgattactgagtgctgtggcctatcacagaaaaaaaagtcatattttttttcaatggcataattttatgaatttttgggacactacactatagacttgttaagctatgtttcagttttgcaattatagatacactctgtagacaagtcccagtaggtacagagggcagacgtgggtcctcagactgataaaatgtagccaggagaccaatctgctctagtctggagtggctgcttactgggaacatttggtttcagtatctgcacagcagtttgtctgtccatgctttggtgccagttatttcatgagtctttttatttttattttttggttatatagatcagaggtttcygtgttgcccaggctggcctcgaacgtctagcctcgccttcttatgcgccwggacaacaggcctgagccactgcagctccctatttcatgagtcttttagctttggtcccaaaattgaattctgctcagttctgagctggggttctcactgaaatgtgactgtcccatgttcagggtcacttttttttttctgagagtagagcatgacayaatrcatagtaagttgcatgtctatatatacattattatgtgcctgtattattacttgctgctgaagtagggagttggcaaaatgggttgctaagttctaggtaaagggaacgctttaaagattacaaaactccttttttggtaatattaaaaaattattgsccaggygtggtggctcatacctgtaatcccagcactttgggaggctgagactggcagatcacctgaagtcaggagttcgagaccagcctgaccaacatggtgaaaccctgcctctactaaaaaatacaaaaattacctgggcatggtggggtgcatctgtaatcccagctacttgggagggtgaggcacgagaatcactggaacctgggaggcggcggttgtggtgagccaggattgcatcactgcactccagtctgggtgacagaatgagactctgtctcaaaaaaaaaaaaaatattgtaaaaaataaataacataaaaattaccattttaaccatttttaagtgtacagttctgtagcattatgtacattcacactgccatgccattatcaccaccatccatccccagaacttttgcatcatcccaaactaaagctctgtacccattaaacatgaactcctcattccctgcttcccctagtccctggcaactgccattctactttgtctctgaatttggatactctagacacctcatgtaagttgaatcatacagtatgtgcccttttgtgactggcttgtttcacttagcataatgtccncaaggtgtatccatattgtagcatctgtcagaattttcttcctttttaaaggaaggaatatttaataakattccrttgtatgtgtgtgccccacatttatctattcatctgtttataaaacattttstttggrtgataagaatgttttcactggaaatgtgctttgtgaagcataagggagtggcagaagcagatcagaagttgggagccttgctcttgggtcctgatgctgaggctaatcagcagtgtagctttaaacaaaccacttgctctttctgagcaaaaatattccatttgtaaataaatggacagagttagagttattaggcattccctaaagrtcttttccccttttaaaatctttctttcatttaattctaagtttctggctttatgcactttgtgtttcatgcacaccatagcttagtcatcagttattttcataaaatgttctcgcttcctctttaacctagctgtttaatttatttacattttttcccccatttatatggtggtcccttgtaaactgagggtagttttattctctcttcatttttctgtataattgcccttttttttttttttttttactagagctgtgtctgcccaaatgcattgtttcctgtattgtacaattatcagttatttagatttgccastctgttagaaacaaaatgcttgttcctcagtgccacaatgaaatagcacttgaacataaatttaattttctcagcaaggcaatttttacttctaytgaagcgtgcgacttgtggatggagtaatggtgagagcacacctggacaggggaggggcaggggttcttattcctgttgcaggtagcccctactgctgtgtcgttcccctatttcctggggttcaactgcatagtctgagctaattccaaytggctgttttaaagagagcagastacgatcctgagtggcggggtgagtagtttggtgggaagggtggttacagaacaggtgactcaggatgatttgggtcagagcaagtgaccaggggtgactcaagatggagcaggtaaccagggtgacttaggttaaagcaggtgaccaggggaacagatctgaactactgattagaactggcgggaaagttgtttactgaaackagaggcaagggggccaaagagaaccaggaagttaaactttaaaatggaaaatcaaagaataagagagctgaacatattgacatactgattctttgaagagaaacttggaattygctataacaactccttggtgaaattcagaataaagactggcaagctatttttcccccagtattttatttcagagctaagctaaggaactacagaaaaataattgtaaaattgatgtgttaaaaagctttgaaagacagaactttctcaaatgggtaatatgaagggagattattaggaagaatatatgttatgctgtatgtgaatcttgatctttctgtggaatggttttatcctggtcttttggaaagggtacaggaagtgaccccacccgattggtggtctgcttgaattacattcattaatgtaggctccatgcattgagttgcggattgtgaacatttggaaaccagtattttttttcctctctgaattgccttctgtttagacagggcttaataaaaccagcagctaaaccaaggaaaatactcccatttttagaatggaggagccatacgacttaatgaattaaagcatgtaatgcaggccaagtaattcaaacccacccatggcaggaagagttccacaacctggttccagctcctctaagtgacttctaagtccccttgttcaaccctatcttttgggtctcagatttggcttccyccccsctttttttttttttttttttgagaccgaatctggctctgttgccyaggctggagtgcagcggcatgatcgtggctcactgcaacctctgcctcccagactcaagccatcctcccacctcagcctcctgagtagctgggactacaggtgtgcaccaccgcatccagctaatttttgtatttttgtasagatggsggtctcactttgttccccaggctgattttcaactcctggactcaagtgatctgcctgcctcggcctcccaaagtgctgggattacaggtgtcagccaccgtgctggccagcttccccaaakgtaagggttaggtttgttacagtgcctgtgagctgctgtcaggcaaagcctgcttttcccctgcttctttgaggtggataaatgttttgttcagtagtggagagggcactagctattgtagtcctctctgcagggccatgtccctgggggcatttggagaccaagtagacatgcccaggagcagccaactgctgggccccacggcctttgtgtttgtgcaggaaaagttcttcctgggaacacaggagactggaggtcacccccaccccttcccaggtccctccaccctgcacttcctggacttgtcaatggagggagggtgtgtgacccaggcttgttggggatgttgtttgtggggcagccccttgcctctctctgcgcctacctcacttcccatagctttgtgatataggctgtcctgccatctcaggtctagacaagcaaaatcaagttgtatttttaagttttttagatacgagtatggtagaataaccctatgtacatactctttggggaagaaaggctcgtacatgaacatttagaagatggattagggagaaacctaaacctgccctcttgacatatatatgaaggaatcaggttaaaataatagtagtgcccttaactcacagaaatagcattcaaaggagtgaaaacaatggaaagcatgcttgtggcctaggctgtggaaggtgtggaatgtgaaactgtctaatccaataacacccactaactttcctagactagagttgccaggccccacaactgcccccaaagtgtgtgtggcagggatcggataggtggtagaaggattagaactggattctactctaccttgaagggattaatgacagtcacagaagtttctgggaggctgggacatggcctgctctctgatctagatttgattataggagccagtcaggggcccccattgtttgattccttgccctagagcatcctgagaaggcagcttagactttgggtttcagaaacatgaaagtcagtgatggtaccgacttccatgtgtgtcccaggccctcagacctctggtggggcagtcccagcttgggaaggcggaggctggcctgaaaacagtgcttcatgctgcctgaaacaggggtgcctttaagggcttccccttgctggccttcagcctgggccagaagtggggtattcttagctcccagtgaggctgtcaccacctcggaaacccgaggtcctgctcccaacatagaccacaccaagtacagtttggggaggaggcactgaagttctcaaatctcccattttttggagaccttgtcataaagagaccttgagactgctttaaaagatgaaagagtcccacacaattcctattcatgtcagaaatttatgaggctgaactggtggtgtgtcttgcactatagtttcattcagctcatggggtctgaatttcctttttatgtttcattttttcaagagttacaattgggtgtttagtctctagrgtcagtgggatggatatgctttttgccagacttttcacatttaatatgtaactgtttgtttaggttgagacattttgatcctttttgccgttgtgctatttgatgcaggatttattattaatttgtattatttcttgctattatgaaatttgatgcaggatttgttcattgctttgcactagtctcactcgcagccctggtgcaagattctgcagggaacaaacaagttccttttgtcactggactgctttctggcaggtctagcagttgtccttataataaccggacaaggcgggagaactgattttatcctgcatggaagaggagtaactcaattgacattctttgtcatttagcagtcagttaatggccacttactggaaaatgttactaggctctgtggtgagtgttgttagaaactgaattactctgtatatttccccagggccctttttccccttgcctggagtagacactcagaacggcaggaagtggcactgtgttgcaatcatagtttcattgttcctttgtattttgcatttcaaaaataatgatattgcttttaatggtaccagagacttgccaggagcccagggggtggtacagggtcactggggtagccccagcctgagggtgcccaggagtggtctgtggaaggtctccagcaatgtcagcctcacatgtgattaatttgagtcactgtgaacatctctccacctccttgactttacccatgaaatgatttccaacatccagtcactttcctgggtatttttagtcactcactttgcagaacctttgatggtctacagaagtgaaggaatgggttkctaagtccaagctgaggtagaatcctggcattgccatttactagagctgtgtgaccttagacaattcacttaacctctctgagcctcartattcttacctgttaacaagtggggatatgggttcccagggatgagggaccggtgaaatgatatgcctggagacagctaacacaatgcctggaaaatgctaagcacttgtcaaaagtttcctacccctcttccttgccagcttaaaattataactgcagcagcagaacgcccccatttgttgggtagcagtgttgtgagctgagggggtggaggagaaaagcttatctgttagttttctttccacctggagagatcttccccctttccttccacacagcaatagtgtaaccraatgccagagcagtcccttcttcttgcggtcctctgtggacggcttgtttctttttggatggtaggaggcatccaaagcctcttttagggaagrttggtcttcttccaggagactccacactgggatggccacatcattccatttctgggtcacgttttcagctccttgggcctgcaagggatctctgtcccttctggagtaaatraaataattgtmactagcctcccacttaatgactgtggctattgctcctctttctcgcacacgaggggaggaagtctgctggggcactgggyagcctcccttcccgatggcaccagagcctggatttttgaggtctggtggattcctgagactttccttcctcaccccagtctggayrgcatccctgggcccagcctgccgcggcactcgtgggaagtggctggctggctctsctggctccacgcacagctggcatacactgacatggctgtggtttgcttctmtctccttccttscccctagagtataagaagaagtacggagaggaacayggctcctgccaggctgggatagcgggcttcttcacygaggtgggtgtctgctgtctgggcatttctgttctcttgtgggtgttcatttccttgcttatatgattttgrcaacccttagaggtgggacttctggagtcccagatacttgagcctcgagggagcagattctggtcctcacaccagaggaggctatttctacctgccmggagggcaccagctggccagagaccactgggcagaggaggtggggtggctcatctcgaggctacccctatttgatgatttytgtaggagtctgcttgactctgagacctggggaaggagtcgatttggggatgtgtgagtgagatgacattcagtcaggttgtgccccatcattggcgrctgtgcagatacatgaagcgtgtgagcatcccctcctagcagccttctctccttagtggagagacttgtttgtttttcgagacagagtcttgctatgtcactcaagctggagtgcagtggcrtgatctcggctcactgcaatctccgcctcctgggttcaagcaattctcttgccttagcctcccggttataggcgcccaccgccacacctgtatttttagtagagacggggtttcgccatgttggccaggctggtcttgaacacctgacctcaggtgatctgccagtctcggcttcccaaagtgctrggattacaggctgagccaccacacccggcctgagagacttggttttacacacaactctaaccattccttttcccagattcagaaggacaggacacctgcatgcttatgtgcccgtgtggtagtagcatgacttttggctggtagtacatttttagggactgttttcttgtgtcattcttacttactgtaagtttgcccttcgtatcagttcctyctctctcaaacactttcatgactgcctgctggcactgtctatccatgtggttgctcaggccaaaaaaagagtactttttacttctaattcatctgcagtcctgttgttttagcctccaaaacacatcccaaatatgacagcttttattactattacaatcrcctccattatcaccatcatgcttctagaaaggccaccaccatcacctggaggtacactggccctgattggtcttcttaygtctattatgcttttttaaaaattgtggtaaaagatgcataatataaaagtcaccactttaaagtgtgattcagtggcattagtgcattcacagtgttgtgcacccatcaccatgggctaggttagaacactttatcacccagcctgcatccattctgacctgtgaagtgtgctttctgcatactagccccagggtccttcaaatgaaacccatccttctgactccgaggcttcccagtccatggaggattacaatgtaaagctcctcatcctggcccctggacttggctccctgaggccacctctctcttttcctcactccaggagagcagagagctggggaagggcatgggacatggggggtggagggaggatgaagggtgctctctggcttccaaagtgagggcccctcctgagtcaggagcaagactgcctaccttcctttcagaaactgctgtttaaatccaaagagracatagacagttggcaatatagtgtctgatccagaaagcaagaaagaaaaggcagaaagtctgaagttttatttycactctcaaaccaataaataggagatgctaccctccaacccccattccgcaccctcagtgattcttacctcgctggagaatcatttttatgacagtcgacagagttctatgccctgggaatggcaccgccaatcatcctaaccattgaggccgaatttaaagattgttctctcacctcactctcctacttctaagccaccttgcaagtcccaccacctcctatgccctcaaaacctctaacawtgacatccattgccctccacatcctctgccaccctacaaatctaagccatagttgtcttgcttccaacccactgcggaatccttctgccgtcttgcttccacccttgcctctggacagactggtccccatgtagcagccagaaccaccttttacaaacaggaaaaatatcatggtgctcccttgctcaggactttctggtgtcttctcatcctacttagaatgaaatgcaaatgccttcccttggcctcccagccttcatacctttccaggctcatctcctacctcacccactacatggtattttcagctgctgctaggacatgccggactcccactggtggcattgcactggagatccattcacgtggctccttgtacacaagtgtttctttagaagagacactaatggaggaactgctgggtccaaaggcactcagatttgaattttgatacatgttggcaaattgcacttcagacatgtttaccagttgacactcccctgcattgcttctgtctctatcttctctcactcagactttaaatttttgttatgaaaaaacatctcgttttaatgtcactttccctgattattaatgtcatttaatatccttttaaaatattgaccatttgtatttgttttcctggaagttgcctgtttatgttctcagtacattattctgttttgttgttgttgttgttttcctggtttttaggaacttgttacatattttcaacagtaatctcttacctgatctatgtgttgcaaattttttcatcagcctttttcttatgttttaagtttgcctatgatgtctttatcatcctggcaataaacatgcacatttggccaaatctatcagtcttttttttttttccctctagattctaaacttatctcttaagaaggttattccttatgtatactgcaagttggcatgaacagctgggcaggagagtgcccgggatctacaacacatgtctgggctgaacaaactcccatattttatacttatattttcaatatacttgtatttttaatagcactttcataggttgtttttaaaaaagatttcgatctttaatctttctggaatttgtgttgtatacattgtgtgatagaaactaactacrttattttyctaaatatatagttggttgtyctgatactggtttgttaaacaacttttcctctccccattgaaatgccatcctgccgtgtggcgacttcactctcttcttccatctcagcaaacatttagattgtgtgacaactatggctgttgttcctccaacaggcctgtctagtattgtatgacttgagtcaataggcagtgggaaccactgtaagttcayaagcaggtgacacactggcagatggcagtgttgaaagaaaggctatttgagctgggtttgcccagaactttgggagtggaagggcctgaagggaggcctggtaggaggccgtgatgtggtaggaggccgtgaagcaacaggacagtgtagagggaggcttaaggaataaaaatgattgggggaggcagagaatatgaaggaaatgtcaaggggctgggtggccagggagctgtggggtagaggaaggagggtttgagccaggcttctggagaatggtggtgcctctggtgaaaaggggttgcctgagaaagaacccattgggagatataaactgccaagtctgctttcagacacagggagtgtgcgatgtttttagaggacgtttggacttagggactggagtcctgcctggggcagaaacttagatttggcccttgctcatgactctcttaggggatgagtgtgcttagtgtagggcatgggggagacacctccctttagatgggaggagaagctagattgatgggagacatcagaactcaacggagatgttgacagagagccgaggagaaagtgttcccaggagggaagtgtcattatgtttgccgcagcagctggcaagtcaggcattgggctgagtggaggcagggagtggtaggaggaaccggcggggcaggagtgtggaggggaagtccaggtagytgtgcaagctcagggtgaccagaagaacagaagacctgctgaaatccaggctttgggatttagaacctgagggaaacatggggtgtcagcatgtgctggctgtgctcatggtacagcaaagtggggacatggtgggtgtacagagtgtccggggagggtgggcagtggtgagtgggawggcagcccctctgggcgccactctgtcctctgaccccggcctgctgtctcctggctactttggactttggcctccgcttcagttcccaggcttttggcctccttaaacaggaggtctttgaactcactgcctgccttgtttctggaagttcagctgtttgtggctgagcaggaaatgtggttgaagggtccaggccagcgcgactcccctcctctgccctcttgctgacctcgccacttgggcttgccttttctgtgagctgttgtcccctcccaagctggacatggatctgtggccttctggtcatagctatgttgccccaaaatattttggcctaaggtgcctgcttgacctacaggtcagtgaccctgagcttaacaaagccttcggagctatggataccacctgaattttagcctgacattgaggattagagagaatttcctgggaggtttatttatttttgtagatgaggctaacagaggtagtagatactgcttagcagcaagagaggatttggaccagctgggctggcgttcacgcctgctgtagaagcctagaggcacttgggtgggagtttgttcagcacggacttctgttgtagatcccgggcactcctgcccagctgctcatgccaacttgcagtacacagaggaaatatatggcttctcccaggcccacctacataccccggttcctctaggkgttctgctaataaatgcatcttgggaaaaagctgcattgcttattgatgggattccacaaatgtgatttaggtagtggtggcctttgcttagagaagctttcatttgtgtgtgtgacattgacactggctgttcctgcatggtggggagctaagtattagtcactttttcctagcacttgtgaacagcaccagaaaggtcacaagcatcatccatagggaacagaaaaaacaactatgagggatttccaggaaggcactgtccctcccttcagcctcagccctgagggtcgcaggcttggccctgttttatgtagtatgggctgaagggagaggggtgtgagcactgggggcggrgtggcgtggtgcggtaaaaacaagagctgttggttttaaaggtttttgaagacaggaattactttatcttaccctgtttataatgtttgagaggggatgcagtggtatggtaggcatacatttttcmacttttatcctgggttagtctaaatcatcagaaagcaacatatcccatccctgcccccaatgttccgaagagcctttgcaggcctgtgctgatgctcaaagctttggcctgtgcaaagctgcaggtggagaaagctctgcactgaggatacatctggggctgaggaggttgctcattaggttcttcagtgccctttgtattatatttggacactgattacaaattcctttccaagctcaaggccaggagaaaaagtctctcctctgatgaacttatttctgttttttgtactctttctagaactagcgtggtctcttatgcaggacagatgagtgtaaaaagaatgagtggatggatgctctgctgtgtttcccagtggagcgtcctgactgcagaaagctatctatttttataaaacagtgagatacccctgggaacatctggcttatcatcaacagcttccttcaaggggggtaggatctcaaaactttaaaatgaagtgctcatcaacagtcatttcttgtctacaccctcctgaattatcaaaaagcaagcctttccggcgagaatctagtggcttttcttccatctgtgttcctgccctatccyytgttaaggctcttccccaaattaaccataacacgtattgtttaaggcattgccctcttgcctgcaggctctatcctcctctctctattttttttctttaggtacttctggcttttgcagacacttgctccctgagaattcagtggtgactttakgaattgtcctcagaaattctaaatctctgcggcaggatctagcctccagggacttgtcagagccagcagcttctgccagtgcgtgggctcgtctctgcagagggagatcaacctgaaaagatctgtttctgaaatatatgtgggtgaccaagggacggggtgcaggggaattctgaaggctyaggggaaggtcaggtgggtttcagcagtgagagacttgacctgcacagcatctgttatccccatgagccttcatgaccagtatctttggagttttgtctatagctgaaagatttcctctagaaattttgttgattttaacctgtttgcatagaatttttttctgaaatactttgcacattaccatgctgtcttaccccaagaatgatctacgaagggactttatttatctttatatctagtgtgaactctgagatataatagtaggtgcccaataaacattgttgagtgaaaaattactgatttcattagaaaaataattctgattatttcttattgcagtgtcgaaactttagaaaataaaggtaatccaaaagtagggattccctgttggggaaaggaaggactgaaagccagggacctctgatggatacaagcacagcctgcctcctagctccagcacagcctctgcacaatgggagcttcgtcttaatgcttgtaaaatgtcatctcattagcatgttttgtgtttttatgtgatgacttccttgttagtgtttaatcactgttctggaattttaaaaagtcaagattattaattaaaaaaattaatacatataataaaatacactattttaaatgcagagttcgatgagttttgacaaatgtgtataccatgtcgtctctgtctgaatgaagatgagaacatttccatcactttgggaagttcctcatgcccctttgcagacagtgttcctcctctttactccaggtacccactgatctgacttccatcagtgtggattggttttgctgattctagaacttcctatgaatggagtcatttttttctcatcaacatttggtctaggattcacccatatttcaactgagttttgaatactgcgaaagggttacacaagcagaggaagtgtgagggcattgcacagatggagataaaaagatcagagggagttccgaagaccagaattagtttagagtgtcctaggcatgcagtctgagggggcagtggcaggagaagagcctaatgtggttgaaatagtggacagtgttgaattttacctgagccctgtactcttggaaaacagtgtggtctagaattttgaaaaatgcaaaggaaataaactttgggagtgagagaacaggggatgttgattgatttccattatcgtatcacccaggggaaaaccccagcagatatctgtgctgacttccttgggtgaccaaatcatttctgggaacttagggttgttgtcagcattggtgatggttctggggcacaaacatgctctcagccctgttgaccatttccccctgatctaaatgctgaagacagctgtgcctcttatgttcttgagtctttttttttttttttttttttggcagagtcttgctatgtcacccaggctggaatgcagtggcatggtcttggctcactgagacctctgcgtcccgggttcaagcgattttcctgcctcagcctcctgagtagctgggattacaggcatgtgccactacacctggctaatttttgtatttttagtagagacagggtttcaccatgttggccaggctggtttcaaactcctgacctcaagtgatccacccgcctcggcctcccaaagtgctgggattacaggcatgagccactgcgcccggccttgagtctgtttttaacagtgataccgtctattgctgccttgtggtcccctcttccagtttgtgtttttccttagttgaccttgctggtctcttggttttgttcttccatgtttgcagtggactgtaatgatcggaaaaccatgttctagaacgtccctgagagggtcttgagtgtggtctggaggggattccctggagtactagtgcacagtttcctctcgctacgcatcaggtcgggggagttgaatggtgagcctggagtccaggcagggtgcggtattgcttactgcttttcatgagtggtgttccccagaatctgtggttgaggtcaatktcagctgtttgtcatttccttgttagagcctgatgtaaagttgaggaaacgtgtgtggtctcatcgtggatagaataggggcctggcctgtcgtgaattctgtcaccttgctcagtctcttcacatctttagtcctgataatcccgtctgtataatagattccataatgctgatgaatctggtgaaatctgtttttgttgcttagctggggmaaaaaaagttcttggtgtgaggaatttctcctttgttgtgactgtggttctcattgcattcccctcctcccctcctcacttccttctctgcttaccgttggatttctttttggtaggagctggtggtgatgggtgctccagggtcattttattgggctggaaccatcaaagtgctgaaccttacggacaacacctatttaaaactgaacgacgaagtgatcatgaacaggcggtacacctacctgggtgagtactcagggagagaacaggtaagaaaggggaaatgggagtgattcccaccagattcacaaattattgcttcattgttggaaagaggagttagttggctttgacgcctgttgttctaatgacttacatctttagccagggcatcttcacatctagctccacaaacacaaggtagagaggaaaaccaaggagggaactgaattaaaactgtatgctttaattaaaaagctgacagttgaacctccagggaaataaacattttattttctcattttatcaattgttgaagttcagatggtcaggtaraaatgagtgtgatggagtcttgattttccacgggcgtccctttggatggagtccttgctttctgatcacaaaactggtagcaaatagaaagataagaactagaaattatcatgacagatggcaacctaatgctgaaggttaattaaaggctcagaaaaatttctcttgctttcttaactcttttaatcttctggaaagaagatagacacaatttaatgtagctatcaggcagaatgacactgggacaaggtccatgccaatttaagaacagacataggctgtctttgcttgtgtagatgacaattacaagactcttttctttaatttatgccctaaatgctataattctggattgaaagcgaagywaaatttaggaaggcctaatgatgacacacaatgctctttcgcactcatgatacataacttacagggaaaggccctgactccctttttgcatagcgtcactgggaacttcttgttaaayggggttagggagtcrttgacttgccttttcccttctaactacaagttttttgcctggtagcatagacccaacaatccttctactctggggtgtttgctcctgtaggcacccagctgcctagtgctgttgcttattaagcatttaccctatgccaggctgtatgtattatttctttttaatttctgaaacaaccttatgaagtagctattattatctacattttatagataaactgaggagcaaagaaattatacatcttgccaaggtcacatggctcctaagtagcaaaattagggtatgagcttgtggtttctgagtgcagagtctaaatgctgagctgccttccctgtgggtgcgtctgagagagcacctatcactggtactgtacttctcactgggctgggagcaccttgaagacaaaatgtgggattgtgtctcacatttggtatagtgcctggtgtatagtagtaactcaacacatatttattgaatcagggaatgaagagagagcagaagaaagcccagtttggatgatgggtttggggtctagaacagctcctttgaagcttcgagcctgtggtttctctttgtatacacattagaggctcttatcagctgcagggattatcaaggatccgttcaggctttgatctcactcagaatactcttaggtactatcagtcgccagtctgagagaaatcagccacatggtgaggaagaattgatcatgatatgatgtcatcgcgaaactcaaacaacttacaatcactttagggttagagggtgatgacaagtttggggattatatggcagcctgtacaggatttatgctggccagaggagagctttcagcctgctagcaaggctctcagaaagcaggagacgttgaggctaagcctaggcaatcttttcctttgtttctaggttccttttgcatccatattttttcactgaccaccctcccacccatccacccatccatctacccaaccatgcatctacccacccacccactgacagcttcttttgccttcttgtaggagggagtgtggttaacagcaggggctttagaggcacagattagatttgagtcttgctgtgtgatctttggcatgttgtttaacaggtttttctaattctgtatctgtaaaatggaagaaacagtcatgccttcttcataaagtttttagactgaaagagatacctaaagacatgcataaaaatgttggtagcaaccttgttcatattaaccccagcctggaaacaacctaaatgcccrgcaacagaataaacatatgacatatttatataacggatattactcaataataaaaagaaactactactgtactcaacgatgtggatgaatgtcacagatgttatgttgagtgaagttcaagaaaaggcaaacctaatatatggtgatagaaatcagaatagtggctacctgtgtggggcatattgactgggaaagggcatgagggaaccctctggggttatggttctgtggttatagtcacttccttgatctgggtggtggttgcatggctacgctcatgtgtgcattcattgagttttacacgtcagatatatgaccttaccgtatgaaaactatgccttgaaaagaagaaaacagatatatagtatttcatacagtacttgtccgaaagaagacactcagaaagccctctttcctgccctgatatccttgtgaacatgactttttgtgagatgagagccatttcagcatgagaaggttgacagctgccatttttttcctggtagtttatgttccaagagtagggagcatgcttgagaaacattttcctctgatggatgtttttttttcccttcccttctttttcaaccgtgtgcttggtttccgcccatcctgttcaggctacgcagtgaccgctggccacttctctcacccgtccaccattgatgtggtaggaggtgccccacaggacaaaggcatcggcaaggtgaggagaaacatctgtggaatagctggggtcagacagaagaggggagcatgctgtccctggtgcagaggtttgccagctgacattgacctgaacattctactgggtggctggtggggaggtgatgaggaaccccctgactgccccactccattggaaagtttcccttgaaagctcaattagagtgtgagtatactcacactctcgatttcctgcacactctcatctgaggtttttcacagctgaccatgtgtgtgtgtgtaatttataagactgagccctggccttatggtgtccttcaaaagaatggcatttagtgctgtccaacttcaaatcccaaacccttcccaagtttggctttgatttaatggagctaggtccagtctcagatatctttgaggctttattcatgccccaaattattctcgtatttatttccccagtgtttgagaaggaacaytgggttcccaagactggttcagcccaaaggctggactggaaatatgtgggtctggctttccctaaactatagtatctgccaaaaaacccaccccctggatctagggctgcctgaattcctttgggaaacatgacctctgaggggcctgaattgtgaactacgcttgttggttctttatcatgaaggtacaggaaatccagattgagtaggtacagatggatcaggaacccacatttttaagaagctccataggttgtctgatgggaaagactgagtgaacagaggaatgaactttggatctggacctttaggggtagacctgtgatagagtctggtcatatctcccagggcttggagaagtggaatctggattctggattagcccagatgagctgagaccactggtaattggagccttcagccaggaggtcaggatgatcagggagctgacgaactttccagttgactaggcttgactaaggataatttctgtggatcctcctgggcagaggttaggagctgctgctcacgtttctggascatgtgcctccctcctccctaacactgatgctgtggaaagaggttcttcaaaactgaaaccagataaaccagggccctgagctggcagggaggagggatcaagcaggtgaccttcgatcacctcaagaaagaggtggttctttctgagttgcatgaatttatctaagtagagaaagaagcactgagagctgttcacattgatgttgtcttcttggggaggggctgcgggctaccgggcatctctgtagaaatggtaaaaatgcctacgtctagttcacagtgatgcgggtgcctctatgctaatgatagcagctttcttttctccctaattgcagaaaacaygayccagttttatagtttttccttcagatgattgtgatgaacttcatagtccctgtcaagtcttaagatgacccctccgcaaacccctctcactggctatctggggggtgcaaggtataaagttaaaaagttgagaatggtacttataattgatagagccagacagcgggactcctggacccagtttataaagtacataaaaatgcttctttcaattagaccacctgagaggcatggggaaactggtcatagtgacaaagttgctgacaattccacattcccagggattggggctagtacagacttgattcccaaggacccctggccttcaggattttgctggatattctagtgtcagggcacaaaagcactcacactaagatggcagttccttatctcatgggaaggttatttacactggttctcatgagacactcttcccacgagatgtaatccaaaaaaaagaacttccatagtcaagtacatttaggaagttaaatgtcagtgatcgtctttgcagtggcgatgcatagttcacatgaacatgctaaaggctctaaaaagttccacagtcaaagaatttacttaatgtytaactccacattycccaaatgaaactcatttttacccaggcagatcacatgactctaatattacgtgaaatcactttgggaaactgctttgtctacagtactcatctccacctatccctttatcttctgttgtaatgcctggtaaagtcttactgggaataaagtccaatccataccaccaactaattttaaaaacaggaataaaggaaatatttcaagaaacaaaatactagctttttctcagagttgaattgtttacttgtaatttggaagcttcttgggtcttattgtgtgtggcttttataagtattgtggttcaggagcagtggaggtgatgtctgcctcaggattgaaggacccttttttttgcagggctggtaaaatgacagctgacttcttcatgatcatcagctagcataagcacatctgctgtgcacctggctcttaagcttttaaataggactcccaggagagtgctgataaatatctttgatcattgatttcatcctaactagattttttttttttcattccataggtttatattttcagagctgaccgaagatcaggcaccttaattaagatctttcaagcatcaggtaaaaaggtgaggttcttggtataagtgactattttttatttgagagatgtgatcatgtgggagtcagtactttttagaaaattggtttgaaggccctacctgtgccctgtgtttatatggcagtgctgtctgcttgttggtgtctttaccttctcagcggtatgtgtaatctgtacattcatgggattcatactcgctttaggagacattctgtagcaagatgagttatatggggccaagttacagcacagagttttaagagattgtccrtagttcagactgtcatcaaagtgactgcatgccctgtctctctgcctccatcctttctcaacgaatctccacctccagagagagcagatctttctgagtacaggtagcaataaatgcttctcactgagcctgtttcaccagcccaacattacccccttccctaatcctcagccctcaactgtcattgccaaggtgactgttgccacacaaagaaaatccaaacacaggttgcctgattcctcttagaaccttgaagcagaaatagctcagggtgctgccctaaagttagcctgggtgagattactctgcctgggtcctccccaccctgtccctaatcctctctctgctttctgaaagtttccattatactgccctgttgtctaaaattaagccaattagagagtcctgctattaataagcaacagttttcatgagcttatcagtcatgcacttcttgtgtggcttagatcagcaggactgtttggctgagcttggctactctaagggacacaagtttaggctgggagctgtgggggtaatttggaggtcttggtggaggccttagtgggatctgggaagaagcataggatgtctgggacatgggaggaggccatgtgcctccycaattctgttcctgccgagttagaactgctgtacgccagcctaggatccttccatgttgttctcccattcaagtagacctttttgcaattttaacwatccgaataggtacacttagtgtataattgtcattatcttttgaataaaaaatgcatcaccaaacttggttttgcatttttcctcagaatggctctgccttcccgagaactctgctggcttgtgttattttaacatttccaaaaccccaaagcaacagcactggaaaatgactgtgagccattctgcaaaagggttttccaagcacccttaaagttagaaaagaaataactctgtgctacttgtgatttacaaaagagagtttcaaagagcaagtagggtatgagtggaattaaggctaacattttagatcttctgcagaagataacaaatgggtgaatgtatctagcatggaaacaatctccctcttcccttcaaatgtacctgggtttgaaagcctaaaggtaaaggattcctttttttttttttttttgagacagagtctcactatggcatgatcttggttcactgtaacatctgcctcctggactcaagccatcctcctacctcagcctcccargtagctcggaccacagacatgtgccaccatgcccagcaaatttttgtatttttttttgtagagatggggtttcaccatgttgcccaggctggtctcagactcctgggctcaagggatccacccaccttggcctcccagagtgcgggatgataggcatgagccaccgcacctggccaaggattatttaaaatgaattgtggagtttctgagtatctttatgttcagttgtagctgtgcccccccaaactgcttttccttccctgccctactccttactgtctgtgccctggggaggtccggttaattcctattgccttcgagtaattaacaatctgtaattgtgccctctctcctccttgaaaacctcttggtttggatgagaacctatgctcaagttgatcaggtttttgggggtagatctgagagtgggtggtgcaaggaggatgagattaacctttgagaacccacttgtctaaacttcctgaagacttctgccattgagttccaggacaggttcaggcctgaatgtctgcttggatgtccttatcataccaagatacatcaggttccctgagaagggacagaaaggcccaggtattcaacttcttggcttcgtagccatttgactttttcttttctttagggctcttctggccctaacctttgcaccattccataggcaccccttctttctgccactcactcacagtcctcttgccttcacttccttctactagtgtctccaactagatttaccctgtcatcatcgttctgcttttgaaataggccatgacctttctttatacaacttattctacttcttgccagaagaaatgagacattcatgtctttctgacttctccattacctcctacaaaaggacatgaccccaggctttcaaaggatgcctttagatttatccctatgtccagagtyacatagacaggagggttctaactcagcaaaccaccggttcacttctgcttccgtttggctagaatttggtcagatagttctgtatcctggcttcctataagaagaaacaaagcaaaaagattaaaaaaacaaaaccaaacaaaaaaaacctggttcttgtctttattggttgactttctccaaatagtacacttaagaaatcaccaacatgtgtgcagttcagatgttaatacagacacacatctccacatttccaggctgatggggagctctgatcatcggacacacaccccaaagcatgtcattgccatattgaagttttattgaattaacggagtatgtgaagcatttgtatttcaaaactgagataggaaacttcacatatagagatttctaatttaacattgatgaagatgccaagttaaatagtcctttggaatgaaacaaatagttcccctggggctcagccagtgagcgcagccagcagcttggctctttgggtctttgcctgtgtcttactgatttcttttaccaaagctcagatggggagattggcaaggccactgaaatagtgactggcaactcggtttctttcctcctcaccctytgtgatttcaaccctttcctgctccgttctcctttgagaatgggtaatcagaggggaggaagatggccttggcatatcactggggaaggatttctgagcggccactacaaagccctcctgtgaccctgttagctgcaggaaatagattggagtgtcctctacctctctccctcaaackccctgggtcagctgccaacaaactccaacagtaaaagaaaaggcttgktcatgtccatcaacccaggggccttttattagaaaacatttattttaaaagaataatgctttttctctttcttttcttttcttttcttttcttttcttttcttttcttttcytttcttttcttttcttttctttctttctttctttctttctttctttctttctttctttctttctttccttccttccttccttccttccttccttccttccttcyttccttctttcttttcttttcttttcttttcttttcttttcttttcttttcttttcttttcttttcttttcttttcttttctttctttctttcttctttcttttctttcttgacagagtcttgctctgttgcccaggctagagtgcagtggcatgatcttggctcactgcaacctccacctcccaggttcaagcgattctcctgcctcagcctcccttgtagctgggattacaggtgcctgccaccacgcctggctaatttttgtatttttagtagagatggggtttcaccatgttggccaggctggtctcgaactcctggccttgtgatccacccgcctcccaaagtgctgggagtacaggcgtgagtcaccatgcccggccttcttctttwatttttttttaaagtagaggttgcaaactgacagcctttggaaagaatacagcctacaaatacttttgtttggcttgcacagtatttgtttattgtttttacacacgaagaagttgcgagcatttaaaacactggcactttaaataaagttttaaatttttggcttcttttggaaaatggaaaggttgctcctctctgggtcagcattcctcttggtggcagttagctgcagctgggttgaagctgctcctttagccaggcttgtgggctccagtttgccacagtctccaccactccctattgttatgtagacaaggaagacaagtgtcacttgccacattaattttttttcttatgcctgttatatcacctgcctggatcctgttggtatttgggtttgagacccctaattaagctataattaaaagtcaatattatcttgctctgttccctcatcagttaaacagtcttaaaagttgtacctttttctgtcacttcagctcatgccttcctaaccaatctttcacctgtgcataggaccaggagagaataacctatttccccatgtaacatttattttcatgcctttcttgtgttgtgagatttcatattcctacttgcttggccttgtcaaatgtctgatataaggagcatttttattatggttgtaacataactttgtgtcctcagcttgcatttttaaaaacagcacctcattctgtgggcatcaatctatttatcttccccttgataggactccaggaatgggggactttgggccagttagctttgtctcacattgactggggccctgccttgctgctggaagttgggtatttcactctttgctaggcattctggtttagggggcagcatagccatccagcctctgagggatgtttctttttttttatgtttttattttttagtatacattaagttttagggtacatgtgcacaacgtgcaggtttgttacatatgtatacatgtgccatattgatgtgctgtacccattaactcgtcatttaacattaggtatatctcctaatgttatccctcccccctcccccaaccccacagcaggccctggtgtgtgatgttccccttcctgtgtccatgtgttctcattgttcaattcctctgagggatgtttctaaagccaatggggtggaggaaagcgagggcatccttgtgtgagagcagacactgaatgctttgttgcaactcaacttggttgcagatgggctcttacttcggctcctccttgtgcgcagttgacctgaatggggacggcctctctgacctgctggtgggggcccccatgttttctgagatcagggatgagggacaggtcactgtctacatcaacagaggaaatgtgagtacaatactgggcaatgtgcggatgggtgtsggggagggacatttgtccagccagcagtggccgagcacccctctgggccggcactgggggcaatgttacccagaggagatgaaaatatgtgatatctgtcttgaataagctcaatggcccattaatggaaagttatatacaatgttacaactgcagacacccaggggccaaggaagaatcttaataattgtcttttgagtgcttactatgtaccagggactcttcttcctgctttctgcgagagatttctatgcaatatacacatggtatcaagggtgcccatttttcaggtggaaaaactgaggcccagagaggttaggtaatgtgtcccaaaccacacagctaagaagtggggctgggatttgaacctaggcaagctggctttagagctggcatgctttgtctcaaggttatgccacctctctgggagcatatgcacattttcccagggaagcagaggaggacacaatggctggggaatcttgaagaaggagtaggagttagcagacaggcagggtgggctggagcagagctcccagtgcagagctgggcaagtgggttggggtgtgaggtggcatcaccactcatttcagcatgggggggcaggggactgcatgggaaccataatctttttgttcgtttgtttgttttgaggcaaagtatcactccatcacccaggctggagtgcagtgacgcagtcttggctcactgcaacctctgcctcctgggttcaaactcttctcctgcctcagcctccccagtaactgggattacaggcacttgccaccacacccggctaattttttgtgtgtttttagtagagatggggtttcaccatgttggccaggctggtctcaaactcctgatttcaagtgatctgccctacttggcctccctaggattacagacgtgagccaccacgcctggccaataatcttggtgtccyctattctgcagaaccatgaaagggacgtgacatggacagaaagatgcctctggccctctgtagctaatggagggtgggtgagtgggggctgggttgggggacagcagtgcatcgtggaagcaggagaccagtgagaaagcagtcttttcaggatctkgaagtacaagtgttcaagtacaagtattcagcaagaacaacatggttcaatgaaaacattctggtgccgcctaccttttctctaacatgagaaaacgcttatggagataatcagtggaaaaatgggatgaaaactgcatgtacaaccagtcctcagaaatatgccaaatacatagaaaatgtgaataacagctctctggatagatgtttagttttatctttatccaaatagtgagaatataatttcatatttwaaaaaatcgaagtgtactgttaagcagtggctgagatgctaggtatcccagttgggagagggcagaggtttagctataactaagtgggcagatgccagaaaggaaggaagcagtgaaaggagagccagggattgttagagccttatgttgcgtctgaggttttcaggctcttcaggaagtcagatctaaaaccagggaggtttgggaggcccaggtgggaggatcacttgaagccaggagttcaagaccagcctggccaacatggtgaaaccctgtcyctactaaaaacacacaaaaaaattagcctggtgtggtggtgcttgcctgtggtcccagctgaggctgaggtgggaggattgtttgagcccaggaggtggaggctgcagtgagccgtgatcatgccactgtactccagcctgggtgacagagtgagaccttgtcaatcagttagtcaacaagccaacaagcaaggtgcagtggtggttgcytaggaggctgaggcgagaggatcccttgagcaccggagtttgaggtggtagtgagctatgattgcaccactgcactccagcctgggctacacaatgagactctgtctctaaaaaaaataaaatatctgggagggaaggtgcttattggtacctgttgcaggaactcttgkcacctgcatacccactgacattccaggaagtcagggcagggtgcagggagaaatgaaggggacattaaataaatgagtgctgtgggcattcagtggtgcctgccattgtatttgcaggagactgagacatttgtgtaggagtcaggtccaacagccagactgtgwgtctaaatcagaaggtggactcttgaagcacaagaactcccccaggcctccactgggcatgatgcacccacaccctcccctgccaaccagtgtttcttgatgttgtatggttattctaagtaccagagtattctcatttctgttgaacatcagccatttgaataaagatcggaaggcagtgtggagtagtggaaaaaattctgactttggagcaaggtggacctgagtttgaatcttggttttgccatgtcctagcctgtgtgatgtggacaaatggcttgaaattggtggcccaatttcctcatctgtaaagtgagaggcatcataagatcttccttatggagtcattgtgtgatttgaatgaggagctggctgtacagtacctggtacataggagcaatcagttgctggtgttcctctcctcttccccactacactgaaagaaagaaattaatgcatatttgtgttttggggtggaggtttcattcayccaagaaatcatctcaccttgactgttttcaaggtgtaaattgtgtttatagtgaaaaagaagacttggtcatgataaaagccagacactcgtgggatggcctgtaggatatagtgggcccagactgcctctgcactggggaatgcatacatcttctcatgtctcaggacatcagattgcattgtatcactctggtcttcatgtgtcagtgatttggggtgagagtaggtatgactttttcccccaagttagatgacttttcctgcctttgtacaccattaaccccctccctctgttggttagtattttctcaggaaattcatacctgagccatgcatgaataataggcacagtgacgtctgccatcacagccaccctctggccaagaacgactgggtgcttggattttctgaaccatgactccctctatcaagataactcatatatgcactttgcaaaacagttttataaacttgtaccaaaaggcacaggaragaaaaaatagaaaaatgtatacccttttaaaacaacattggggaaaaagtgctatgccttaaggacgtggagagcacatgggggaaaggtgggtagggaggtttgcttgtgtgtagtgtattaggacaaggcagagagtgtagtcattggctaccatgacattctccttccctcaaaaatgcatctcaggctatgggagaccatcctgctaagcaggtaaaagggackcattttgccagcaggagagagaagtttgggttcctgtaattctgcccaggtgtttcctgtcaatgagtgtgctctagcagggcagcattcaaactctggttttttattgatttttattgtttgttctgtttgtttttgttttgttttccattttctcctccatcctgtttcccagggagccctcgaggagcagctggctctgactggggatggtgcctacaatgcgcactttggagagagcattgccagcctggacgatctggacaatgatgggttcccaggtgagtgagtgctcctggtgcacggagcccctccaggtgcagcacgctgctctgtttcagaggggcagcctgctcgctgactgtccatctctagtggcatgctcctgggtctactgatccccttcgaaggcccatcaatgtgctgtggggagataggacacgtttagaggtgctctccctgtagacacgcagggctgagcttccagcccactggagttttgcctctgcataatcccttctcaccagctcagtgttctttgttgtttgcagtggaagcaaaccttggggctggtccrtttgggacttcttatggcaagaagtttgaatagcttcatcctgccatcaactctccttgtttctgagcctttgatgctccatcaygctctaccatgttgatggggaaatgagtgaggagaraattagaaacccagacatcttctgcctgattatagcagcagctagattgacttttgagagtgtacgcktgtgtgtgtgtgtgtgtgtgtgtgtgtgtgtgtgtgtgtgtgtcttgggaggcatggaggcatatgtacctaatgyctaggtctgtttggacagcagtgttcctcacagcctcttggcctctctctctggcttgtttgagcctcttcacctcgctgcatacacagcatacagacgtcgggaggcagagcaaccatgtcaccagggcatgtggtggtggaggtggggcaacccttgcccaggccagccatccagacgtctttgatacctcctaccactggctacagtgggcttyattttcctcccccttggcctcacttctgcagacacatgactttgttagaagcaagggaaaaaagttaggaagatctaggttttgttctaggagttgccagtttgtgagagtaatgttatttcttgtgtgtgaagtgaatgcccttctgtatatttcctttatccaggaatggatttattatcaaataataataaggaatggtcctttatccaggacctcagactttctcagttacacaatagccattgtctatggaattctccctgatggaaattatggcacgtagtttatatttgcatttcttttattggatgggtcagtggtttttcttacgagcataaggtagaaacttttttggaactaaattcttctcagtcagcttctatagttttcactgkacttttttttttttttttttttttttttgagatggagtctcactctgtttcccaggctggagtccagtggcacaatctcagctcactgcaacctccgcttcccgggttcaagtgattctcttgcctcagcctccagagtagctgggacaacaggtgcgtgccaccacacccagctaatttttgtatttttagtaragctggggtttcactatgttggccaggctggtcttaaactcttgacctcaggcracctgcccgccttggcctgccaaagtgctgggattacaggcgtgagccaccacactggcctacttttttttttttttttttccygctgagggatcttgtscccaaattaatgcttgaacaatcaacaaccaataatttctggtatccagggactcagacatrrcaaccagaattagggaagctgcacttgtattrttaatgtggctttttaacccatagctgtttttttaccctcagatgtggccattggtgcacccaaggaggatgacttcgcaggggcggtctatatctatcatggtgatgccrgtgggatagtccctcagtactcaatggtaattagtgtgagagtgatatggcaactgttcatacattcattcagcaaacatgtatggaaccttcattatgcaccatgccctggaggtacaaagaaaaacatttttcttgccttggcmttcctacccttttgtgaaagatacaattaatattgcttattaaatactaaaaaaagcattcttagaatcccaagttcgctaacactcagggatgcattttgcctaaagaagataattttcaactcttactcagagttggagccatttatttaagaaaggaaaggaagctttctctttttggtgactactttgtcaaccgtctatgctaaggcaaaggaatatgttttaatatataatctagaagaaaaatggtccatggtggaggggcctgaaactgatcacagactgtcgtcccagctggcctcaaaaccaggagccagttaggactctgcgcttgcgccctatacttgggaacatggaagtggtgagttctgttttttgccgtatcagcttggtgttcaatcttgctgatggtgtcaagcccagcccatgggaaaaaaggaagtcatgctctcagcagaagcattgtcaggatatttgtggatgtctgcctgtggagtggcactggctctggtctttctcccagtgggtcagagacagaaggggacacacattgagaaatttccaatcaacaaatatttatttattgaacacttactacatgctgactacttcctactcatatgtatttgtattttaattttaagaggcagcaggtaaatgcaagtacaacttctacatgaataattgtccttggcagatagagataaactagttaagggtggagggttggttggttgtcattcgtgcctyagatcccctctctactggcctcctgctgagctcagtgcctcacctgcaggagacagggctttgggaggcgctgcgaagaggagggactgttttttgggtgcctactctgccctttctttacctttaatcctcgcagcagccatgtaagatgggtctgtttattatccaccatttatttatccacgaggcccaaggaggttatttaacttgcccaaggtcataagtggcagtatggccacagaatctttgccagtctgctgcctgaaacttgttatcgtaaccaccatcctcaactccacattgcaaaaaggaacgctcggaaactcagtaggaaaacttasgaatatggaaactattttgccatgaggcatacatastctgaggggcatttatctatccagaccatcctcttttcattagaartacataacaggagattaataaacttcggtgattcagcccacaaggcaggaggaagagagctttgggcacagtttgggggccacatctgagtcacaagagctgccctaggctgcggcagggatgctcttcccagggtgacaagctaaaagtcacccaaggagccccgtgctcgggcagcggtcagggtcattctccacgcatcctccgggaagcttgttttcctggacctcggaagctaatcacacagtgaggcaacctgtgagagaccccagcttcccctcctccggggccctcccagtgttttgtttggttgctgggtggaatccctgtagagaaccacagtataactcttgtggttagcgtggagcgtctttagtgggaagcagggatagcatctggaccagcctgcctttgtcagcacgcaggctggctcctttgctttgacaaagagaagtggttttgggctcttaaggaaaaaaaaagaaagaagcaactatgactgtacgttcccaagctgctaatatgcatatgataagggcagagatttaaaagaaaaaaaattctttaatggcagattcttgcaggcccaggtcctggacagagcaggcattgtgtgggtgaactagaggaaggaatcagaaacaactctgggcaatggaatcactttgctttggcccagatttgtattatttctgctgggtaaattgtgagatcagggcctacacttcttccacattgctctttaactctctctcgagtttaccacggagagtgtttattttaagatccttgtgtgcctttcccaatgtgagagccctctgggcatatggcggcccctatgatccttctcttgctggaggggacactgcatagaaacctggtcaagtggaggtttccagggctcctggttttcatttagggttattagcactgggcagacttatcttcttggcttttagcataatggcctgcagatgtctgtgggataacttaascctgcatcaccaccccagatggaccaccccttcgctctgcccctcgtcccagccacagcataccttagaaatgtagatccaggggcaggctgctgctagagttcttggacttcagagccaagagggtctgcttcaaaacgtggcttttaagaaatgtgcagacacacgtacatgtttgtktagacagagccatgtgggatgtagggctttgcctgttagtgtgaaacatttcttcagtgtttcctacagtgttctgatttgtactttggtgcttggacatttcctgttggatggcttaayggaggatggcaagcagccttctctgatcacttctaggagggttatttgcagttatcagctgctgggggtcagggggcatctctcgtgcctccatctgtagatcctgtgaaaactcccccctccttgccttcgtgacttctctgcaggatgactcgggaaagagaaggataaggaaagaaagtcaaagtgagcccctagatagctgtaaacctggttctattgtactttgaaaacaaagcatttctcttgtcctccacagtgaggrcatcaggaagtragcctcccctgggggaccatgcagataaaggcagaaggagtaggtcagaccccagaagatgggacttttctgattcaagaagttcagtatctttgtgaggaactgcgccacacgaatgttgatgcgcagcttcagtgtgacaaaggctgtttgtacaataaatattgttgaatcagtgctgcctgtgtggatatgtgatgaacttaatgatgaataagaagtgagcacagccaggagtggtggctgtaatcccagttccttgggaggctgaggcaggaayatcgtttgaggcttggagtttgaaaccaccttgggcaacatggcgagaccccgtctgacaaaaaaagtaaaacagctgggtatattggagcatgcctatagtcccagctacttgggaggctaaggcgggaggatcacttaagcccaggagtttgaggctgcagtgtgctatgattgtgccattgcattctagcctgggcaacagagcaagactctatctcttaaaaaaaaaaaaagagaaagttttttgtttttaaaaaacatataaagtaagcatagatgctagtgtgtcccatggtgaagttgtgaactctggttggttgagggggctgttttctagagggsagggcagggcatcttcttcagctgagtgcttttgatttcctacagtttaagaagtgttcaggaccatggagttctagatttactgggtaaaactgttcactcctgtctgtgaagctccagaatctatagatcatctggttggctggatggagaggtagtttccacatggccatcttttccagctggacatgttaattacctgtctgtctagggaaagactctgtaatgtgtgcctcttaggagcagagtgttaaatatttagtacatatttgggaagaaagatacaagctaaatatgttcttagaatttcagccagctacacctgtgtaaaaacaaacagaacctgcattaggaatggaagttaaactttatccattttgaatttcaacatgtcaaaacattatcatggtagtctaggtggatttttttcattaacacagaacttagaaaaaattttaaatgatgacgtttggccaagacaagtaataataaaggagtgtgtggycttcaactgcctgctaaagacttgctgatcacattaggattactttttttttttctttcaacaactttaasaccaagtgtcctagggaagctggaataaagcagtcacagttsttatttgtgactgtggtcttttcctgtgactccatttccctattatctgtttcagaaactgtctgggcagaagataaatccagtgctccggatgtttggtcagtccatatcgggaggcattgatatggatggaaatggctatcctggtaagctgtttttctttaaaggcacatgagataaatgaagataaatgcatgaagtagaataattttcagtctggttagcaatcatcacatccatttaggattaggacaattcacacaatagaatagggtgttttgcctggtgttcaattttaaggtgaaaataatgttgatatttattttggggttttaaactgatctactctgaatggcttagcaccaggagggtggatttgtgtagtggtttctggggcggtaattctaatgaagaaaaaaagcactggccacatctaaaatggttgaatagtgaaacctcatgttttcctttgtatttaaccacattcaaaggcttcttactcttgagagggaaaaagakcagcacccccaccgccccctgcccctactcttgaaataaaatgatggagaaagatttggagttaaaagaaaaccaagtcctcttgcgtgtggacaaagcagaccttcaccattcaatgctggctggcttggctttagagttaattattgcctgtggtggttgtggctaactggataaagatacatgatttcaaacccaaccccaagtgatatctggcctaggtcaaattgcctgggtggtggagtagtggttcttcaggtgtttcaagatggagtggggtaaggtaaggaaacaacagtaagaatttgaaaaaatccagaatggtcatggaattcaggaaacatttctctaaattttatagtcatcttgcttttgagaaatatttctttccactaaaatttaagaaaactaacgcagtcttgtatgaggacaccacattgtgtawttttgtacagataggagttttggaaattcctcaagacaacagagccaggaggaagtaagggaatagaaagaagtcagtgttgaagcttttgtcccaagaaagacccttgtgggcctttttaagtttgagaaagcagttcttgttctggaaaatttgtggccatccccaaataataccttatatgggtttagcatttaatatgtacaaaatgcttccacatgcaatgtgcatctcgcagtgaccccagcaggtaagtaggatagggtgttttccccactttataaacaaggatgctgagactcattgtgaggggctgcccagagcctgcagtgcacggggatccatgcttcccagtggttcagctacttttctgtaaatgtgaggtgagcaaggtgttcacagttcacaatggatctgaatttctgatcttgtgtttttcataagggaaattgacaaattcatcaggttcttttatttttaaacatatagcaaatttaaagactattgaagaacaaaattgatacaacacccaagtggagaaattttaggaacactataattcatggatttgccatttgtttttccctaatgagggcatcatatagatgctcagtgcatttagtgatgtacagattcagaccctcttggactcagatacttggttctgtgaagtagtagtgggaaccccagggccagggatttatatggccgggttggggtggtagggagaaaggcatagaaccactggaagagtaagtacttcctaaattaaagttatttaggaataaacattaccagttaaaccagggtcttggtttatagcttaccaagtatttccatgaatttactgacttaaatatctgatttcatatatttaataaatatttactataaatctagtgggtacttaatgaatattatataatgactaataaatattttctgatttaaatgtaatgaaatattatcagcttttgaagaaggcccyggggataattatcttcattttacagacagggataccaygagatactcaggtcacatagagtgaggggtggagggtgacaattccatgttcttcagaacctagagcattttccaagagtcactgaattctaggtatgtctttctctaattcactgatgtgaaaagaagtataagccatatgtgtaatctaaaatattcctgtaattacataaaatgataaaaaaggtgaagttaattttattaatttttttagcccaatatagccaacatattatcatttcaacatataatcaatatgaaagttattagtgaggtagttaatggttttctgtactaggtctttgaaatgtggtgtgtagtttacactcacagcacctctcgactgagactagccacatttcaaggccccagtagcctgcgtagggattggctgccacgtcagagagtgtggcttccattcttacaagatcattgtatagcccagacagtggtcgtctgagggctctccggcctcaaggctgggtctccatccttgtgagcgcattcccagggcgcggttgtgtatgggcttcagcaagtttctgaacgctgtaaacttctcattttcagatgtcactgttggagccttcatgtccgacagcgtggttcttctcaggtgagaggccccactcttgctccttgaattgtgctgttcagggtgagggatggagccattcaccattyatgggctctttcctctgtcctgttccttgtaggctggaggtgcttagtaagtggaaatgctaccttattttctcattctaattattctctatcccagagtttctagctgtggccttgaatggcttgcaggtatgagatgataacatcctgggagcttctaggtaggggttggggtagcctaactcttaagcctaaggtaggggttggggtagcctaactcttaagcctaactcttaagctatttgcttttggccaagaaccttccrtaatgtgccataaaaatattttataatttcctgcgggtgctgggaagcactgttcattctgtctcttcatctgtacaccctgcatttgtacctccagtcagtccacaacaccctggggaccgggagcctcctgcccgttagacagcacgtcattccctgttggctgcagaggtgagggacatgagctgaggcccagagcttgctgaggcccgtgcagtctgcatctctcctgcaaaggccagtgggccgccgccaccacccgtgaaccctctccaagtatttctagctgtatgagtcagaggaggcagaattacactttggagtgggagccaattcttaggttttgttaataacctgatggcagaactttctaaaatagactaataggatctcagagctggaagggatcccagaggccatgtagttccacaccccagatccttcttattcagcggtaccttctgctggtctccactgcagggctacacagcctcctgtttgagtgagatgccccatgagtgggagcccagttacttctaagggaaccagcttgccccgggtaacattaaatcttgaattattaaagaggcagaagagccttgaggttgaatgtgaactcaggggccaggtggcygggttccagccctgactctgcccttactaggtgagtttcctgggcaagtcccctgacctttctgtttcaggattctcctctgttggccaggacagcaatacagatgctccttgacttaggatggggttatttccagataaatccattctaagtcaaaacatggtagtttcaacttaggatgggtttatccagatgtagcctcatggtaagtcaaggagtgtgctgcattcctatggcttttgcaccgttgtgaagttgaaaaatcataagttaaaccattataagtcggggactatctgcagtacatgtaaaatgttcagaacagtgcctggtttaactgcttaataaatcttagcaagtttgatgtaaattgggttaaatttgcctccctaaaattctgcttctcagtcttgtgtcttttatrtagcaaccctttagtatctgaagggggcaattgtgtcccccaagtggtgacttcactaagataaggcctccctggttcctgtaattatttcccatgtgactggattttcactttctttatcagcgcttcctctggataaaacagcttttgtggctccaaatgattgaggttagatttgtgaatctggttgctctagttggtgctttcatgatgtcatctttgctctcttcattatcctgagcatcttactttggtttgtcaggattcttctcaaataaaacacactcctcaacttttacagttgaaaacaggctttttttttttcttcttttctttttttgagatggagtcttgctctgtcacccgggctggagtgcaatggtgtratctcagctcaccacaacctccgcctcctgggttcaagtgattctcctgcctcagcctcctgagcagctgggatcacaggtgcacaccaccacacctggctaattttttaatatttttagtagagacaggtttcaccatgttgatcaggctggtctcgaactcctgacctcgtgatcygcccacctcagcctcccaaagtgctgggattacaggcgtgagccattgcgcctgacccaacaggccctcttaaaaccggggccatctggctgaaggtccatcatatagactctgctttctcatcattcttgtrttttttaatcttcctgctgtgagcttaatccaaagggtattttctttttctcttcttcatggtgagggacagccttctccaggagtttgctcacatatggatgtaaagtaaagcgaggcagttacacaatgggtgggagaccccagactccagcctaggatggagggttgaatctggtgagttggagctcaacagggacaaatgtaaagttcttcaagaagaactccagggagagcacatatcaagagaagagacctaggagaggagcctggggagccctgccctgaataagagcatggaaggcccaagaagagtggtcgggccatgacagctgtagagtagcatgcaaggatgttgtggtcacaataatccattatcttattcattcagctaaggtgcattgacctgttgagatgcagccatgcatcagatcctggggatttgatgggaaacctgacctagcctgtgaccttagattatagccagagagccatatgcaagtgaataataatgcaaccaatgtttggtaagctcctaccgcatgcctggcacagtgtgagcacttcatttgtgttcattctttgttattgttttctttctgtattaaggtagaatttgcatgcaataaaatgcaccaatttgagagtatgactccatgagttttgaccactgcatacgctgtgtgactaccaccccaccacaataaagaatacttctgtcaccccagakagtttcctygtgcctctgkctggtcatacccctctcctgatagacaaccactgttctgacttctatcaccatagatccatcttgcccatkctagaatttcacattggtgggaatatacagtatggactcttgtttctggcctcttttaatcagtgtgatgcatttgagattcgttcatgttggtgtgttgcttgtttttccccttactgagtagcactccattgactgaatatccttgagtttgttcatccatcctcttgttgacagaacacatgacaactcttagtcttcttaacaatccatgacataagtggggctgttatccccattttatgggtgaggagaccaaggacatgcagatcttattaatataaaagggaaggtgattccagatggtggtaggtgctgtgaggattctaaggcagggttacttggtcaggcartggtgtcaaagtcagcaggaagggccaagcagagtgaggcctgagacttgttggaggtggcagggggaggtcaggggtgcccttggctgtggtggctctagagaagtgatggggcaaaagccagatggcagtgggtgggtgagagaagaaacaagaaggacagtgactcttgactgcttctccagaagcttggctgcaaaggagcaaatgggaccagcaggtagttcagggaggtgttttaaggacgggaagctctagatcagtgattaggccaagaacgtctttgagccattttctggtctcccaagtcccttaccctcttggaagagatcagaggtggtcaccctcagcttcrccctcatctatgtgaaccctgatgccctaaccctgtgcctacacccaagggtcctggagaggttgaagagacaagagggaggatgggaggctgctccagrgatgagggatggggggatgaggttggtgagagtgatggaatctggtacatgggctgggggcgaggggccctcatcttctgagccaggccccaagataggaataaggtcagagcaaggttcagttccggtacatgggctgggggcgaggggctctcatcttctgagccaggccccaagataggaataaggtcagggcgaggttcagtttgggatgtggatgaggatgaagcagagggtgaccaccctggtctattccaggaggacaagggaatcagggagagcagggaaggcttcaaagacaggctggagcccctaagagaggaagcaaggtggggcaggcaaaggggttgctgagcatgtctgaggggccagcaggctggatgtctgcaggggcagccgttgataaagtcccaggattcagctgagcagcagtgaaggcctggaggcatcagctggctatgttaagtaggggcttggctcagcctggcctaactgatgttagattttgagttactttaggttttgggtgggactagaaaagcagggagrgctaggagaccacgcatgtgcaagcacacatagatatrtattgcccatcgttcctaaccctcctaagggcaggaggccagaggtatgtgggttaggaatgctatgggctgcagctaagagaaaacctggctgaggctttcaactatatgacctcaaattagctccctggagrtaggtggccccagggctggcttagtaacctaacaatggcaccagtggcaccaggggtgaaggctctttatctgtccttgccttgcagaaggccaaggcamcttgagcaacatgtcaaagggcatcccaactggttgtattatttaccttgaagtgaagtgwcrggatttgaactgtcagccctcagggagaagtgttccagctmccaggttttttttttttttttttttttttttttttttttttttttttttttttttttgagacggagtctcccgctgtcaccaaggctggagtgcagtggcgcgatcttggctcactgcaagctctgcctcccgggttcacgtcattcttctgcctcagcctcccaagtagctgggactacaggtgcccgccaccacacccagctaattttttgtatttttagtagagacagggtttcaccgtgttagccagtatggtctcgatctcctgaccttgtgatccacccgcctcagcctcccaaagtgctgggattacaggcgtgagccaccgcgcccggccgctaccagcttcttaagaaaaaaaaagcactgaaagcrcttgtgrtgctgtccttgggtgctcctttgcttttatctcagaggctggcacatttgtaggcaggactgtgagacrcagtctcccctgcccccaggagtgtggctggcccrctctgccctcaggaagtttgcttccctcagattagctccggggcaggtcctgtgtcagggtgatargcacacggtgctctcccattgaaggtcacaggaagcgatcagagaggcctctgaaagatttctgggcttttcttcatccaaaaacaatacttggagttgaaacaaaaaggttgaagggaactgatccgacagctgtgggaaggagatgtacctgtgaaggtccctgtggtccatttcaaaggatactgtttttccaacttccactgaggtcactgtgtctgggctgcccacgtctgtttcctgcctgccgcactgtcttctgcagagctcttttgtgagaggaggattcggcctcctccctgacgaggtggcccctggggatgatggggcgggctaggcttttcttctgtaccatgaccaggcgcgtcagggaccaggcaaggtggagaccagctcttcatggtacttctgtccatctgtgaggctttggacactcgtggttttcagtctcctaggctggagtaaaatttgtayttatttaacaagggtgtttgcacatttattatgggaacgagaggatgaattcaccggatcccagcccttgcagggtgctgcaggatggtggggcaggtttggaaatagacaatgactgttcaccttagtaagtgggggccrgaggtgtgtktacagagctggaagcacagagagggaggatgcctgtcaggggtactagagaaggcttcctcagggtgggaacatttgagctggctgttgaaaggtcgacggggttttatagggtgtccattggcatctgcacaatcacactggccaggggtaagagatccactttccgatttatttctagtatcctataaggatgaacccagaagaaaatggaaagactaaggtgttggccttctttcaggcactgctattgtctgacttccgtttgtcctgtggccagatttgctctggaagtcccgcagttccactgcmtctgttatcactactctctgttgaccccatctcccagcatggtggcagcagtggagtcccctcaccctatctgtgcctcgtgtctcttcacttcctttgttcacccagattttccttaacgctttcttccattggagttggtgtgggtcatcattcccatccgccctatcaccctgggctctctttgagggatcattgtacacaggggcatcattgttctcaagctactaatgccccttaatcttgttatgtcaccccagtggtgtgaaggccagggctccttagaggtaaaagggtctctttgtgaggcctggaggggagaaggttgagcrgtagcttaggtgaatgctgcctgagcagatgtctgcagtgggagcagaatggtgtgatttactctttgtttttgtgggatgtccttggggagcccaaggactgtccattcatcaagcactgggagatggtccatggcagggaggagagtatggctwtttattgagtttcatttggtcataagactgggcaggttgatttcttctgccctgaagcactttgctattaccagctgggactccacttatcaagttcttttaggaaattacccaatgaattggtggaggtaaatgatgcaggaggtttgaccaactgsatggggctacaacattgcagttcatgctcataatggcagcaaatgcttgagggaatccctgagtatgcatctatttcttgaatcatggcatctgctmtaggaaatcctcttaaatgtattcttatytccctaataawatggaaattgrtacttaattggtaaaattttaaataattacccagcatctggtggttcatttatggcttcaaccagatgcgttttattaacaacaaacttgcttttattattgggacgctaactattaatttactaggcaatatgccccttctaaaaccagaaaaaaatgctcacagaacatactagcccttctctcttgggatatttcatgctttaattaaatgctgggttgaaggcctaggatttatcctgttggtctagttcttgtttggttctgagagctgctccttaccacgactaagtcaccttcctctcttgccctgcagagcaaggcctgtcattacggtggatgtctccatcttcctcccgggctccatcaacatcacagcgcctcagtgtcacgacggacagcagcctgtgaactgcctgaacgtcaccacctgcttcagcttccatggcaaacacgttccagragagattggtaatgagccaccaagtcagggctcaggatacccgtttagctggagtgggctagtgggatatttccgatgttccctgtcrctgttcctcccagctggttttgcaggcagcaggcacacaggctggacatcctttccctctgaggttcctccccttctatttcctgcttatcaacatgtttctaatgtcacacaacctccagctctaggacaaataatgttggaccccaagcattstttttgcaaatatgagggctagactgaagcctcattkgaccacaggtcctatgggactggtggagatatagtgccyggagcctggcccttagggaacattcgagcagttagaaagcagaagtgacaggactttggaggctccttattgagcttgtagcatcagccagatgtcaggggacttataccatttactatggaattggagaccaaagatggatggtgggattcggatgctggtgttacagaggcttaggtttctaaaagaggggtgctgctttggcagctcagaattgaaaagaggcaggcattgtcctgacagctggtaactgtccctgccatttktctggctggggaaaatcaacttgctagcccagctctagagactggattaaaccccagaacaagatagaaccagtgttgattggaattcagagcacgtgatcacctgaaggaaatgaatctggagctttatgcatattactaggtgcttcatttttatttaaaaggctgatttaataatagaaagaaaaactccaggcaaacaaaaacactmasggacctgaacctactgacgttcttagatattttkaatgtcatgagtgactccttttgctactcacagtgtagcccctggcctagcattgtcagcatcactgggaacttgttagaaatgcaggactttgggctccgctttggacttctgaatcagaatctkcattttcacaagagccccacaagattcctgtgcacatttaagtttgagaagcactgctstggagcacacatgtgtgcacacacgcccactcatgcagaaatatttacgtgagctagttcattcctcagccacacctcaaatgttctaccttatttaatatgttcatccttcttggctgtctcattggcaatttctcttgatcttcaggtatattgaataagctcaackattaaacatatttattttatcattttttaaaaagagcttagaaatttcaacattgaatgaaaccataccataaaacttgggaactggttagtgagggaggattaacaacattttcttgtgcagctcaatgagaaagagcagctcactcaagatcacacagatattgttgaagccaggagttgaatttggatcttatgatacttagttttgctttctaacaactatttctcaccacctccataattgtttaagatactacagtcttaaggaaaaaagctttctgatagttctgggactcgtgtgtcctccacataattaagcagtctgtcttctgtccagtgccagctcatcacgtagttggactctgttaaaaaacatttttaaagaatgaagattaattttgatacacataagaatgagaactattctagaactctcaaaaagggcaaacgagtaatagtktctgtgtatgttcatttgacacrtgcttattatgtatccacatgtgccaggcactggagatatagtcctgccctcatggagcttctaaagggagttacaaagagtttctactattttggccttgaagcagtgttagacaacgttcacttatcgctgttgtgaaagtgaaggtaaattggcatagctgaagcagagaagaagaaaccaagatgcaagttagagcaagagtgattcagagcatgagacaagtggtagagcaaactctgatttgaaggttcatgagctgagcgcagaggagatgtgggtgcctcctcatgctgttcccgaccagtggctctttctggggccccatctagcatgagcctttcacagactgctaagcayaattagaatgaaggtctaggcttagccatagccccagaagtrttggggtaaagtggaagaggcyggcagttggatggcatcttgtactgtaccttgtgggcaatgcgaagcaacctggcttatatctgacattaggtggggcccattcagcaccagtgtaccctcccattaatttctcttccctatcctccatctgccacatgggttcatagataaagtcaaacatccctttayactctaagggtgtgtttccccrataatcaggcttaaaggggatggtaactggagaattttgatatctcartataataaggcaatgcagaaaattattcatccccagcatgtttctgtcactttctctggcattcatatctcaatctttgcagtagaaagagaaatgtagaaatctgccagaaaatgtgctggcagtgaaatggagagtttggggagggaaaaatgggcaggccttatggwaatgtgataggaaatgaggtggaggtgaaaggtcaggtaactgtgggggcccagctctgggtgaggtgtcctagaattcagcaaggaaggcagcctcttggctctgcacagttkggaaggtcagtcttcagatggaggaaagatgggcacttccaggacacagataccctccactyccatccaagctcagcagagggtgctggccaactctgtcatytccaggcctcygcctcaggaacccacagctgagacactgggttaccagccttcctactctttgtgctggcagctgcagaggaaccatgtggatgatgactttgtccatggaatgcctggtgaatgagtgccagccctgggcaggccttccaggcacctctcaatgtctgcatatcttgggctgagtttgttakyargacggctgcatttgggcagagcaatacacagatacctgtggtgggctaggtactgctgtcagaagtggtatcttctgtggtatttatctgctgctgtcttcagctacatgacctgctctctgaggatggttttgagagccataagcagctgatgttagtcttgtgcctttggtttcttcttctctacctggcagggttcaagcctatgtacagagaagggacaccaactgcctctttatttcctgctttagaaatgggagaccacagtgcctacttggtcatgggagtgttcaggaccagctcattagcgggacacaagctgctgtagcctctgtaaatactgtaggaaatacagactttctctgtaggaggtgaatctgccttgscctctgaaacaggcagagtccagtcaggaaaacaaaaaccataccagttattttaacagaggaaatttagcactgggaatgggttaaacaggtcatggacgacctgggagtaactgcaggaagcagctgccgcctccaggtctgcaccagtggatctcaaagtgtggtcccagaccagctgcattagcatcacctgggatctcattagatatgcaaattctgactagaaactctgaaggtgggacccacatctgtgtttttacaagcctccagatgggttcaatttgagaaccactgttcaaggttatacttcgggttaaccacttccttggggttatcagaacctatgagcttggagaaggggccctgcggagctaggacctgaacctctgaggaggrggctggtgctgctgatctctctgagggagtgcaatgaggctggctctgggagaatggggggaaaattgaaaactacaattaactgctgttggggccagctgccgtgagaaactgttgctgggataagctgctaggaataggaagcagggaggaaggagcgagttcctttgccctytccagccttgcaggctccctcygatgctccatattagcagagcckcacagcragcctctggcaaaacaagtgaggtttgcagggtcccagctccagtgtcacagtgcagggtagagaagggtgggttggagctgaggacaacagcttcataaaccagcacagcaagcatccagttacattgagttgctgaatccctgttgggtcattcaatcaaacaataataattaaggtcctacagagtgccagacaccctgcttatcctggggcacggagcagtgagcaggacaggcaaagtccttgccctcatggagctggcattctagtgggaggggggcaggcagacgggacaaaaacaaccagctgctctcttgctggcttttctagatgagctccgggccccttgtgtggcatgcactgtgcttagcactgggacacagacagacacagacttctcactccgactgtgggctcctccaggagmrggtttacaacgtatttcataaagcactttaaaataggagttcttcctgtccctaatagtattattcatcacttcattcttggcctgggaacagcctgtggccccttggagcctcctggctagcataggtgaaggtggtgaatgctttgcccaaggggaccctgcccctcacccrtggacggtgcttgtacctactcactggccaggctgaagcctaaacttgcttgtcaatctctggaggctgggaatcaagctggcagttctgggctttcaccagagtgtgaaacgaaaaccaggaaggggcgctctctgagtgattgcattttgcactcwgacccagtgctcctgtgtttccatggttagcctgaaactcgggaaggagaatttgttagaatttcacagctgaaatcttgttctgacrgagagcaggaattaatcaaaacttgctgggagagaccagagctagagttgatgagagacagctggctccctcctggcccaggcccgtgcaggggggctcctcgggaagcagccgggggcagggcagggaggtggctgaaagtattactcggggctgatcagcttttccatcaccatgacatcattcgacatggcagggacacaagctgccagaaggaaaaacctaaagatgtgaaatgtgctgttggagcaggccctaatcagaactagcagcctcccagggacagacaggggctggccaggctggcttacctcatggccggctgtgggcaacttggacagcctgatccacccaccttcccagggccctgaccgcggagcccgggcagctgatcggctgcttcccagacatgtcctctgcttccctttccaccagaccctttaccagtgggtgctggtaaaactgccagttccgctcagggctttggaatgagtggtcagcatttcttcttgcctcctcaggcagggtctctcgttgtgactcttgctttcttctagaggagacagkctgatgtagaagtaatttcctttggggtaatttaaaatgtcaaaatttaaatcaaggaaaagtactaattaggcagttctagagatgaaatgcttccagaatgattgcacttggtgaattggataatgcggtatgtctgtgattgtatgttttaacattttagagaaatctgaaagtttaatgtgctrgcatgcacacaccccgctggagaggagcagcagttgccttgtcctcagctcagtttctgtgaactgtgggttgtttctctcttccttgagttgcaagagatcagtacttccggatcagtacttctgcagtgasatgaaactttggaggagtaaagttggtgtttgtaaattatctagcacagtgcttggcmcmcgttgcaggttgaatttatttgyttttccttacttaccctgtgttaatatgggttctccccaaaacagagcctgggtcaaggatctgagtgcatgtggttgatacacaaatgatcccaagaggtaccagtaaggaaatgggacagtgagacaggaaaggaaggcagttgcaggcctcaggcttctccagagaaacagaatggagagagaaagaaatggattagttggttgattttcaggaattgggttgtgagattatgaggtctgggaagtctgaattcttgggggcaggccagtaggctggagactcagggaagagttgatgttgcagctcaagtctgaaagcagtctaaaagcagtttatttttttgggaaccttagtctttttctcttaaaaccttcaacagatgaggcttgcccacattttggagggtaatctgctttattcaaagtctactgatttaaatgttaatctaatataaaaaaataccttctcagtgacatctagattggtgcttgaccagattctgggtactgtggcccagccaagttgacacataaaattagccatcagagcagccaaatagagggtgtcttaytgagcaggttaccactgtgggcagctggagctcagtcctgctggggaaccctggcagtcagtgtagaccgtgccccagaattaccccacatcaaggggcaagggagctggggmcctgcattatggagggctgctctggggacttgagttccctggcactcctggcttgccaggcacatggacagagccactagagaaagccctcaggagaagagatgcaggtactggcagttgcaatttgggccggacagcagagaaatggtaaaagccaagaggatatgggtgggggagcaataccatcmgttccatcttcctgtgttcctttccacccaggttttctctgagctcagctagttcatctctggtaagatagtccagtctcgctgttctctccattgtctcccttcctgagggaaggcagccattcacctgggaaggaggctggtcaggggaccccgaggagagtctgctcagcrgctgcctccaccacattggttcacccaactgtggcctctggcttgtcttccagcaatgtgtatctgtagccatgactttgcttaagcraacttggaaattcacttcatttaaatgtaatctttcttacttcagggcagttgttcagggaagttgtgatcagtagaaagtaaattggctagagttcagttgtagatctctgcacttgtttggacctgctatccatgcattcaaaaaaatgggaggttttggtcaagtaatgtacaacatgcagcaagaacaagtgtggtgggaakagcctggcaccagagattaagggagtcctagattcagctgtttgatgggtggccctctggcytggagcaagtcttgttcccttttggggcctcagttccctcatcttaaaaaatgaaggtttttgagcttagtggtctccaggattgcctcaaagctttgccagtctgaatctacccttttcttgctattgtccccattggarttggtgtgtgacacttgcacaggtgccagtgttttctgtgtgggagcactttcctgtatgcattattttcttcttaataatggcacctcctgagagtwtccaggtctcagatcccttctggtgacacagccttgccttgtaagtcaactgtttgctggcgttaaacaagttggggcagatggctctgctgactaggaatttgccagctcggcatggcaagatccctgagatggcagaggcccagggaggccattagaagcatcaaaaatacgccctgtggcaggtgcagaatgcccattcaggtcaccttcctctctgcctgttcatacctcccctggtggctgatcccwttgatgtcattaaaagccggagccttccctaatgcctgacttcacttacttaaatgccagtgggctcggggctacttgttactgatgcaaagcccccagattctaagaggcaggtgtgtggagacagggcagggctgggtcatctgccttctgttgcttagccatcttgccttgtcattccagggacagagattcctgttctctcactttaaaaataacatatttccttgaatccccaaaacagttaaaaaataaaaagggttayggaggggatgacytctggcacagaaaagcagtaaaataggtgtattgacactgaagtcatatttctrtaatgaaatacatacctatctatttacttattgactctgaaataacagaggtagatccttccaggtttatctagcctgcatttgatactgtgatcatcttttttttccttctttctttcttcttttttttaaattcaagactgtgttacaaaagttctgccatctggcatacacattcaggtatgggggtgagttattctttgcaggagaggacctcagtacaggccctaccgtggtcatagttttgttgaaaggataggcactacaaaatgtttgatcaccacactcggctacctgggaataaaggcaactccagccttcatctgggttcctgtgcatgtaaactacctgaaggcaggagtttatgcctgcgttgttcattgatacatcccctctacctttagcggtgcctggcctatagttagtgctcagtaaacgatggcgggcacatggtctggtccatgtactgattatagagcacgactcaactttgttgagatgagttaaaattatcagacgagatggttcccttgtgttgggcataaaccatgtgctttatagaagtcagtattacacaaagccttgataatttcagcagcttctggtaatgttctgtaggtttgtcatgatgttttgcttgtcaggacactaacctgtgttgggtacaccttgttaatgggcatattgctggctcagttgatacctcatgatggcatgaggtttaaatcagggagagccgtgaagtatgacacaaggagagtcattagaaargcagaggacatcatgcttctctctcgattctttgagcaccctggctgtgtgctgctttctgagcaagtctctgcttggggctgcagtctcctgccatggaagggtaggtatcatatgagatgtgcatgtgatcctgtgacaaggamaagaggtggcctcatcacagtgtgtcggtcctttctgacattttgacctctcatttattggcaggcctgaattatgttctgatggctgacgtggccaaaaaggagaagggccagatgcccagggtctactttgtgctgctgggagagaccatgggtcaggtcacagagaagctgcagctgacttacatggaggagacrtgtcgtcactaygtggcccatgtgaaggtcagtcctctcctcctttttatcctcaaactttgatctctgcagatgttcacttggagctggtggaaactatttttattatgtattatgtgtgctcttccaaaattttatttcacagggaggagcatatccatttcttcttttcttttaaagttggcctctgacagcccttttatttatcttactgtgttgatttcagcctttaaggggggtcgtggtggtctaggagaccagtgatggtccctggctttgacttgttcttttgagaggtttctcatcctctcccctctatgaggcttggtagcctttycagaggagagccttggaagcatgtgcctctgggtctgcagtgatgctggatcacactgcacctgatgcctttctcagtggtctactacaaattagctcatggtcacagttaaggcattttaaaactggttggactagattcttcccccttgactactttctatttattttaggatgcattttttggcaacctttcccctcgcactctaaataaacttgcaaatgtttttctcctcttgaaattgtttgttaaatacactttgctgctaattcaggaggccaggctttgattagctacagagtggcccttgcagcaggcgctggcagggtggaagacctggcagtgcctgatgctgcaggaatggccagacactgacccatgggcagggtcagagagyggaggaggtggaakaatgcacttaatccaggccacatggtgggtggaatgagcatgggttttggagacacatagatccagtgtgtatccagctggacacataattgtgacctctccctgtctcagtctctgcatctctaaaatggacacagtagtccttaccttgaaaggtggtcatcaggattaaacattacacaatgaatttacttaaaggaccttgaatggtgtctgataaatagaaagcaaccaaattattattatttggttgggctgtatataattgccaatattctttttgacttacaaaaatggaaatttcatatagctcaacccaatattgtttattagccactggatttctgactgatagtttgaaaagtctgcagattagagatgaagtgtcctcctgttagtgccagagcagaagaataacagctgcttctagatgcttcagggctgtgtatagagagatgccccacacacccatggcccagagcccatgagtccatgcccctcagatgcttctcagtggggctgggctgtgtcttctgccaggactcctgcaggggcctgcccagaccagctgcctgagggcttgggatgctggccatttataaagctgctcctgtgcctgttaagccatacagccccgccccgtcagtcttagattacattggcttgttggtgcctttggtggggtgtgaggctgcgcagtacagrctcgtatgcaaacactgtcaggcctttgaatgcctgtgattggtgtttttatacctgctggggacagggcatcttctctcgggcctcttcttgctaggtctgttcacaaaacctttcctttaggtttctttgcagcttcttgctttggctgagaagttatcctttgttcctagttaccaagggtactggctatgagatgccacgtagagtggcaatagtgaagtgcaggccagaggmagggctgtttctatggtggccctgagggttactgggaaggatcagggttgcgcaaggggttggtcctgctactttctgatatctagggttgccagacttagcaaataaaactatagaactcctaattaaatctgaatttcagatcaccaatgaataattttttagtatgagtgtgtcccaaatattgcatgggatatacttatactaaaaacattttgctgtttatctgaaatttaaatttaacttggcatcctgttggcagattcaactctgctgatcttcctctacccaacaagtggcatttcttcactcaagcaaaacctggctgccaagaagagagattgagatgatggttagaagagtttggaggctgagctcagggctctcgagtgcagatccagcacagaccttgacgtgattattttggtcattctagggagagcaaaagagcaggcctgcttcagtgaattgggacctagagtcatttggatacagtggttgcttggccattttctcatgcaaggaggtgggagcggagaaatacaccagatagacacatgtctctgagacctttatggttcaagaggcaacattgttgccaaggtacactcaaggtggctgatactttatagccatactttataaccatgagaatgtttatttctggcagttactgtctgggctgtagcagaggactgggcaaatggcagagtgcacccgtaggatgagtgctaatggcctagctagctgtccacagaggaggcagcaggcaccgccccrgcttactggctgtgggaacacagctatggaagctgaggcaggaagcaaggatgaggggaaggggagtggcagccgggccacctcctggagcaggaactggggcctggggggtgttggtcaggggtcaagagcaggatgcagtctctactgcaagtggagctttctcagtggagctggctctcggctttatggacaaatcaaagaagataaataaaagcattctggcttatcacacaccatatggctagcagacagtggggccagcatgaggggctgggcctgctttgtttaggctatctttaggtatttttttctttttttctttaagcctattccaatctttttttttctccctctccttttccctggaagttttcttgccatatatggtgataagtgactttatcatggaagaccgcacaggctaacacctgttttccaggctaactgtcttgtaccagactttgttccattcaccgtattggagggcacctccggagggtataggattttgtgataaggcacatcctcctgaggggagggcaggtactttctcacrgcctcactgtggtcagcagagctgaggcagctccagccacttccttggcttctctgcctcagagttcacacaccccggcttatcttccctcttccccgagaccagcccagttttggggatggggcccctcccactagccagtcaggctggaggcctctggtggatctcacagtcacaggcgaaagcccaacacctcccctcagcatcgggctctccatgccctgcctgaccttacctttctagacccatcttctgccaccacatcccctgggccccagctcttgtcatgacctgcccctttcctcctggaacctgctccttacacttctttgccttggttcttatgctcacagaagtcagaggccyggtttgtgtcatattcatgtagaaccatctaccacctgcatgatttttacatttttttggtcttaaactcatactkcctgtgatattttctttcatatttttctctttaaatcagccaacttttggtctcaaataaaataatttaaaacagaaactttgtacctttctataagcagaaaaccatctaacatgtccccaaaacagaaagtaactgtaaaaataaatatattgaagacacaacagtgtcctagaattctagctggatttcattgtttgtcaaagttgctgataaagcgcccactccattcatgtgttagaaagggaaatgatcaagttctagggaaggcttaaagacatactagcaccgcgctggaactttcttcctgatgcaaccagaaggactgcaggggaattgactgggaacaacttttcaaatatgagagttgttttacagagtcatgcctatgtgccatggaaatccaccttgtgggcccagtctgggaagccctggccatgctctgctttgatcagatgtgccttgccccatcctgcctgctgaaggcttgctgttgttcaaggctcagtccacaggttttggacatcctcagtggcagctactgtcctaggccctggggatgccactgtcrtcttcctgacttcttggagcttgttccatgctgcctgactcctgctttggggatacttgtcaggcagaaccttgttggagtgactaattgggttagctggagtgtggggtcacaaaggcttctgatatggagtggggcctgcttgcctctgtctggactgactgctgggaagtgatggcttgagatgatggagaagagaatttgggatgcatggtgtgtgccaaagaataaatgcaggtgtcctgttgttactccatctgtttctggtttatgtgttcttacctggatgacagctgtgctcatcctctaatcctgtacaataccttgagagcacaggccttttgtgagatcaaatrcctatgcatgacaggcaaataagcaggctcttcaggaccagggaaacgatggcaacagttctgagtctgatgcagggatggcagagaagcccaggcagagtgcaggggcagtgatgtcattccctaytgtgaggatcagtgacaccctctagaggcatttagggaactttttttgaacagaaccatgtgtcagacactgtcaagaaggccaataacggtattattgttaaaaacaaaacaaaacaatctacactagacgagggaatatgcacatcagcttttctgagaagctgcagatgttcataagattgttcttctatgttcctgaaggatttttcaaggaactttgaaacctaagtggctgcagctccttccttgcttttgtgggcagatgctcatcctggcctggcgaagggtgggacatcaccctggccaccaggtctcctgagagatcayaccctgggatctgcccaggtgttttggcctgtttccattttcatatccaacaaaatgcsttgggaccatggcttcaatcacattacatgctgtgrgtttagagtgttggatgctggttttcagaggtgatcaaamctttttttttttcttgtttaagaaacagatagttaagaaagggagattaagttggagttaataagaactctgagaaagaggagaaagaaaaacagcaaaagtttcttctttatctggaaaataacatgctaaatctccgggtcatcttgagaaatcaaagaaatagctaagaaaaaaacagttgcagggtttggcaaaaggggacrccaaccttagatatgaggtcttctgaaaacttttaaaatttgtttattttttgaatcagtagtgtgtatagttaaaatttttaaatggttataaaagttgtcaaagaaaggatgtctttcagctatcctatttttctcccaaaggcaaccacagttccattttcttaacgtgtctttcaaaagcttgtcaataaatatagaaatctgtgtgtgtacctccttttattttatgcaaatagtagtatactgtgtgcacactgtagtaaacttactttttcttttaaaacatccaacagcagaatggaggaacagattttggcaaatcgcacaaaatctagctgtaccagatgaaatacaactcagcaataacaatattatgttattatgatacacacaataacatgaatgacttttgaaagcattaaactgagtaaatgaagccagacacaaaaggctacctactggatgattcatttatatgacgttctggaaaaggccaactaaggagaaagcagattggtggttttcagcggccagggtttgggggaagggctgatgatgattgacttcaaagagggatgagacaactttctggggcgatgaacatattctaagatcgtggttgtagyggttgtatggttgcatttattaaaacttaacagagtgcacacctaaaattagtgaatgttatgtatgtaaattatatctcartcaaacttattttgttaaaaaaagtttcgtggagattrttccatattggtgcatatagagctttcctgttctttttcagtagttctttttcactattccttgatttatttaacctgtccaggtggtcttctatatgtcagttccagactaacctgatctgatgcttgtagactagttatcytagtttgcttctccagaagaggctcctcttctctcccctagatccatagtatcctggctgaggacccctgagagggcagcatggaggggccctggtgctctctaaggtgaccttggacatatgtcctacagaggacaagcctctcagctatagggtgcccaaggaaaatgggagatttttcttgattcctgcagttggctttgtgcccttggcaggctctcctggtctgtaggtagcatagatggcctgaatgtttggtaaggggtgctggaaactagggcaagaaaagaggggaaggytgggatgcatagaactgatgtgtgggaaactaccttcatcatccagctcaggtgtgaagccgctgctcatgcgatatgctctgctcacacagatggcactaaggaaccgggaagctgggctttggagaccacgctggaagtcagctcactgagtgtgggttgccttgaccatctcctctgggaggccatgttgtgcatagctggagaacaaactggggatgaatcaagaagggaaagggtgtggtgaatgttcagcatgggagctgatatctccgatgagcactgtttggccattgatttatttcttgggtgcaatgaagggctcttaatcttctgcatttggacacttgccacagaggacattgtgattagcaaaggaaggcacaaaaattctaatccaaaggctttgcccgccttaagtccktttttgaaatggagctgatttaaatatgtaagtatggtcacagcattgacacttcagtggttatcgtaagcttatttstacagtatgtgagatgcagtttgtagcaattgctatgggtaaaatttttattttaagaggtgactttctatttacagttattcatttacactgggttcatctattaatatatactgttgatgcccttttaacactggtattctttgaagtcacacatgataatgtgttctgttttattggttttgtctttatatttgagatgtgattataaagatcccttctgcctcaaaccttgaacttagatattcattataagcatgattcccttcaaagtaatcaccttctagtcattcctgttttgaaatttcttccatggtttgtttattcacttttatcatggtccatttttactctaggagttaattcaaattttggaagcagcaagatttctctgcaatcctctctagtagataatagtgtgtttggggaaaagtgaggtataataatacaggaattagtattaargaatgtagtaattaaactccttttgaaaatgattttaaaagaattcccatratattcaggtaatagcgataaaagcagctaacactaatcgagcatttagtatgtgctggttactgtgagtcactacatgtgagatagttactgtttttatcctcatcttactgtttcaaagacaaggcatagargagtgaagggacttgctcacaaccttacagttgacaagtagcagaggtaggatttaaacccgcaagtctggctcctaagacttgggtttaaaccactacattgtaacacccctcataaatacaagctagaactattagtaactagtacttattatatgccagatactcttctacaggctttacatgaagaaagagaggttaagtaacctgactcaggctatgaactagtgagagacttcactgcctcttcataatagagtcctgggaccttctctgtgttaagcatatggcccccagaggtgacagcttttgggggtttatgttctagagcagtgatgtgctgctaatgtttaacaactagctcttggaaagaggggacatgacttttgtagcattttgcaaatttccctggtgtaaatattcttatcatgtctgatttcaagctaccaatgagacatcactgaatgtggagttaggaagagatgcacaatagcacacagttgtttagtatttccaatagctctaaatatctttaagagcatagatgatagtaaagtatggtaaaataattaggaagttatgagtgttgagtatttattacatttatcttaatataatttacttatttttaagtttattcaatttaacttttaataatggctgtgtttaacaaccctggctcataaactttctgaaaatttaacagttggcttttggaaacccactgcagcaagctccagcacacaactgaatatgttgagggtttttttgttgttattgttgtttttaattttagattcacaaggtacaggtgcttgtttgttccatgggtatatcgcatactggtgagtattgggcttctagcatgtttgttaataagttggtcatatcactcaagtcatgcctgatacacagatgtttgattatcagagtctkttttctttcttgtttcctgtggctttttaagttgatgaataataggaaagtaaatttgtggggtcagttaaaccaccagacgacagcttttatgtttgtacattggttcagaggtactctgtattttgactggatttattggatagtgtaattgtttccatttaaaacaatggaaaagatttcatttaaatttattgagatcttatttttcaccctcattccrtgcacatttgggattctgttcgccagcccctctgcactctgaagatgcacagcagcctctctgtactctgaagacgcatgaattgctgactgttgggcttgcttggaggggactgggggttattacctcccacaggactgtttaagctctggaagttttcctacctcctgcaactgaatttagtcttaattagtacagagtgaactagctgtgaacaatctggttttcttgctttgtgccttgatcatgtgagacctaagggctggtcctgcccttttcttatccattgctttaatcagaaataacatatcaaggtggcccaaattgtgtcactattctttcctttgtcttctccacccattcccacggcatccattcctaaggtcatttggagaattctctgttccaataagtgggatccacatggctcaaggagcaacaggccttggaatcactctttgagtagtagctggtccctcagtctaccccaaagagctgcctcgccagacctccccacctcccggacatacagactccagatgtggaaaaagcccttgccatctctatcctccaacacagagctttggtgtccgagacacatccaagtgacaggcccaagagggcctctgaatgaagacgkatgagccgtgtggacasagccacactatgttytcgtgaaggcataagaccatgggccaactttctgggcatccagggctggctgcagaggctggagtgagtggctttcaaggcaagactgataatgaaagtcgtgtttgggtgggaatcacaagcaggggaagtgggggagccagcttcccttcgtgctgtgtgtcacaataagataggacacagatgcaaaagcagatcgctacagctggatctgggtaaaggtggcagtgacgcgtcggtgcagagaattcctgttttgaggaaagattmggagccagctaaggttttctgagggcccgtcatgtctcagactgtcacacttattcctctgtcatgtatgcttaagtcygttttagatgaccccttgtaaagaaaggaagcctggcccctgaagcctcattgcgtgggataaggggactaacatattctgtggttgtaccagcaaattattatttatttcttattttataaaagtatagattttattcatgcctatattgttagagaaaatcattatttttagtcaacgtattagtattaatatcatggcctcttttcttctcattttggaaggggaatatttttagactctttaatgagagagtcattttctcagtaaatatttgattggcctgaagttaagtgggtaggcgtaaaaaattatggaagtattggacttgagcaaacttttgacaaatagcgctctctttctctcttgggcgtatgcgtgtgtgcatgcatgtactccagctctctgkgtatgttacacacacacacgtttttcgcataaaacatttttattttgggccaggtgtggtggctcacgcctgtaatcccagcactttgggatgctgaggcaggcagaccatctgaggtcgggagttcaagaccagcctggccaacatggtgaaacccygtttctactaaaattacaaaaattagctgggcatggtggtgggtgcctgtaatcccagctactctggaggctgagacaggagaattgtttgaatctggtaggcggaggttgcagtgagccaagattgtgccactgcactccagcctaggasaccgagcaagactccatctaaaaaaaaaaaaaaaaaatctttattttgaaataatagcagtcttacaaaaaagtcattaggatagcacaaagaaataccgtaaattcttcacccagattccctaaatgtcatttgctttgtaattttctatctattcgtacttcttacctgtttgagagtaagtcggagacgygatgcccccttatccctaacatcagggatatttcctgagaacaaggacattcttttaygtaaccatagcacaattattgaaataaggaaattaagtgatacattactgttagcttatctgcagaactcactcaaatatcaccagttatcttcatgtccttggtagcaaaagaaaatcccgcactattgcatttggctgtcacatctctttagtctggaaaagtcactcagccttgctccttcatgtccttgacatttttgaagagtacaggtcagtttgtctgtttcatcatgattagattcaggatgtatattttctgcaggaataccacagaatacttgtgtcctatatatttaaaaacatatacatccaacatcactgaaggtatgtatttttaactcctcctttaaagtggttttccaaagttagttgccatccccaaaagggagcttttagacattgagagaggtgattatgaaagtacgatagcttgctcaccacctctctcctctgctcctgggagcacaggggagtttcaactctggggaaggygatcatttgggtcattagtagcgctttgagtaccatggtgtctgcagggagttcccagttcttactgctgtctgagaataaaacataatatctttggtcttcacagaggtatcagacaggaattccactcagcttgcaggaattgagaccccaggacaggggcttaagcacatcaagataatttctctctcttctagaggaagagaagttgctgatgttggttcagtgactcgaggatgttctctgacctttcacttattcaggaaatgtgcattgcatacctattatgccgtaggctggggggccctcagctctgctgtgaagagacaaggatccttgtccccctgggagtttatatcccagtagggggagacagacaatagatataataagaagaaaattaaggtgcattagaaggcgatgaggctatggaaaaaaagaaagaaaatagagcccagtgaagcgggtttgggagtgcaggcatggggttatgggggtcagggtgaccycactgacgaggtgtgatttgagcaaagcatggaaggaggctggggagttagcacagcgggytcctggaggagggctcagaccagtgtctgagtgtctggtgtgtctgaggaggagcagggagaccagtgtgggcaaagaggtcagagtggcagtgatggttgtgagcgggtcatcttgggcttcctaggccttgggaaggatttgcctttactcagagggggatgggagtgtgtgagggatctgggcagggtggtgacctggcctgccttccatttttacaggcccctgctggcggctatgttgggaaggcctgtaggaggcggtagagcagcaggaacggggttaggagactgagcgttacccagggaagagggtggctccactggggccatagtggtaacattgtgagaagtggtcaaattctgcgtgcattttgaagggggatcctacagcatttcctgagggtttgattgtcagttgtgagggaataagatatcaagggtcactccargcttttcagcctgagtacctaaaaggatggagttgtcactggtggtgttttcaacggaaggtgcaggtgagcaggttgaaagggggaagatctggagtttgtttttagacacactggtagatgtttaagtgtgtatgcgtatgtatgagtcttcagtttgagtagtagtctgagtaagaagtatcaatttgggagtcgccagcagacagatggtatttaatgccaggagatttgatgagatcacccagggtgtgaggggagatagagaagagagggggaccaagggctgagctgtggacactccaacactaagagcatcttttcctcctacccctaaaatggctctggggctccagccattgtatgtgtttttcatgcaggaagaagtgggacatgcaaaggggctctttataatctggtctgaggcccctgtaaagagcctccagtgacttctgcttataacgcattgaccatccatattttaaaagaggttggaagatgtctaagtaccagctagacatcttataaatcctatcactatagagttttgctctscagcagaactttctgtgatgaaggaaatgttccgtatcagcactgtccaatattggtggccagtgaccacatatgactgtgagcacttaaaatgtggctagtgccaataaggcattgactttttacttttctatacttttaattaatataaattcaaactgaaataacacatgtggctagtggctaccatgttggacagtgcagatattgaagtttgatttttaagaaggagagggacagacactggacagacaactcacagctcctgccacagtacagcatggagcctcccaaggcactagtcacacagatcaagccacacagccaaatggaawtacaaataatagattgaggtcacattgactgtttcacgttgtacttagacatgctgattaaaacctgagttgcaagtgtrccatggaacataatctctccctctagtgttttggaacaatcacacacaaatgtttatatccacatacaggccccatatacaatgggggaaacagaacagaagaaggttggatggttcaccaagttgagtgggtccttcaaaggatgtcaccatcttggatgtgatgttttctgttttcagtggcatagaactagataaaaggtggcagtgcagaggatggaagtggtattgctcagtgggaaagggaaggcattttaggtttgrgacatattacaatattgccttttagcgtagaaaagccctccttcctgatgctcttgctagtgctgggtggaaagattccctttcaactcaacatgtgtgaagcacatgaactgaagcactcttcctgcttagcatggcaggggctgggccaggccagggtggaccaggtcttgctctgatcaaccacatggtctcaggcaagttgcttcacctttactgctgagcttcagtgtcctcagctgaaatggggagcagaatactgacttcttagtaggggtctggtaamcactgggccccttttyccttctgctctaccctgcaaatcttttcctctttctaactgcctctgcatttggaaggggtcaagactcgtttcatagttttttgggggattaaaaaatgattagaagcagatggtgagaagaaaatagaaagtatggagcaaataagaaatgtgggaagagaagagggcaaatggtaaggcagctctcggagctggcacgttctttctctctggaccagagcaagccagagcctctcagtcatcttcacgggctggttgacaaggactcctcacgttagcgtgcacacgaagaacctgggaccttgttcaatgcagatcctgatacagcagatctgaggtgaatttctagcaagctccctggtgacgctggtgctgctggtccatagaccacaaagcaaggagctcgaagacatagataccaaaagttacaggggaaaacggacaaagccaccagctggcagttgatgcaggtatcagaagcaagtgggcctcggaggggccagatgcctctctcctcacactgaccgtgagagcgagtgctcctcatcaacaacgtggggccaggcttgagtcagcagcactgactttatgtgayctagtgcagctcgccagcccacgctgatgtgtgttaatggagggggtgcmccttataggagggtggtgtgggctataatttcttctgcattctctgcctattgcttgaaggacagtgttgtcagcagtcaactgactgagcttgacttttcagcagtttttttaaacttcactgcagtgtttttggacacagctatgtcagaaatctatttccccttctcagagaccaggaagctcttgaggtacaagctcttattaagcagaaaattttaaagtggttttccttctccttttcttgggtctgctttcttggggcaaacagaatacgagaagccagcttagaaattgcatgggtccttcctgcattttgtgagaaaatggtggcctcctatatttcttccctgacaggttactgtgggccaccagcctccttggtgacttctgttttgcagatggggaatttgttgattgtagtgagtacgctgtgtgyggcagaaaggattctgtcacctacagagagctagggaagcgcccaggctgaggaaacccaccccttcgaagcagccatccataggtagcctgggggtcttttcacaagacagccctagccccagttcatgggagttggaacaatggtgggtccaatggtggatgaatagtttattcacatgcatcccaggagatttgtgtgaagagggtgacagagagttgcttcttttaaaaaaaatgtattaagggctatgtaaataaaaagaagaaattaagttgtaacagtaacaataatagctatcttttattgagcatttactatatgctacatgttttacatgtacatgaagtccttataaagaatacaattacatatgttaatatgtgattatatacagaaaattgtatcagaattatatctacatatataaaaataaaataaaatctcattttaccattgagggatctgagatttagagcatttaatttatttaagatctcacagctggtaagcagccaagtcttgggtttgaatcccatccagcaaccaactagttctatgactttgaatgcaaaagatgatggcttttctcattattattacctagttagtctgagaaagagaaaactccattctggatggcccatttctgggtggattggtgctaggtttctcctggtcttggacgaggttgcacttttcagccgctcctgtgcacgtgtgtccgtgctctgaggtgggaggaaagctcaatgtgggtctgtgagtccagggcaggcaggagtcctggggactggaggttctctgcacttctgtttgatcttccctgcctgtctgtggcctctgcagtttaaacaatgactgtcacttaaacctcttctgaagagcttgaagtctggtccatgccttcagcccaccagcrtgtgttgagtacctgttgggtacacagctctgtgtctggtggaggggaaacaaagattaaaaagacygggccctgtcctccaacagctcaggttatttcatgcctgcattcggggcactgtcttacttggcctagtcccacacttgtccctcccaccccttgcttctctattttcaattcacttctgtttctacacacatcagtgatgyagtgtcctatgtacaggtgtgcctgggacagtcctggtttatgcctgttgtcccagcataatcattaatagttctctatttcactctcaagtgttccratttggatggcaccctatttattgagtgctcattgtgtgccagacactgtgctgggcccggggcagatggagactygtaagccataaccgctgcctcccaggagctagtctgctggggcatccgttctgaataccatgacttggcaagtgaagcattcccatgccttccagactcctggctctgcctgtgtgaaacgtactccatttccagagccagctrccgagctttttcccctgggctgactttccaccaccctgacctgcgattcctctctgctaaccctcctctcaccgttctccccagggtgggctgtgggccttctggtgctgagctccctcacatctgagctgtcttagcaccttctttccrcctgtatttgtgttacttggatatttgtgttttatcttctgtaccagagcataggttattttaaagcagggagcttatggcattcaacactgtcaccctgggaataggacccccaaaacactttatttctcaaataaatgatggagtaggttccagcgttgtttcttccttgctgtccatttctaaggatgagtaaagagttaacgtattgaacttgaaaggagagatttttttccctcttgtaataaatcaaacttttctgaatctggaaaagtgatggatgaaactatgtgagmacacacacacacacacatatacaccccataaccattttgaggtcatttaataagggattgctttctggataatctcgctccttgggtataaatctaatgtgaaagggcaggggtcagatatttaccccaaagggttggtgtgaggataaaatgaggcattgcttttaaagtgctaagctcagcccactgaaaaatacgcaaatgcatcagaagagtcctctgtaaatccactgagctggaatttccaagcaggtgtccttgctgcctcttgttagccttttgtgagttaattctttgtttaataacaaagagctgccagatggtaattttggaggctcagatacactctgttgcacgtgcctgtccagcttacttaaaatatgtcagaaagaatgagggaatgactcaaacaatttcaggaaatggttcaaggctgtgtaacctttaaggaaaaccacacggagccattaccttgtgttgaaaggcagctccctggctccctgggaggcctggtggcaagcagtgagacacttgatttaggtgaaggggggccccaaggcagtggtgcctcccttccttctgcccagaattgaggtgttgtccctacagtggaaactcaagagcagcactgtctgatagaaatataatgtggtcacatctgtaattgtaaatttccttttttttaaaattatgctttaacttctagggtacatgtgcacaacgtgcaggtttgttacataggtatacatgtgccatgttggcttgctgcagccatcaactcatcatttacattaggtatttctcctaatgctatccctcccccagcccgccaccccccgacaggccccggtgtgtgatgttccctgccctgtgtccaagtgatgtcattgttcaagtcccacctatgagtgagaacatgtagtgtttggttttctgtccttctgatggtttgctgagaatgatggtttycagcttcatccgtgtccctgcaaaggacatgaactcatccttttttatggctgcatagtattccatggtgtatatgtcccgcattttcttaatccagtctatcattgatggacatttggattggttccaagtctttgctattgtgaagagtgctccaataaacatatgtgtgcatgtgtctttatagtagcatgatttataatcctttgggtatatacccagtaatggrattgctggatcaaatggtgattctagttctaggtccttgaggaattgccacactgtcttccacaatggttgaacgaatttacactcccgccaacagtgtaaaagtgttcctatttctccacatcctctccagcatctgttgtttcctgactttttaatgatcaccattctaactggcatgagatggtatctcattgtggttttgatttgcatttctctgatgaccggtgatgatgagcatttttttttctagtagccacattgaaaaagttaaacaggtaaaactaatttcaataacatatatcagtttgctagagctgccataatgaagaccacagacttgtggtttatatgaacagaaatgtatttgcccacagttctggaggttggaagtccaggatcaggtgtccacaggtttggtttctcctgaggcctctcttcttggcttgtagatgactgccttttccctgtgtcccygcatggtctttcctctgtactcatatctctggggtttctgtgtgtccacatttcctcctattctaaggactccggtcagattggattagggcacaccctgagggcctcgttttaatttaatcaacccctttaaaggcccagtctccaaatacagccccattctgaggtactgggagttaggactttaacacaggaattttgggggaacacagttcagcgcataaaaatgtatattatttagtccaatatagccaaaatgttattatttcaacataaaatcaataaaatgttaatgaaatatttgccttctttcctgtactagggctttgaagtctggtgtgaatattagccccattttatgatctcattaggcacacgtgggtagtggtgaccgtatcagacagtgcaggtctagtgtcgaacctcctaatctcttgggagaccttgggattgtcgtaaggaggcctgagtgaattcataaaacatatgcagttcctgaatcaactaataagtaaaagtataccttttatcacctgaggttctggtaaatattttggtattataaaggttgctttcacacttacaaaagttaagaagcatggttctgactttcctaaactggggtttctagagcccaagctccattagcatggtgatgacggcctgcaaaatctttccagcatttcagaaagcctggtgggatcacaggggttgccattcagctactgacaaggtcagcatcattgctttcagctggcgttttagtacagtttttctggtgaccttgtgctgatcaaactttccgcgtggctttttatgacactgtaacaattactggggtcatgcctggagaggtggcccacagttcatgcacaggctcgagtacaagccttccggggactcatctctcagccctgttattattctcagggatttggagggtgcagaggtagatgaagtaagcaagcactattgtgcttcctgtgttgaagtcagggaataagaatttcctctgtgccacaaataatgctccccacctgtatagaatgcctgggaaatgcaacactggccatccttcagctcytctgcttacagctgttgtgctggtgggtctcctcctattctcagagcagagagccacgaatggggcactcggggccgtgacaggcatcccttagctctggccttctggttgtgggcagactctgctgtgtccggcagcccmtccagcgttggatggcatcagcaacctgaaagccctttcttaggctgaaccagagtctacctccatgtaatcacacactcccctcctatttctgccccggagcacctacagatatctgtctgtctgtccccatccccactgcctacttcctccagactcagcatcctgagttcctttgggttactagttcattttggaacttattccactattgaattatccgtattctttggttttatacctttattcctctttagttgaccttttagatacttttctaaccawgccccctccccgctgccccgaaagatcagggaaaataagaagaaattcaaacccttgttktgctcctcatcagcgacagtggtagggaagatgcccacggcacggaggttcagtggttgttttcattctttcctgttagccaktttcctcaaattggtcagtataatcctacctcttggagcgatagctggctggattcttctgccattttggcagttatatattggtctggatttaaaagtgatgtttattccatagctctcctgaatctgacatttgttcctctttcatcctatacttccctgggcatgatacccttctttccatcagctgtgttggagaaatgtggcatgtggcagatgtatccttgcttgtttaattaatgagccaaacagtccagaaacttaggttacaaccaaggtagtctggcaagaaatatacatgaattcaaagaggtttgggataattttattaatgataaaaccataaagaactcagaaaatattttaagatgcttggcatcaggaactatttcatttgtctccatatccccagcaccacgcagagtaattgacattgactaattgcccaataaatgttcactgaatgttaggagaagctggagtatttccaaaatgaacatatgctcaagatattctactagaagtttacaatgttatcttttacatttagattagtgatccattttgagttaatttttgtgtgttgtccaggatagtttcaaacagttgtgcaaaacaattctgtttgttkgttatcatgggtagactaatacctgtcagatcatataacccgacagtcagctggaaacacttggtcacatgagattgcctatctacattttaaatttggcttcagagggagcagccagcaactcccttcaaccccctaaattttggattgtcctaatgaaatcttggactgaagcagtacatttttaaccaggctttctcaggagatttggttcggctggcactcagcccacactttgcttaactctgagcaaaggtgtccgtgggtggataatcccacctccccattctggatgtgccagcacttttcctactcatccccagttatggaatgtctaattctttctcattttctcctgtcactaccatgctgcagtgagcatcttgggtcacctaactattaattctggaggacagattccagccgtggctttgctgggtcaatgttacagccatttatgtcccctcagatgttgggttggtcctggatgctgccctgtaactccatcacacccatctgaagtcctgcctggtaggcagcagacactgggtgtggcttggtttctcatacctttttatttcagtccctggtgtttttgtcatcttgtgtggcagtggcagtgctccagctgatcatttttatgggacagtccttccttgatgagacccagatccctgtcacttgacaacataaagaatattattcttcataccagcatttcccaaagcattttttcaaaggatagtaacgacttttatgtcaaaaaacaaaacaaaattttgaattcaaattaattttggaacrtaattgaatttaacgcaggctttttattgcaggacttcatggagctttagaagcccaggcacgcaaggaggatgcactgtttggcatttcctaaatgtacttraccacggaacaccatttttctcctgaggtttaggaaatggtgctatgatatagattagttttctatgaataacttggctttatgccttcatataccttttctctctactcatgtagaaactcttcttcagcttcatgttttaataatggaagaacttagtgatgtttcatatstagagatttttctctaggtccttctcatcgatargacctgtttcaagatatggcaagccctagttctgatctctggggtcctcaccatttatagacttccattagtcctgttgtgacttaattgttttgttatatttttggtggcctcctacactatggaagactttctgaaagcccatatctcatgctaaatttagctggatttttaacagccttgattgattgctggtcttaatggaagaaaatgtgatcctttctcttcctcccttgtcattaaattattactaatctatgaccagaggaagcagccactgcatacgtgggtgtatttttaaaaattgtgacacatcatcaagatggrtatacttgcccctttaattcaacaggcacctgttgaatgcctgtgcatgcaaacatgatgctgggctgagccctggggcttmccctgaagagctttggagcccacagcagaactcccagccaggctcatccaccactacagccacaaccatccctacctggagaaaggggctaaaagaagcccatgggattaacagacattctgaaacaccaacccttaggaaaggagtagaaatgggagttgggattaaaagcagaggtgaggttaaagggtttgaacaaaatgggcctgatcttgggcttctgaagtcctgtatagtgtaagtgctgacctgagggcctgtggctctcctgtagtgagggaggatccaactggagtatgacttccacctctgcatggccagcctggtgaygtgaagcacatttcttatgtcaggttcccagtttcctcttctgtaaaatggaggcagcatgggattgtaatgaggattaatggagctcatttacctgaacsscccagagggtgcttagcaaatactttatgcttcttgtgggtccattactttcccttgcctgtttttttagggaccctggagtgttaccttggcttctgattaaaagctaggttggcagatgcaagcacacatgcctcctatagtgttgtcctagactggggtggtgttagtggtcaggcaaataattgatcactctgtgttctcaagacaagcaatgggtaagaagacaaggccacggaggtcaaagatacagaaagataattgccatatatgctatgcagccagtkcccctacctcatgtgattgtagagtggttcttacactagggtggcatagaatcacctgaagggcttgtttaaacagatcatgggtggtgggtacagcatttcaggtgcggaagatgaaaggttctggaggtggatggtggtgatggttgcagaataatgaaaatgtacttaatgccatagaactggacrcttgaaaatggtgaaagtgatacatcttatattgctctccctgccccatcacaaatagattgctaggctcactccttatagattctgattctgtacctctgaggtggaccttaagagtctgcatttgtaacattcccacgtgatgctgctggtctagggaccccagtgtggaacccttgctgactgggttgggagtgacgttgggaactgtttcgccagaaatactggggacccttgagtggtaatggaattggttgtatattttagtatgatagttcttatagatgataaagacctcagaaaaatctcactatgtccatgcccaagagttccaccatgagcacatgccttgagggcagtgaccctggctcctattgtctctgtctctctatatctataacttttaatcttgaaatagtttaagattcataagaagttataactcataagaagttttaactcataaaaagtcaaaatagtacaatagtccccccttatccattgggaatacattctaagacccctagtagatgcctgaaactgtgggtagtcctgaaccctttatctrctgttttttcaatctgataactgagacagctagtaagggattaatgggtagtagtgtaatagcatggatgtgccggacaaaggtgtgattcccatcctgggcagtatggcatgagatttcatcacactactcagaatagcatgcagtttaaaacttgtgaggatgaggggaactactctatggaaagattcaggtaccctttacccggcttttcccaatgataacatcttacatatacatagtacattatcaaaagtaggaaactgttattggtttaatactatacattcttttaaaagagtgctcaactcaagattaggaatctatttttcaactaccattagccccactttggcaaggccaggtgggataagtgctggggctcctatggtgggtgtgctgcagtcttcagcagagcttggctacagaggagaaagatctaaactggaccaatttcatatggtcawkkcctctggcttgtggctgatcatcttgttctttggaattgactgtctcatgaaatagtgagtttcttgtcaccagagagatttaagcaagagccatggaatccctgtccccagcactgagaaggaacatgaaccatgtattccctgaatgtcttattccttaaaaatcctgtgattctatcaattgttttgttagagtttgtggctgacattgattacactatgagtcatgtgacattccatgttgatgtagttgccaaaatgctcgccttcctgggttctgctttcattagtttgagagaggagctgagccacagaaaaggggctggagtctgctagattaatgaagatttgggatgtgtagtctgttttcacactgctgataaagacatacccgagattgggtaaattataaagaacaagaggtttaatgaacgcacagttccacatgactggggaagccttgcaatcatagcagaaagcgaaaggcacgtcttacatggatggtggcaggcaaagagagagaacttgtgcaggggaactcctctttataaaaccatcagatctcatgagacttactcactatcatgagaactgcatgggaaagacccatccccatgattcaactacctcccactgggtccctcccatgacagtgagaattgtggtagctacaattcaagatgagatttgggtggggacacagccaagccatatcattccgccccggccccttccaaatatcatctcatcacattccaaaaccaatcatgccttcccaacagtcccccaaagtcttaactcatttcagcattaactcaaaagtccacagtccaaagtctcatatgagacaaggcaagtcccttccacctatgagcttttaaaattaaaagcaagttagttacttcctagatacaatgggggtataggcataaggtaaatacactcattccaaatgggaaaaattggtcaaaactaaaggctaaatgcccccatgcaagtccaaaacccagcggggaagtcaaatcttaaagctccaaaatgatctccttttacttcatgtctcacatctgggtcatgctgatgcaaaagataggctcccatggacttgggcagctctgcgtctgtggctttgcagggtatagcaccccacctggctgctttcactggctggcattgagtatctgtggcttttccaggttcatggcacaagcagttggtggatctaccattctagggtctggaggatgggggccgtcttctcacagctccactaggcagtgccccagcaggagttctgtgtggaggctctgaccccacatttcccttccacactgtcctagcagaggttctttatgagggcccccgtgagggccccactcctgcagcagatttctgcctgggcatccaggcatttccatgcatcctctgaaatctaggcagaggttcccaaaccttaattcttgactttgtgcaagctgccaaggcttggggcttgtgccctctgaagcaacagctcaagctgtaccttggccccttttagccatggctggagtggctgggacacagggcaccaagtccctaggctgcacagagcagggggaccccaggcctggcccatgaaaccattttttcctcctaggcctccaggcctgtgataggaggggctgccatgaagacttctgacatcccctggagacattttccccattgtcatggcgattaacatttggctcctcagtacttatgcaaatttttgcagccagcttgaatttctcctcagaaaatggatttttcttttctatcgcattgtcaggccacaaattttccaaactttaatattctgttttctttttaaaactgaatgaatttaacagcacccaagtcacatcttgaatgctttgctgcttagaaatttcttccaccagataccctaagtcatctccctcaagttcaaagttccacaaacctctagagcaggggcaaaatgccaccagtctctttgctaaaacagcaagaatcacctttactccagttcccaacaaattcctcatctccctctgagaccacctcagcctagatttcgttgtccctattattatcagcattttggtcaaagccattcaacaagtctctaggaagttccaaactttctcacatttcctgtyttcttctgaaccctccaaactgttccaacctctgcctgttacccaatttcaaagtcgcttccacattttcagatatcttcacagcaatagccccctcctggtaccaatttactgtattagtccgttttcacactgctgataaagacaacaataccccactcctggtaccaatttactgtattagtccatttttacactgctgatagacactgagactgggtaaattacacagaaaaagaggtttaatggactcacagttccatgtggctggggaggcctyacaatcatggtagaaagsaaagacatgtcttacatgggtggcagcaggcaagagagagracttgtgctggggaactcctcattataaaaccattagatcacatgagacttattcactttcatgaagacagcacaggaaatacctgtccccatgattcagttacctcccactgggtccttcccatgatagtgagaattgtggaagctacaattcaagatgagatttggatggggacacagccaaaccatatcatgggggtagagttgagggaaggagagaacattccagggataggaaatagcacatgcaaaggtcctgtggcatggcctttatgtgtaaaggagatattgataaaccttggtatgaaagactgtaggtctctgggtgcaaagtaatggctgagcatgaagctgaattagacttggccactagcttactttgctgttgacagaatgttggtacagattgagcatccttaatctgaaaatctgaaatctgaaatgtcccaaaatctgaaactttttgagtgctgacatgacaccacaagtggaaattctacaccttacctcatgtgatgagtcacagttaaaacttttatttcatgccccaaattatttcaaatattgtataaagttacctttataggtcatgtgtagaaggtgtatataaacataaatgaatatgaagtttagccyttagtcccatcctcaaagtatctctttattatatggagatatttcaaaatctgaaaaaatccaaaatctgaaagacttctggtcccttatatttcaattaagggatatgcaacgtgtacttctgcagctgccttgagaatgcatatcattgaataatgttagtgggaggttttaaactatctgaagatcacacaactgtgagagcccagctcccctgaaatgygtagggttggtcagtgattttgctatgcgccaaagcagctgccttgatccctcagagccccggcatttctgcccggggtttggccacccctggccttggctgacttctcatggatgcagcaaaaacccagtaggatgcacctctcaagtggttggcagcttttactggacagctttagagtcctgtgggttattctggttgttgctattcttaaatattgagtgtccaaaagattcgtgaactgcatctcagctgggtgggaccctttgggacaggagtaggggaataatgccgtcgttaaytgcaaagaggagttttgggaccaggttgtcttataggtttattttgaacaactgataggcttggtattgctggaagtggatagatttgggttgcctgtgtctagcaggtggcttccttttccagtatgttgcccactggtctcatctatcagactcacttgagagtatttcattattcatctaataaaggagtatgtgagattcccagaggaggaggatctacttctgtacttgacctgggtgaggaccactgggaacatttgcacctttcaccattgcaaactttgacatgtgagagtttccagaaatacagagattcttattttaatcctttttctttttaactgcagaagggaaataataatgggatagaataactgcagggagtagagagatgagaaaacattagaaaaaatagtacagaagtagagctggatgagaatccaagttatgagaacctattgatgagaggcatgcagaaataaaaagcccaaattcagtgatctaaatcagggctcagatgaggctgtttgtattgcacggtaggaatatatccagaaacagtgggccttttataaattaagcctgccattctccaattgcttaagacactgaggcccatcaggccagaaacatatgacccactttttctgagaaggaactttccctttaggagtggtaatttagaagaaaagaacaagcccaatgaatagtcccttatgggaggcatctcagcagaggccctttttgggggcaggagggattgcatagcaatactgcctacccagagttgttgttcccaggctagggtccaamtcagggcagggagatctactggaggcagcgtatcacacactagttgtccaagagatggagagagagtgcaaaatctgagctgtgcttatgggaagctcggagtctcacaaaactacacccatgctgcccatggtttatgtttaatgaatgaaatgatgattaagataggacaattggacaaaaaggctgggccttcttaggtgggtattgagtgggaagtgattcaagaggscagacattctgtctggayattagctggaagtggggctggacaagatgaactagagccctcttgtggtcccatcattcaggcctgtagctttcatttgagaccagtggttcttaaacttttgcagggatcagaatcacctggaggacttgctaaagcacaaattgctgggccccaccccagcgtttctgattcagtgggtctggggttgggactaggagtgcatttcaaagcactttctggagatattgatgctgctggtcctgggaccacactctgagatacagtaatctagaccatgaaggaggtctggatcctggggagggaatccgctttctgctttcttaggcactaggaaggcaaggagatacttggggctggaaggtggcaggggagcatggaagggaggagtccttgtccatcgtgtctcaccatctgaggagctgtcatcctttattcatcctgcccttctgcttgccctcagtctcagaaattccaaaagacagcttatgaccctgcatttttggttaaagaaaggagggaactgaactgtctgctctatgaattctgggctagtggggatcatggggattttgtaaattattttggtagcccgttgagttttgtctcaggatttcagcggaatccaaaccatgtgacatggaccattatcattcagctgccacctcctggatcctgccctgtaaacatgcccaggggtctctgaggatggaygcgtgtcattcacacaccaagtgtgttagagacaacagaaaaccttgtttttttcctgtgttctggtgaaagtcttttctgtctttccctttgtttcttcgagggagcttgagtggcaggattattattaagagtactttttaagttcccaacaattagataggaaatgaactgaatgggrgttcacattttatcttcaggaaaatgaccgcaagaaggccttactgtggggtggttaagagcatggcctggctttggaatgcctggattgggaatccttgttttgtcacatcatcgctgtgtgatcctaagccagtgatgtgacctccctgcacttcaatttcctcacctctaaagttgggataatactacaacttatttagtaggattgctgtaaggaccaaataagataatatagctcatgcagttagaattggacctgtcacttacagatagaaggcaatacattttagttcttactgtaagactgagacatccaaagacgtctcatactgtaatgtgtgatatttatgtatatgctttttaaggactacaatccttagtttcctacctactcaaggttatgttttgtagatgctaacagtgtacattctagagaaaatcagctggagggaggaaaatggyacagttctaaaattctttaagcctcgtttaattttttacctgttactgctttcatcatcacctctcactctcattttctaataagcctgaaaagcatgatggagtcataaatcatgtctgtaaaatgaagatgtgtagrctttggtaagatctcacatgtgatgttaataacaataccttacatatctggcctcacacttcacttaaactgtcccatttaatccctgaagtggtctcattagcttctgttagtcccattttacagtttgtacagtggagacttcagagaagaacctggcccaggctccacaggcagttaatgacagagctgggatttttttttgtggaggaataggggagacttttctggtaaagaccagaaaacctgctagacaaattctaaaagagccataacactcagagckgggattttaacttcatcttctgcttcagggaccacattgttcccagtgtgtttaaacmcctggctggtttttcacttggggttctcattcagattcgtgattctgtttactgagagatgatgtcccagttactctagctctgtaacaaatgactccaaaacttggggctgtgaaataatcattttattttgctcatggattctgtgggttattcagactcagtgttccatgatatttggggcctcagcaggggtgattcaaccacaggagctagagtcccctggggtgtctttgcccacgtgtcccacaggtgcatggttaggacagggacctcagatgggctgtcatccagaacacctacgtgtggcctctcaatgtggtctttctgcctgggctgacttgggtttcctcagagcatggcaacctgattcctagtgagatttccgagagagtgcggttgtctggcacttctgtgatctggcaatagcttcaaggaaggaaatatatttttacattgaaagaagagaatatgagccatgtgtgccaggtacggggagccacctgtgaagatcctgagtagaggcttaggtcactgtggacacagtggcagcagtggacaaggacaagggatgccgggtcatgcattcaccccacaaatattccatctatctctgaactaggcagaatgagcagggcaccaatctaatggctcttctggataatcacttcacatgggaatcctaggactccatattatattcttatcctgttgaaaatttgaccttttaaagatttatttatatttagctcaggccttaaaarttccatgtactatctaaaaagggaaaagttcatcccagtcaatgtcctgtcttgcttatgtttaagttggataggaagaaaaaaatccacaccaggagaagattggttgtaaaagtttattttacatttatgtgaagtttatttttggttctgatattcttcatagggtagatatttcttttaagactgttaatagtgtatttcctttttatttgccactccccaccaaaataaaccctcttttatttttgaatcagcttcatatcttcagaacgtccaactttaaataatggttggagaagctccaggttaagtagagagtaaaatcctattgctttctgacctttgggttaggatcaagtgtggtgtaataaaatatcagtcccaagagtcacctttgctgatttttttcctattattctttcctgttattccatattcatgcaggtcttgcagccaaggattgttacattaagatccaatctgaaattaaaacttatggttttaaccaataagctataaagctgttgaactcccactgggatgtagttaccttttcctaaacttcctgcattgtctccttttagccccacagttgatttcttattgagcctttggaaagttccttgccgtttcacagccatttcccgtcagagtggggaatattgactgtgcaaaccacttaaggtcacaggcrccacagctgtgtttcttctttgcagaaggggggtttctttgggtggggctgtgctcagcccttccgggtggtgaaggtctgaggtcacactgggagagcaggtccatatcgggattggggctccagcaggatcagaatgacttcacccagacttctggacctggaactcattctcagaaccttccagaagaccctgccctggaattgctttcaagggtctttttcatctgtgtacagagtatatttccttggaggcagctttgctgaaggccccttgagtcaagggtaatagggtgggagcagctatacacagttgcatttcagtgtttgatgataaaatggtgtccgttggtgagcatcttggtggtgaggaagtttatacgaccacagatgcttctcaccccaaggtacccgtgccctgtgctgctggtgccactcatcctagggcattcctgcttggcagtagcagattctagattgtcctgtttgctggtttgggggctgcaggggtctgcagagtgccgcaaggaggaggagtcccagatcactggttgaccttcagcgggcatttaacagcatattccatcaggcctcacctactagtgttttgttgaggctgctrtgtaactttgactttctctgctgtctcctatttaagagtaaataaaggtagtgacagtcacaaaaatagcatcaatgatgacaactagcgtttactgagtgctgactatacccaggcaccattctaacctctttacccaagttgtctctgctagtcctcaccacagccctgggaagtgtgtgctgtcatatacccatgaagaaactgaggccwygaaaggaaagcagctctgcccaaggtgttataagcagagagcaccragacaggacccaagcccaatttgtgttgactggggaatcagtactcagttctcttagtctttggctgttttgttgagtgcccaggtcatcctggtagaagggagacagtgacccacgtgaaaaaggatggctacagatgcatggctgcatggctgtgcrtcatccaccctggagtatctgcttgccaaaaatagggctacctgcaaaatgctttgagcactgtggaaaccagccgttacaactccaaacgtttatttttctgataataggtcaaggttttcataattgagttttaggggggctaattttagactttctgaaaatcagtctcaagaaacaaaacccagagtcaagtaaaaggatgcttttggaactgatgattctcagaagaagccatgaagggctcggccataaccccgggaaagctcactggccagcagcctggagccagtggagcttcaggtggctttaattcttccctggatgctggtggtctccagagacacaggggtaaacaggtcagcgtccttgtcctcaagggcgtcatcctccagggaggacatagctggtaatgacaaaatgtgggccagcgccttcttgcagctgggcacacagggctaggggaactgagaggagaaaaggatgaatttggccttggcttggagcagccttttaacagaaacacgcgtaactttcctgcagatgcacttcctgtgaatgaagagtcttgatatatatttttctttaacaagagaaagccaggcttttgattaataatttatatgtcaatgttgggatcttcattttgttatgagagatttcagttacaacagtgtgaggtgggtggtcaggaaacattccccctgggctcactttttgcttagaaaagtcctgatggaraggttgaggtgggaagagagtgagggggaagactccatggagcatgamvrgcatgctgtgcctgccacagccaagcatggaggtcycaaccataatgtgtttttgagacaggatctggctctatcgcccaggctggaatgcagtggtgcaatcttggctcactgcaacctccgcctcccaggctcaagccatcctccctcagcctcccgagtacctgggactacaggcgcaccaccaccatgcctgcmtaattttttgcattttttgcagaggcaggggtttcgccatgttgctcaggctggtgtcgaactcaagtgatccacctacctcggcctcccaaagtgctgggattacaggcatgagccaccacactccacctccaaccacaattcttgttttaaaaaatgaaaatagagtgaaacagaartggtagaatcaagtcaccttgctcattcacagtcatgtgtggctaggacaccatgtggtccagtctgacacaggctgatcctttcccctcaggacccatccttggggtcgtccagtccttgggctctgttcctctgatgtggcacaggtggtcagtggggcagggaagacagaaagatgagggccacatccacagaagtcatttccttcctgtggtacagacatgacaccaccctgtgggatgaatggggattcccatgtttgctagttacatatggccaagcccttcagcctttctgccccacttccagtttctttcttgggtgggaatgccttgagcctcagttaattgtttgagttttcttgagtataaaaggaatcctggctgggcattgagtgaatacaatcataaaacccaaatgatgctgttggcctcatctgagctgagagtggtgttggcaccttcatagctgacatcaaatggatctccaagcccaaacactaacagtggaaccagctattgctgcttctggtgtatcatccaaatgggttttcccagccatcttctggtgcatttctaacatacccttaaaaggcataaaaaagtggcatagatgatggctggaaagattaagttcyttctggtggcttctttaattttggaataaccagccttccttcaacccccttacatgcattagaaacttctgaactgtttttgttctgtttttaattaggttgtggtacaagaggagcaattaataaaaccttccatttccacatctactgtgaaactctgtgacttcttcccgtgtgatgatggctaagtgcgcagaacatgtgaaatttaagtagatttgtggaaacagaaacacatttttatttagtcrtgagcgtcacttggagtakaaatagagccctytatgattcgtgtgctggtctttcttcctggagggcttcagtattatctcatgctgtcatctttatgttgtattggaaaaatctgggattctttttcccttggtcattatttgctttttaaaaaataatgtagttttaaagaattcttgctatttaatctcaagcccaaacatggtttttagtgaggaactgatacttaataaagtttgatatttttagttctagaaagaattgttttggggggtgggaggctgcagttgagaggtacaagaaatgttcaatgaggggaagacactctactgtggttccatttgctctttgaaaacttgtgtttctgttggaaagaaaggtttgattttggaagttttaaatgtactgcatgatgttgctaaattttagttcgttgctgggaagttttggatgagctcatttcataaggatttatgtgccttataggccagtgtggggtaaggggtggagaagcttgcctccttcagaagggtcttcattcctagagggatatggaatgacccactgctttttggtgggaaacgtaaaggccagtcagcttttggatgaattttcaaggaagacagcagctgtccatcttcagtcttgacttgccattcccttagggagttccttcctttcacccatctttttctccccatggcttggccatgccacagtggtccctcggcttcaacagtcttgcttgcttacatctactaactgggcaagagagaccattctcccattggccctggaccaccactctgatttggatttagatgggctcaggaattttgtttggaatccttttggccttaaacaaaataatgatgagagaaatctgcctcccataagtcataatctcagcaggctcctgtgtctgagctatttctgtatccaggtccccaagagggctacagggaaaacttcatcatgatgggagggaagaaagaaggtaaagtcctaagatgtttgcttcctattccttgtaaggtttagccatgtatagtcatgtgccagtcacctagggctgagaaaggggagcaagcagagagggagaagaggaagaasccaaatgagatggktcgtaattgattagtggaagttaaatmatgttaaggataggaggcttgtcccctccatcatgatttagtatatcatccttcccaagagaagttttgagaacttgtcctctggtatccaggaaatggcctccccagcagtgtgcatagtcccagggaagccgtctcatgagcccctccttctcttgactcctctcctaatggtcacatggtgccaccactctttcaagccaagtcaaattgcatgcagcagaaaacccaaataagtttatgcagtagaggtttattctcacaccgaagtaattcagcattggtatggtggctccatggacttcaaggatcaaggatcctttcctctttctgttccaccatcctcagaacatggcttccagtttcaaagttaccttatggcccaatgtggctgttggagctccagccatcacatccaaattccagataggaaaaagaaggaagagagaagattacaaaagaaaattatctcccagctaatttgtctttatttatggagttttcctggaagcctcacattatggtttctgcttgtatcttcttgaccacctcttctccaggggagactagaaaatgtcttttaggtaggcatattgtagattggaataaagttgagtttggttaaaagggaaaagtagagaatggatattggttaggcatatagtctctgccatggtctagaatatatgaagaacctcatgtgtgaaccttaatatattctgccaaatattctgtttataatatctaaccctcctatcagatcctaggccatttggaagccaggagcttatcctctcctctttgtatcaagccaggggcccacatgttggagttatagcccatctttgttcaattgattcagattcagcccttgcctcccatatccctcaccatggatatgcagttataaatgatttcttgttaagcatttttaaaaggttaacttcttcccagagagcttttacataattatccatttaatgtgtttttaatgataaagaatctaatagttatcaataatgttggaaaagtaattctaggcatgaaaattagcagtatggtacatatgaagtacataccaagtactacctgattccagatattaggaaaacaagacagaagggtttcaccactagtcagtatcagtagattgttggggagaaatctttatgaaaaatgccacttttcactctttttttcaagtttgaactgactgtggaaagatgggagatgtctgagaaaacttgtgtcagtacttcatgtttgtaaaaggacagggaatccttctgaaaatctagttacataaatttatgttccaccacaagaaaaatcagtggatggctggaaggcggggctttcccttttgctctggaagggaaggaaactctgacagccagacttctcagtcggaaagtgtctttggtgagccttactatgtgactggctgattcactttgtccgctaagtcttgggagargtgatgtaaccagggactgcaacttctagggaaaggggaaaaatcactgttggccccaccctctagcattggaagcttaacsrggctttggcccacagcasatggaagtttgagctgtgttttgtaattcttttttaaatgttcgccagagcatccattattcttcctcattttctcttctcctcttccctccttttcttctttcttaccttttctcttttttatcctggatgtgctcctgtatggccattctaaatcaactcaggtctgacctttggaaatacgtacagtaataaggaatcctaggggcttcctgctgtatttctgtttttgaatttgattaacatgagctaagaggttgagtagaaagaacttggactttggtgtccaaaagacacgggtatgaattctgactctaccattactggctctgtgactctggacgagttgctttacttctctgactctctagaatctcacctggaacttgaggttaattcctgcttcaaagcgttgttaggaagattgaacaaaataatgtgtgaaggaaaacccagcgagagggatgaagagcagagtgtgctgggctacataggctaaactaagaagtttggattttatttayagtgctctgggaagcagggaagtgacctgatattgtagatattttcaaaaaatcactstgggcctgtggagtgaatggaggacaggagctggagtggaagcagatagcccagctaggaggcaagaacagtggacaagacggctggactagtgtggtcacagagggaacagacggaagcagtgattcttgagaacttttggaggtaaagacactaggagtagctgaagtcttagatgtgaaaaagggagggaaagagaacactcaaacatggatcttaggttgggtcttgagcgcgtgattggtgaggactgtttgacagtgtagcccaggactgtgcatggggatgacacccacaagatgttggctggctggctggattcatgactatctggaggaaagagagaatgcgtgttcttaggccatgttggatgctgaatgcagtgggacagacccggttctatttcttgctttgaagagattgtgttccaattatctgccctgtttagatggcagcttccagaatcaagttggtcagttttgagcaagatctggaaagcaagacaatgtctcaaaagcatcaggacccctgatatccaccttgttaacaccgtagatgacttcggtgccctccctgcagccgtctgctttaattgtcagaacaaagtgaaagcgaactcagagtgggacttgggatgggctttggaactgagcagcattctcaaagctgggtgctgtagtggcatgactattacaggtggggccaggaccccacttccacaaaattcaattggatacatctggtaggaggtgttcacctggaaatctgggtcttaaaccactttgagaaacactgtcctggaggtaagcagcccctgttctggttctttttcttccactttttaaaaaggaaatcagtttggtggcaaaatctccccttcctgtccataattcagactacgacagcaattagaggcaggcagcctcccctccaaggagaaagaaaccctccacgtgttttatgagtatattcctaataatgacaatagcagcaaacaaacaccatagtggtgatttcatactcatgaaattattgtcatggagttagagcctagataaaagtgtttggcaagtctctaaagcatatttcaagagaaaaaggaggccagaatttatagaatctaaaaatagcagttgaagtgcagctgtgtttagcttgtcagagaacctgttgagtcaagatgggcaggggattttatttctctggccctgaggtcatttgtcttgtttaagaaggggcagcaaacatttccaaatagggattgacttttaaggggaggaagatggctaaatgtatatggtatttcttgttttctgctcttactcttcctacctccaaccccattccaaatttcctcttaagaaaaggaaggrgagtttgtttttctcagtagagtaagtagtgactgcctaggtggcaggattttggatggtagtggtgatgttacttattgatggcacatttgatgactgttagtccatggagtggtgggggtagactaactatctggtcttagtgggttctgtacaatcccattaagttgaaggaataaacctgtagttggagaaataacagtgtgacttctccaagactgattggctgayttttggaccctctttgtcccatttctagtcaggaattatgtcttctactgttccacaacccacaaaagaagatgtctgttccacttctggcctaagcaatcctcaagcctctatacttaacaacattggaatgtcaccatcttaaaacttgtcaaccagtaggccttcaaacctcctgccctttaatatttattgaaaccttggtggaaatgaattctgtttttggtggagtgcgtgaagttatttccctccattagtttgtaggccagaggttgaaaactagtggcccgcaggmtgagtcttcctcaccgtcccactttgcttgcctggcaaagtgttaacctatacaattgccaatattggaaaactgggatactttgtttacaaatctttatttctggattctcctgggttgctctaatatatattcttggtttagatttcttttctggagaggtgtccccagactgctgtgcataggtccttgtcctcccagagtagctcacctgtgggtcatgatgagaaatagccactgtattttatttgaggataataagaaaggggttaaataaattgtatgttgagcacctagaaaacatatgcatgtgcatgatgagcaccctgtaagcattagctattattgctatcatcatcagcatgtttaatgtattttctgttgagggttccattgaggacattgttcatgacataacccaatgtcttatgaggcctcatgaaagacatgtctgtcagatctcagttccagaaaatagctgtccttcttctgaattactggttcatctgtaccttactcatgcccccaatcttatttctatctttgcactagctttgcagaagctcagaggcaactatgtagttcatgtctagcaggaggacttggattcgatttgttgatcccttggtttcacatgccataatttccttgcttctctacttttctcacttattttgttgtgagcattattgtaagcagccttaaatcctgttggaacaaggctgggtgtaaattaaaaaacaaatcaagcatccattcctctgagaggttatataatcactgagaataggcttccacatcaggacaggtttcatgtcttagccttgggactacatgttttctctttcccttctggacactactgacctctcattgtcatgttggacttgattctatcagttgtgctcatgctttcccttgaatctagataacctgtaacttctgttacagaatgagatggcttatttccctgggtagactgactgtattagtcagctattgccacataacaaactgccccacaactccatggcacacatcaagaagcatttatgttctcatggatctgtgggatggttrgacagttctgctgcaggtctgcacgttggctggggaagctgttctccatgtctcttatctttctagaaccagttggctactggggcaggttcttctcatggtgatggcaaaaatkcaagaggggcatgcagaaacatgtgagacctcttaaggggtaggctcagaactggcactatcacttctgccctcattccattggccagagcaagtcatgaggcccaatccatcagtagagtggggaaatagagtagaaatagatcagcctctagtgagaggaaccttagagtcaatgacaaagggtaggagtaccaggtggtgggtagggggcagctgataagtaatgcagtctagcctgtaatcccagcactttgggaggccaaggcaggtggatcatgaggtcaagagattgagaccatcctggccaaygcgatgaaaccccatctctactaaaaatacaaaatttatctgggcatggtggcatgtatctgtagtcccagctactcgggaggctgagtcaggagaattgcttgaactcgggagacggaggttgcagtgagccaagactgcgccactgcactccagcctgggcaacagagtgagactccatctcaaataataataatattattattaataataatacagtcgatcacaggcagtgtaattatttgaagaccataaggttgggcatacagcatagagtatctagcccttagtggctatgttggctattctctacttcccctctccagatccattctccaccattatccctcctgctttgtgcccttgggaggctgaccttcccctctgcctttwagttgggttcagtcagaggggagcactggaaaaagagggtggaagagtggccagccatagtgaccatggctctctacggaaggccatagcttctgycaggtggttagttctaataacttaggggttccagtgaccactccccaccttgctccttccgacctagggcattaatggctccctgctttgccacaggggtctcttttaaactgaccccccttactgttgtaaatagtcccttcagtgaattctttttgtctccctggttgaaggaaacatctgcttctggccaggaccatcatggatacagtaggtgctcaataagtgcatggttgattagcaggcctccttgtttttcctctcctctggcctctacatcactaaatggtcacttctcttctagcctgaagagcccatggaatgtcagcttgggaatccctccctctttccccataacttgtccaaccaccatccctctcccaagaacctggcacagtaaattcattagagcgaattcaaataaataaggttttacttttcttctttgggatttcttagcatgcccgttgggacaattagggagggattctttcaagtacaacattttctctagcaattatgggggttttatctcccagatgtgatttatgccatattacaytccaagaagggaacatgaagaatgtttgtggctaaaraagtctcaacacaaggaaactacaggtgaaacgtaacaatagtaattgccttactttatttgcgaaggggtggtgaacactaatatgcctgactccatagagcagtgtatttggttttcttaagcaggaagaagggssccccccccaattttaatttactgaatgagtttaagaaccatggtgtatttcccaagcttcgctagtgaagatggtattttgttaaaaattgagattcccattgatccagatccagttgggcctgggaatctgttttcaacgtgtatcctgagtcatatttgggaagcactgggctctgcttatgattctcacgttctggtctgtgactgaggagaygtgccatgatgagagtgatgatggtgatggtggcagacaagagcatgtcacatttagaaatactgtaactggttgctgaggttttacatatattcyttctgagcttgttttgtctaatattgcctgtgccaacagtattttaccagaattgaatgaaaagaaaggtaccagcagatttttttagatgttctaattgataccagaagcaaagacgtagaaaccgtcatgttataaacatgaaagccccaagcaaacagcctttagcccaccctttgagaaccactacatgacttcttgataagattctttcaactttaccctatgcctggatcatgaaagaggtgtttctagaaagctctgcaaaggactttctctgacagacggctctaggcagggggaagctctgactaactgatctctggagaggaacacagatgttccctcctaaaaaaggacatgctggccttgctttcttacaggtcacgaagtctcttttaggaatgccatttggcatttcaagtttctgcagcagttctgcagaaagccatgcctagaaaatttataattactctgataccagatggctttgcggccttcagtatcaaatgcattgtgattgtgctatgagaattttggggggaaaattccaaactttattaattattgtattggggaaaacatcatgttattgaattttaattagagttgctgggcagcctgggctgccttttaacttacgggtcacctggttattgcctgtgaggctcactgaggaaatgtcttgctggcaaagctgagttcgctcagaatgtggactgtkccatttttctgttgtccaacacttgctttgtttgtgacatttagctccttttcttcctttccatcccaaatccacaccctttcttctgtcttttgcaaaatctatgacactgttgaatgaataatataagcccaaggacttggagggatgagagctgtgatgcccacatgttttagtgttggcatgtttccctcatttttggggatgccttgggttgaagctgatttttcagcatccctggtttagcatatgttgcattatgtatctgggaaagtagcatatctattttctcattttgcattacaatagcatctagtaacattcaagcctcaattaattgaaccaataattattatattaaaaatggtatgtatgccccaggrcagagrttaggctatggtgggcatttgagaccttagggccatagaccccgaaacatgcattctccagaactgagtatgcaactgtttgctttcgaccttacagcacaggctttgggagaaaacagttamgttcaggtcctaactccagtaatgaatttcaagcttcttgttattgtttttcttcctgaaagacaaagggagttttatgccatggtattttgasgacaatgttgaatcaattgttatcaratgggaagatttctgaatgctgaatagtttgtaatatccttcaaaaaaccaaaccaagaacccacccacccattcaccatttatctctccatttgtccacccacccattacccacccatccatccattcacccatccatttcaacattcaccagttcctacaaggtactgagtactgcatttatttgctaggggtgcaaaaataaagtctaataataataataaccatcatttattgagaacctactatgtgttgagcagtttccaatcttcaaagcagttttgtgatgtaggaattatgttctccgttttatgagagaacagaagctaatttacttgcctgggtcaccaggcagtcaaggcggagcaggcctgaggcatccttgcaacattagaaccagaacaacatttcattmttttatgttaaacggactctcctgccyggacccaggcccacgttagcatccagagtggcatgcagtggcagaattggagctggaacagccctcatttgttgtcttctctccttgggaaatcttcctgctatcagtgaaaaagggagagggatcagctcttgtttcttggctttgctctttacagcctcttagaaacttgagttctatctggattcatcstgtcatttgatggtacaggagtacaaatggaggtccacttagcgaatatctaaatatttaaagattacaaatcaaggtaactgttcagtaaactgtgttccatcctaccttgacaaatatacctttataacaacttggaagccctaggttgaattttgatttctcaggcctctcagagtttagtgtagaaatggatggcttggggagagccagcccccagcccacccccccacttccctttccatctgactccatcccgcatggcaatgggccttctgtgcatgcgtgtgtggacacccatccaagcttcgtccaccccctccccacagaggctgcccttggacctcaggtagggtacactcactcatggtgcactttacagtgcaggggacaaaccctggagtagagcccaacatggaccctgaaggaggacttagggctgttggggcagggatttctgttgtcctgggcacacagagcatatctgcaagagggagatgtggagactgaccttggtctcacaaactcattgccccttgcaaagaaataaccaggagggtctcctgagaatggggttcagagtaagggcccctcttgcctgggtcttacccagggtgataccatttctgccaagtcagaggatgaaagggacttcggcggaagccatatgacccacctctgtcattttagggagactgagcatggctggtaaatctcagtgatggctggagccctgggggtccttagtttccyagcaagtgccctgtcctgctcttgcctttctgagcatcatcctcgtggcattctggagcatgaggacccaaggctgggtctgagtggatgactgtagttacgtacacaggctctgctgcagggacaggattacagaagatgtttacacaaagctgtagctttggaaacaggctgtggtgcatatcttagcagccccactgaccagcttggtgatttttgttcaactggagccttggcttcctcgtctagaaattggagataaaatggtatctgtaggtagagttgtgtaggtggaagatgagatgtttgtagaaatcttcatacagcacttggctttcccaaagggaacatcagcgaattgtagccactgtgactggagctgctactattgttcaccaggtgtcctggaccccactgagaagacgctgccattcgttcattcactgattcacccactcaaatattcatagagcacctatcatgtgcaagtactattctggtagcatgggacttaccagtgaacaagagaagcaaaattccatgccatagtggagctaacatcctagcaggtagaggcagagataaaccataaacataattaacatggagatatagaacatatggaatatagagtatggaaacacgaaagctgataagtgctatggaaaaaggtggataagggaaaggggtttggttgacccaaggtgggctgtaattttaaatagggtggttagggtaggcctcatgaaagaggtttttaatcaagaacttgaaggaggtaaggggagagaaccatgtggagggatctgggagaagagcattccaggcagcggaaacagccggtgcaaaggccctgaggcaggagtgcctrttgttccagggacagtcaggaggccagtgtgtctagagcagaatgagggtgtaggtattaagagacgaggtcagagacatgacagaggcctgaccgtgtagggcctagtagaccattgaaaggacttggcttttactcattgcaaagtacggaggggacaaatgacatgaccttctgcatctcctcccacgccttgggcccrcaggctgcctctgcactgttagtcctccctgacttcctgccccaggctcactgcccccatccatgttgcacacccctctctacctgcagccgccatcccctaacaggtagaggtgtgccctgggtccactccctcaagtcccagctgcattaccagccaaggatgtgatgcatagtattctggagctcctttttaaaaaggagttacattgctttgggagttcaggacacaggcagcctgggggtgcttgcttcatttctgaaaaagcaggttgtggccaccctttcatgagccttgactctactgggctctccctgctccccatggagcctcatgctgtcctcaggccaccctagccccctgttctcctggctggctttatcccgctgagcagtgggacagaggacaggaagatgagaggaagataktccagagctgggtggagagtcagggtggagtagagctgtgtgagggtgtgcatgagggagccaacaggaaggagggctgggttcttgttctctgaccaattcccagtcatggctctcccatggggtttcacagctcagtccgaagacacattgttcctgtgcatggtgtagccaagcccaaatatttagctacggccacaccagcccttgttctgcttataactgtggtgtagacctcagtccagacaccctccaagagatacccaccctgccccttggcactggcttgggcggccttgtctggtgctggaaggctctcttgggttctttgccaaagttcagatgtccccctttcccactctgtgggtgggccctagtgggggatggatgagggctaaggcatgctttacccctggctcccaggcacagagatgagggtggcctctgggtcagagggcttcctgttgagtcagagcctccagccgatatgcctactgtcccacccctactccacatagatgcagggcaccctgcagctttgtttcaggaggaactctgccagtggaaaccccatgtccttagcgcagccctgggggttatcagggtggctcagatgcaggaagtcctcgcctctgctgtcctgctctgccccaccctgtcctgcagaggggaggccctgcccatgggagagtctgcctcyactgggcagtgctggcctggaggaaacttccatgccacccctcctgcccctgggctccagggctctcgatttttggggtaaacagaggtgctgggctctgctgaggataagctttgtgatctgggaaggatccctttctcctcattttttccccacctccttttcatcatgtctgtgtgaaaacgaaagctattgtttatgtaaaaggaccatttgcctaatgtccctggaatttatttgctggagcattttccattttcatattcagtttagaccttggctgaagtagggaggttatgtaactgggatggaacaaatcycattggcatctggggaccctagtgtaccccacccttagccattcctgcagtggactgagtgcccccctggctgtatattcaagtcgcctctgtggctgccagagttggggagctggggagctggagtgatagagaaggagttggcagcatttagaatggagtcaggaggaagatttctctggggggttggattcatagatctgctttggggctgtctcctcctcctcagctgtagacctcgggggtccagactttccttgcacacaaagcctaggcctttcctatcagcctgtctgtggaccttagccaacagcctgagcctcactgcttgagccttggctggattagggaaatgtctctggcactttccttcttggctgtctgtggaacctgtctctacattctaacccatccccagcagcactggccttgagggccatgtttctacccctgattcccagcctgagcgccttgggtttctcctcagaagccttgtctgggtctgcatggaattactttgacaaaggatgggatgtttttctaggttatgagggcctggacatttgcctgcctggggttttaaaagaaggcaaatatatagagtgggttttggagccctgaacttagtcatgggtggataggggtgggctgaggagggggtgcaacctctgccttccctccccacrcccccatattctgagatggtagagaaccctttcattcctccagcctgtctctttcatccctctatggactgagacatctccctttacaccagttttttacttaaacatgcttattagcctccattaagaaaaaggtaaccctgtgtatacctgtattaacacaatgctaactgctgcaacaaaccctcagttttcaattacttgacctactagatgtttgttcattgctcatgtgtcagtcaaataaggctattcctcgttgaaggtagcttcctccacgtggtgattctgggactgcagttgctttccattgctgctgctgcaattccttaggacctccaggatttctgcctcctgggggcaggaggagaaagaagcagtggagaaggcacacccaccccttaaacactccagcctagaaatgacccacatcccttctaccgactttccattggtgggaactagtcacatggccacagccggcctcagaggaggctgggaaatgtgggtccaggctgggcaccaccttgggaatgactccacatatcagtggtaggagatggagaggagggggtgtacttgggaaacggcgaggtcaagtcagcagggtggattgagaatatgtagggggacgaagccaggagtccaaggaccccttgggtttctggtttggagaacagggtggatggtgcctctgaaggcaatggagttaacaggaagatggacgatgctgagagggaaggctcatctgtcaagtgcccagcaggggtgggtgctgtaagaatgttttgtgaatgcaggaatgaggagaaacagtagtgaatgaacttgagtcccttctgccaaccccttgcagctatagtggagaaaaactgtttggtagctgtactccatagcctgaaaccatagcacctgatgaaattggaccaatctgttttcaaatacaaagctagtagttagaataaccagggggaaaaaagcataatcagtagccccatgtctttgcacaggctgccataaaaaaaggtacagttgtttctcagtatgcatgggagattggttccaggattcccaatggataccaaaattcatagatgctcaagtccctgatataaggtggcatcgtatttgtatataacctacatatatcctcctgtatactttaaattatctctagattacttrtaatacctacarcaatgtcaatgctatgtaaatagttgttatactgtattttgggttttttgttgtattgttatttttattgtttttttcctgaatatttttgatctgtggttggttgaatccatggatgtggaacccatagatacagagggctgactatcccataaattgggtgggttacacaacagaaattaatttgctcacagttttggaggctgaaagcccacaatcaaggtgccagcatagttggtgtgtggtgtgggctctcttcctggcttagagacggccaccttcgtgctatgtcctcacatggcagggagagagagggagaaagctctctagtgtctcttcttatataccatcatgaaggctatgacctcctctaaaccgaattatatcctgaaaggcccatcacagtgggagttagggcttaaaaatgtgaatgtggtgttggaggacacaattcagtccacggcatccagtggcgatgtctccccaggcatagagtcctcttctgtgttgggtattgtctctctaagctgcggggaaagggaaggcagcagattggtgtcctggcccatccacttcaggtgagaaggatgcctgctgwcctcgtgtggacacaacttcctctgctctccttggccttgccttggcctctttgctttaggatatgatgcccagaagggctcgaaactggagtctgaccaggggcaagcaggctgcctcttgctcctccccagaaagggagagccagctgagggtgacaccttgggctgcagccacaggccactttgccactgggctcacccacgctgctgctgccacacgtggggccaagggtgacaaggytgccagggagcctgggatcggagttccagggccatctgagctctgggtcagcagcagtcattggagcagggatctggggaggcttttcacgtgggggttgttgagataggggtctggccccattcctgcctgactggcagtcttcattaatgtacgtttataccaggagcaagtggagctggggaggggactcacatctctgtctgtgggaagcagggcagagtgagggagagtatggcctgctttctagctgatatctccccttgctctcagcaagctcctctgcctcttcctttccttctggtaaagcataaggagaggactcaacagtaaggactaatatttgacagtgaggagcagatagagttttttaggcaggggtcactgttaaggaagtttgtattttttttttaacttccaaataaagcttgaagtgtctgagaggctgcataacagaggtgaagggcacagacttgggagccccatggccaggatttgaatctgaactcttaggcaggtccctgaactgctcagccctcagtttcccrtctgtaaatggtgataacagtaccttcctaaggtcattatgaggactaaatgagtaaacattgatacagtgctaacaacgcttaatagagtacttacaacacttcacttaataagtgccatatggtgggtgttaaatatatattttggggaacggggtctcgctatgttgcccaggctagagcgcagtaactattcacaggcacagtcagagcccactacagcctccaactcctgggctcaagcagtcctccttcctcagcttcccaagtagctgggactacaggcatgtaccattgcacccagctaaattttwaaaaattaagtcttgttgaagagtgagtagaaaccagagtggtgataatttctggttctccctagtcatctccctcaagaatttcccagttacttctcctggaagatccgcttccttgttttgttgtttttgtttttgtttttgtttttttttgactttgagacaggatctcactctgacacccaggcgggagtgcagtggtacagtctccgctcactgcagcctcarcagcccaggcccaagtgatcctcccacctcagctttccaggtagctgggcagtgtcagcagctctcctatggccagctccaccaccaggtcagacagtacccttggcaacctgtggaccaggctggggaagaagaaaatctaggaagaaaaggccacacaaggaagaagtgcagatggcaggggattccggtggccagggaccagatgggagtccgaaagctacacagagcaaacaaccaaaattgaaagcaaacagactctgagttgagaaacctgttctccctatccagagcatacaattcagaaaatgccggaacagcataaacactgcaaaacaaatccagctatgtaatccctttattttagtaattagaggtggcactgggaatgctggtaacagtggagtttgactcagatccccttgacctcacttggcttttcctccatgttccaacaacttgttaagtctgcttctccattccattcctttcccggcgtggtgtttgggtttgtaggcaggatggccatgtatgcacaaagaaagctttggggcagtttcctgccacccagtttttatgaacattctctttgccccatgtgtggcagcagaaggcaatccagccctcagcctggaccgccgaccttgtgtgtttgtctccctctgtgcctaggcccgagaggccattagaagccccatttgtgtgtctcagcatggcaggaaggtcaaaccgctgcttcctggttggaaatggtttcttcattgattcatcaggtcagtcaagcatttactgagcacccactggagccagcattgtgcaaggtgctaggaatacagtgatgaggaaaagcagacatagaccttacccttctgaaagttccactaaaaatcaaataactgtgaacaaatgtccccttcctgctgtgatacctgccataaagaaacatgttactattaaagtataaccagatactcacatgtgacattctcttgttggttttccctgagtgcaaaagaggtggtgagtctttctaaatcctgagtcaagatgcttgaccacttattaggacttggacccttagttttggacccttagttttggacccttagtcccttatcaacatcgaaggtacagaaggattgacatcagagaggcccaggaagtttgacattggagagaggcgtttttggagaaggctgatgggctggggggtgttttccgacctgagccccttggaggagagaaaagggtgttcttcctccagcccagagaaaggaggagaccagacaggtctagctcctgagagctagcctgactttcttccagagtcttggagagcacaaagatgtgtgttgatgtacagcttaaaggggagttaatggagccctgagaatgtcctgctcccccggaggaggacatatgagtgcatctcagggtgaaagctggctaggagctatttaaaaggggttgtaccttaggtgaccctagggagaggtgatgggaccatacccaaaacacaaggggtctggggccagcggaggagaccttgttccctcttgggagttgcaggggagtgtcccaatgctcaggaagctccagggaaccttcagtgtgcctgaaaaaaagtcaacctggaatacccaccaagctaagggaggtcagcgtgcaatgccacaaagccacagaagtctctagagcgactcagctttaaacagctgccatggccagagaaaagccaacacccaaagacaccagttccaactaggtgtggcttctcctcccctcctctcctcccctcaaaaggtgttctaagcagctgctgggaaagggggtgagaggaagtgactgcagcttttttatctcccacttcccaccctctagcaaccttcaaagcctgaagtagggccaagttggaagaggcgaggaagtttaactttaaatgaaatttggagtttttcactaatacgcaggactggtcattttgatactgaatgggattattctggagattaaagcaatggaaagacttttcatgatctaagagtgatccaagagatagtgggacctgctcaaggtttcatccaggaggccagggagaaagggccaacctcagtatctaagggttaagggtgtgcaagagagtgcaatcwgtattgcatttcagcagatcagccaagctgcaggataggtgacagatatgaaacgataaatgtggaggcagggagaccaggtaagaagtctgcggtggtctaatggtggaggtgaagagaagagggcaggctgcagaaaaggcaggatacgaggtagaactcccacagtttcctcatctctattgtacatagtaatcagggtctaacatagcttccctttcccacctacgacctatgaggtgcacctgtccgtagtaagtactcagtaaatgactggtgaatgaatgtgttttaaataaggtatatagtgagaaaagtgagcattggagtctatttcagttatgtgttacaataataatgctgcagaacaaactcaaaacytcagtggcatayaatacaaagcatatagtttgtgcagctgggattagcagtggcttggctagctggctctgctgatttgggcagggcttgttcatatagctaggggtcagctagctgttggttatctagactggcattggctggggtgactggggcaactcagcaccgctccatgcatatctcactgtccaacaggccagcctgggcrtattcacgtggagactgagaagcacgagaaggcagaattgggcccttgataagatcatcctaacacagaggcagatgtagatttgaaccctatttgcaacagtcactaatcatgtgatcttcggtgatttattttacactttgtggcttaatgtctttatctgtaaaatggggctaggaaaatttatctcactgggtagtcaggattacataagagtaataacatctcattcccactataccatcctgagagggtaaataattctgcctatgacgcaggtatagaaataaaaaagactatgaaaagattaaaaagagctcaaatgaagggaagataattctaggcagaagaaagagcatgttcaaaggctgtgtgagtgaagaggtgggagagtgtgctgaaaggkgggcagaagcctctctgccctgggggaggggatggtgccagggagctctaattgtattttgctggcactggggagccatggaaatttctgtaggaagggagagatttattttattccacaaacatttatttggcacctatgatgtgcaaggtattctttaagatgcttgggagacagtagtgattaatcaatgtccagtgggagagtcaggggggtcaggaagatcttggcacagaatgaggtcagagtgagagaggtcaagattggctggccaggggtattagccctgagatacactgctgctctatgggattttgcccctcattcacaagcagagggcctacccttaggccccaagtgtgtcaagccccctctgcttacaaaactttatttttcacaaccaaaggtggttcataatggtgggctgaggaggaagcaactgaagtaggggaagctcagaagtctctgagggtccttcccaccaggaatctccccacttgaacctaaggctgggacactttggcatgtgtgttttaaaggatccgtgggtttgtggggagggctgcaccagtgaccagttaagcccagtgggtgatgcctttcctttgttacttttcatgcagacatctggaaagaatttgtcaagaattataataaagaataccacggaatgaaagcaaatgtggtgagaagcagagttgccttaagactgagaagccagcaggaatggctgctgctaagaacctcattcttataggaaggattcagttctttccctgagcaacagaagtgcataggtgcacggcatagtgtgtcagttagcatttgctgagtaacaaaccttcctcaaatttaatggcttaacacaacagccatttattattgtgtataagtctctgggttagctggatagttctgctgatctgggtggggcgtggctgattttggctgggctcactcatgtgttagggttcagcttgcaggctggctggaggctggctcagtcagatgttttagagttggctgaggtgacagtgtggctgggccaatgcctatcatcatccagcaggctggcctgggcttgtttacatggttaggaggttctacaagtgagagtggaagtaggcaaggccttttgaggcatgggcttcagaagtggcatgatgtcatttcttacacattctcttggccaaagtaagttcaagggatgggaaaatagcctcttcctgatgatgggaggagctactgtatcatcttttcatgacacatatgtagggacaggtagaacattgtggtcatatgcagtggactgagcccatgggctttggagtcmcatggggctctcaagccatgattctttacttaaccttcrtctataaaatgaaaacactgatagaatctatctcacaagatcattttgaggtaaatgcacatrtrcctaatgcatagtaaattctcagtagaaaataacattttatgtattttgcrtgtttctcataaactgattgtgyattctaattatttagtttggaaaatgtagtctctgtaggtttacccttccctgaggcagtaggggagatcatcacctctgtaatggtataatatgaactcaggagttgagattcgtaaagcagtaaggaatgcatagtcagctatactggaaatwtgrgaaagggaaatggactatgtgggaaagcgggactcttatccttgcagaagtcactaygaaatgaggctttcagtaaacagaagatggrcatttcatcctttctcattactgagccttcctcaagacctccttaacatcctaacattataaatacaataattttagaaattacttagtcaataaaaaataagcacttattgtatacgagactctgttctaggagccagagatacagaggaataaggaattaaggtatttctcccatattcaaggacttcagtttcattacctgtccagaaaactatgagaaccacccatcacctctggttatagattcttaagtgggatgtcaagccccttccctaatgatctcagtttaacctgctgtcctattcctctgtggcctattcctgtgctacactcgagccaaggtggcctcttccctagccccacacatactctttgtttttccattcttccaagcaggcccggagaaggaatgggctccacgatgcagggcccgcggtagagaacagccaggcagagcagggggcctggctggatgtggccascatctgcaggggttcagcattgagatatgacactgtcacctccatctcaagaagcccttacggatgcctcccttcccttcatgactcactgtgatctacaactcctcagagccagccttaaagtggtctgtggatcagtctcatctccccactggagctccatgggcagaaagcactctttctcttctgcctacaacatcctcctcccatcggtatgcaccccttcctaggagccccacaggcaatgacaggaacccccaaccccatgtgtgcacatatacacattcccacatgtgtggggaatgagaggctacatagcctgctccatcctcttcttttaacctgcaattactgggtgaaaagagtaggatatagtaaaatgcaaatgctagtttagtaaatggcataaagacattgaagtgtccctggacatcagtcacgtggctgtggaagggagacttagggtgtggctttccccatggaccatggtgggtctttgggatccctctcttccccaccccagtcctttaaagacccaccagcgactttgtgagattctagactcctttccctcgtacctcctagccttattggatggaaaagagggaacagtggttcctttctttctgccacgcctccaccttccattggagactcctatttctccctccgtgacatctttgctgaacagaacagctcttaaaccagaccttatctgttccatgggtgcagaagggtgcaatgtgaacagaaacagcaagtctctggaaaagagctccttcagctgcaaagaacacagaggtcaggaggaataaagctaatgagagagcagagagtcctttgtctccccaggtgttattcccagaggscaactagggaaaatggagatggggtataaacatctgaattcactgttaaacactccatgaactgttgataattccctagaagcagcatattcctgaggtagcttcatatgatctccagaagcaacttacatgtagacatttttctgagaattccagaaagaatattgataattttcagacaccatggcttccacgcctcatcaacatragcagtattagkctttatctctgacatcaatcaaacttgaacaccatcagcatgggctttaatgaaattctcacatatgtatcagaacttgtattttttcctttagtcagtgtcttgatccatttgtgttgctgtaaaggagtacctgaggctgggtaatttataaagaaaagatgtgtattcggctcatggttctgcagggtgtacaagaagcatgatgccaggcatccgctttgggtgagggcgtcaggctgattctactcatggtggaaggagaaggggagccatcgtgtggagatcacatggtgagagaggaagcaagcggggagtggaggtgccaggctctttttaacaaccagctgttgtaggagcacagtgagaactgactcactacctagagaatggcaccaagccattcacaatggatccgtccccatgacccaagcacctcccatcagacccacctccaacactggagatcagatttcagagtgagacttggtggggccaaacaaatcatattcaaaccatagcaattagaatcttaaaatcaaaattgatggctttatttttctaaaaatgggaaaatatctccaaaacattgttcaaaaacaaaacaaaacaaaamaaaaatgtttgtycttatatcccatcagtttattcaactaacattcactgtggactttttataaggcagtaactgttttatgaataggagatataaaactgggtgaaacagtgaggttcctggccactgtattgtaataatagaggcacatataccaaagagctaaaatacaggcagcaaactctagggactgaagtaaatttccttaatttaatgaaatgtatcaagcagaaacccacaataagcatcatacttaaaggattcatttgaatttttttatttatttttattaaatcagatatacttttctagtttttttaatttttattttttgcatttcttgatcatttcaaagtgaggtcagttacagagtgaatgggttcatcctgtcattgtaaataacagtttttygtttaataatggcattttgtattaccaagaccttgcttcacattaggtgtttygtatacattatctcatttaatcaaaaccagcastctatatcatgggtgccaccattcctctgatttttgctaaggaggaaactgaggttcaaaaagggtaaataagttgtccaagaccacacagccattgtttggcagagctggggcaaaggtctatactgctgcaaagcttgtgatttttggctrctaccctctaatgttctgtgagggtggaacacctaacctagaatttccctgtggatcactcacccccaatgatggcatgtcttgctctggacccatgatataatgatctggatacagccaaagtcactaagcacgctacaccctagcctttcaattcctttattacttcatggagaatcatgtatttcagccactcaagtatctttaaggtctaggccttatcgaatggggtttagtcactcagtacagtctgccctttgtactcatgagttcagcattcatggatttgaagaactgtggggtgaaaatattccaaaaaaatggatggttgcatctgtactgaacatatacagacttttttcaatatttcctaaacaataaagtatagcaaygatttacatattatttacattgtattgggtattataagtaatctagagattaaagtatataggaggatgtgtgtatgttatatgcaaattctacaccattttacatcaaggacttgtgtgttcttggggtttggtgtcagggtggtcctggaaccagttccycatggacattgaggaatgactgtgcttcccctacccaayagaagtggttctcccgtcaggttataatagggaagggatgtgtgatctttcctgagaactgaggcatgctattaagctttaaatggagcatctctaagtttccttaccaaaaagtaatcagacaaagggccatgtggcaagagctcttgcttcaccaaacacgtagtgatggacccccctatacccagtgtgccagacatcatcatgagatgtamctcctttcacatatctcttcccttgccagaggaaggaactgaggctcagaaaggttcaattcctcacccaaaggtttccaacccaaggtttctgacctggagccctgctctttcctccacaccctgctgccattattttgtcttgttgggctggggaagggcaaagagggtgcccactgctggatgaaagaagcagctacattcccattcaaggtgtgctgagcccagtcctaactgctcaagtctttcttaggtcttatgatggaactgaaaagcaggctacctattttatccaggaagcagacagaggatacggatgggcaagcacttctatcagatgctggttctgttgtaagacatcatcaaggttcctccaacccctgctcctcatcacactgcacagccctttggcagagacagggagaagcttgttgtttgagacatctggagttagaaagtatctgagctttaaatggagaaggagtggggagaaactgacagtgaagtgtagacatgaggcttagagagatgctaactaagtagtcatgagtcgaatctcccatttagtcagacacatttttctagtttttctagttttctacccttcaaaatactttgtgttaaactcaattacagagatagatccttccattcatcaagtgaattttagaagccacacctttgggtgggtcttaaaagcagttcatgggaatctataggctattgtgtataactggagggtagcagaaaacaagttccttgtgagatcagacacatgagctaaacatttaggaaaaccttacagaagcaaatctttaacggaagggtttccacactgagggccttgtgttgcttttgggaatggtgtagaaatcacgtgcttagtcttgaattatgattcacctttactgaatgtcccttctcttttctttactcactgtcgaacaggaacccaaaggatgtartttttggcagatgtcctttgtarggttcagtatttctcactcacccctttaagaccctaaagggagagttattaatagtttcagaaagttgagggaaatcatgcagaggttctcagatgttcagagaggcttcctctccccttccatgaaagttctaaggctcatgggtgaggcctaagaaaggcatgtcagttgtctatcaagttcattagtttattcagcttatttctgaagcttttgatgggccggctattcagaggtcaatgaaatagacatgagtactcttcacagaccttaccgtctaataggaatgatagcaagtgaatgtataataaataaataattaggggttgattgttacgagtgctatgaggggaatagccagggtgacatgtttgagaaggggtcagtactgctaagtgttggtcagggaagcattgcaggcagagggaacagcaaatgcccatggtttggaggcaggaatggtgttccaagagtagtagggagcctcgggactagagtttggaggatgagcggggagagtgggaggagatagyrggaaagtctgtggagccagttccctgaggggcctggtgggccatgctcagtgggggtttcatttgacgagccatgggaaggcttccagcaatgggggatgtggttttacttgtaccttaagaagatcacactgggtcttgtttggagaatggacaggaaaggagcaggagagcaagcagagagtctgaggkgcaagaaatgccctgtcctcccagcagactggagcraattctaattctgcctctgctacttcattcctatgcaactttgggcaggtttcctaatctctctgcctctcaactgttcacccctcataaaatgaggacaagtattttctcatgtggtttctaggacaaataagtattcgtaaagtcctctataaacttgggccatatgcttatctgagctataatatgattcatattgaaaggagggggactcctgcaatgttgggaaaacgactcagctgcccctatataaggaatatgttattacagtccgagactaaaaagatgcttttgtttctttactgccatcagtgtctctctaagggagggcggctggttaaaaatcacatggtgtgggcatttataggggtaataacttgaaatgattaaaccctttttttttaaagcttcatgtctctgttctccatctgtaggtggtgcatgagtatgatatagtgtgcatgtgtgacatgctgcgagtgtgaggaatgccagagggagacccacgaaactgccctgcaggcagaaggccacatgctctcagcaccagtcagtggtgctcgctagtccggcagattgctgtattcttgcaccctgtaccacaacattgttaggataaagtttcataagtcttatatggctttgaacaaagcaagtctatttttcatcatagtatgggttatttagaattcatatgttatgaggaaatacactgtttcaaatgcagttttctttgtggtgtctcagcagatactgagttttgctgccctgtcatccaagagggcctcaaggtgcccagagagaccaactgaaaaatgttcactggaacggagctgcaatggtggaaacgttctgtgtgtgccctgttcagtacagcagccactgcgcggctgctgagcccttgaawtgtggctatcagggtagaagaactgatttttaatatattgaattatgagtcatttaaatttaaagagcacagctgtattggacagcacagctgtagaaggatgttttctctcatggaaaaccccaactctgagccccaggggtcctatggatccatgagctcacagactcccctaacgtccatgaagatcatcaccaggatttgagggaatgctgtggtgcatactttgtgttggacagttatgggggattgcttttgccrtctcagcatttcaccgctgtcctcggtatgagattatggtgatgttgaatgggggtcattagaaggctgtccacagaggggatcagcccccctcaatgaccactactccgagcatgggctttcttctgtttgatctcgttgggccctcagctgtgactgtggagaacagcaagtcctcagtgagagtatttgtcacttcctactcttggtgtttaatatcatccctctggcacagatgcttgaaaatcaatggtttcttgacacatcttggcttgtgtgaggggccataacaatagcagggctcatggctcctttttttttttttttttttttttaaagagatagggttttactctgtcacccaggcaggcaggggtgcaatagagtgatcatagttcactgtaacctcgaactccaggtctcaagggatcctcctgcctcagtctcctgagtaactggatctatacacatgtgyccccgtacctggctaatgtggcttcctttatgttcagcaaggaactctcagtgtttgtccatttccttaggaacatgagtgtttttggaaggcctttgatgagtggcagttgggtggatggatgagctaatacatccatcatcctatctcaggaggatgcttggatttgtgtttagaaattgggtaactcagttgttcatggaggaaaaagttgaacattactcaagtgcagatagggaaacagtgtaagaacaaaaaactttttttctatctacaagtgaggaaaaaaatattgacagtgtgcccaagcttcatggtaggatgggtgttaattgggaatggcatgtaattctcttctggaatccagtgtctgggcaagtcctgcctctcagattaaggcaccagcattcagcataagagggtcctgcctctcagattaaggcaccagcattcagcataagagggagtaattgacattctacatggcaaaagacccttgaaagataacagatgaatgtctcatggccagtagcttggtttttttgcatggtgtagatttagaatataacttttacagggaagaaaggggttaaaatgtctggtgccatctgtcacagtaatgagttgtgcaaagcccaatgaaccttgtagaaacaacatcgtgcccagaaatagcctagacctcagagtgacatcagggggcrgggacctgatagatgtggtcctgcaaaaggaccgaaggttcttctttaacaattcaaattgaataggaaccatttttaatttgggggtaactccgtcttcaccattaatggccattcttcaaagctactttcattcctgtgagggatggccagacacgagaaagccaagcagggattttcagttacaggtgagcatccgatctgcagccagggctttttctaccgggcacatctttgtgcgcassctggtttgagctgatctgcacataaacaggcactctgggtgtggatgggggcatctgtgtactctttatggctatatttccagaatatgcttttaaagactgtggtcacatttaccttggttagggaagatagtgacttataaaaacctcaaacatttatgtttccctttccaatataaaaagtgttaataatttacccacttaaaaggttaagatcaaagagatcataaacacacatgaatactatttcaggaacataaaattcagctatttctactaacagaaagtgagtttatgggataccaatgcaaacaaacatagatttagtggaaaatgactcaaccaagtaagatttacaaaamaaacaaaactgttttcatcatctttggttgtagttttataaagaatgctggttcatggactccagacacttcaytgaaactgtgtgaatcattttaaacaggtttgtccttgggccccagatagtacattggcatttgtgaatcattttagatgagtttgtcctcagtacaaatcgtgctgtgtttaaagttcttggagacacttctctcttccaataaaaggcttttactagatgtttcagtgacataaagttgaagacataaatactgttttatattgtaagcaggaccaactcttttatggtgtgttttatacgtctagaggatttttgttgttgttgtttctttgaggttttctctgaaacttcagattaaggtagtccttgaagtggaggctattaagacctagtgttatctgtytcagggaggtgggggactaggtggactgatggaccccagaactccagattccttgcactggaagctggtgttttgtgtttggaagagcctctgccctctgtgtcatgctgcagtaaagtatgggtcaacatccccaaaatgtgtgactcgcccaaattaagtggtgtcatactctgatccttcttccactgaacatcacattcttcatgagaatcacaccattgtcctctgtctgccctgcctgtgagacgggccaygctctatgcttgcccgcctcttccatcaggaacactcacacagtcattctyctcacataccccactctcatctgctgcccctcacacctgcccttctatagaatgttctaccctttaatagggaagggtttcttcttcctatgaatttttacctcactttgtgtctttttaggtttgtattggaactatttgcaaacaggtcttggcttatctaaagaaaaattgtaagctccccatgacgcaagacagtatcttatttacctttgaaaacctcatcacactctgccctgctcagagtacaatctaaataaaagtctattgaatgactgaagtagagtttcttttttaacacttatatgcacattcttgtgacaggcacagtgaaagatttatcaaggaatgacatggtccccacccatgacactgttaaatccataatttgtgatgcattgtttttagttatctagtgctgctgaacaaaccactccaaacttaatgatgtaaaacaacagcaattttatcatgctcacagacattgtgggcaaggaattcgggacagggcacattggggatggctggtctctgctccatgatgcctaggacctcagctgggagagacttgaacagttgggggctggtgaatccatgtctaagcttcttcattcacatgcctgtcaccttggcagcatggcctagaagcctgggcttagctgggcctgagacccccagcattctcttcaaggttggggaattggaccctacatttgatgggagaattagccagttcatgttgcagaagagcatgtggagtcggagatactttacaagcatctatggaaaatacagtctgaagtgaatgcccaaatgagtggcaccaacactgattattactgggtgacagaggcacatggagaaaatgtcatgagggaggaaatgctgggatttgccttgacctctggctgggggacggggagggatgagaggtccaaggcaagatggataagtrggaataagcagccttgttttggggaaaaagagggacagacctagaatggctggctgggtgaaatggcttgttgtgtctcctaaattagattttacatttttgagggcagagctacttaatattgtatttaccccagaggaagattatttttttcattctctaaattgtttaattaaaactcatagttcatgttaaatttgttcaaastttccatctaatggtgaggtggtaaaggaaataaaacttaccaaaatagaagagggagaaatgaaaaggaaatatgatcaatgatttctgttctttttacttcctacttgcaaagactctggaaatgtaatgatggttcagagtgttctgctataaatcctaacagcttaaacaatctcctggratcatattggcaaactctaagatgatacaagtatagacttagtttgtctgagcccgaggttcagtgtttggagaaaaataatacctatgtcgagataatatcagataacctataaaagcaggtagcccagtcatgcacattggtgatcaatcaatgttagctgaatccaaatattacgagtgcagatgctgaaaggaacaaaaggaaatctcactcagtcatccatctgccagtatttccaccctttcccgcaaagaggagctcagtgtctgtctctgttattgcatcaggatctcacattatccagtaaacccaaatgctgtaggtaagagatgtaataggtggtatttattaagtggttttaataaagttttgtggataggtatgacaccatttcttttgagcttaaagatgcttaaaatagctaaggttaaaaatgagggaagatctgaaaagaaaaacagtaaagagatgtgagatgtaaacactgaaaggaagtaagggtagagcaaaaaaaaagtaaagcatcaggtaaatatttaataaaatgtttatacatgtatattgactgtaggtgtagggttagtctattgaataaagctgcctttcttaggaatggtggtctcaaaatgcaccagtgccttcctattggctgaatgtccacttctgttctatgcactgtgctaaagggtggacatgctgagatgagtgtgagtggcctctgcaccaaagagttcagtctaattctgggggttggggataaatatgttagccagtaaatgccatttattgctttagatgtcatctcagaaggataaggagcagtggggacaggaggagcaagccatctcctgggggagtcaagaaagatgaggacagagagagaatgtcccttggatccaatatggtggccattagtgaccttgttaaaaccagtaggaatggggtggcaagaaggagagtagaacagaytataagaaagaatgagttttgatgaaagtattggaattttgatgaccttttttattacaggtttgggagcaactactttcttcactctctaaactgcaaatcattcagggtaattgtsctggttcagttagcccccaagctgagaagacaggcccactgtggtttgagtaacttggaaatcttgtggggtcagtgttttgactctcttcattttggtcatggttcaggattttcacacaccactaaggtctaggggaagcttctcagctttctggataccctctcagggctcatgaagtggcaggcctgccctgggaaggtcaggattcttctgtaaaagcagagaacactgcatggagcccagagagcccactctctgcgctcttcccttcctatgggctcacacggggaaacagatgctttcctataactctgagcactgaagcagctttgctctgccttggccgaaacatctatccaggaccaaattcttaaaaccccaggggccctggggtgattttcagcccaggccctgaacctgtcataaaatgtaatggatgatatatttttaactgctgagaccagagagttcacataacctatgaagactgaaacaacataatgtttctgcagttttgaagcatttcaaaaaccagaggatggtctctctcattaggcattactagtaagacaaaagttcttaaccatttctgtgcgtggacgcctttggccgttgggaagcgcacgtggatcctttctcagaatatgcttttacatacatagaataaaatacatagaattacaaagaaattcagttatactgaaatggagttatcaaaatttttaaagaccactttatgatataataatataccagctttttcttgatgcatgaaataagaagatctacagacattttgagtactgttaagcataaacaatatttcaaggtgtctacaactataatatagtgtgtaatatctcagatttctatcgacggtagagtyacaggtctttctaatacttttgtggtttgatgcctacattttataatggaaggaaatgctaaatttcagttagaggttaataaaaataaagaaggaaaattcttttcctctatctaaatccacagatgcyctgaattctcttcgaggttaagaacttctggtttaagatatgcttttggttgacagtagtaaaacaagccaaaagaagttgaccatttatgtgatgtgcagtaataaattagcaattcagagttgaggagctcattactaatctgtggatagtcctaatcccagcccttttctttctgagctttgccttttgtaaatctcagtgcttcacacacatcagacaaagatattttgtgagtggctctaaaaatgggggcaaaacatgaccctgaggaggcctggggctgatctgagccttaagacttatttgtggagaccttgtgctgttctttttttttttttttaattatactttaagttttagggtacatgtgcacaacgtgcaggtttgttacatatgtattcatgtgccatgttggtgtgctgcacccattaactcgtcatttatcattaagtatatctcctaatgctatccctsccccagccccccaccccacaacagtccccagtatgtgatgttccccttcctgtgtccatgtgttctcattgttcaattcccacatatgagtgagaacatgcggtgtttggttttttgtccttgcgatagtttgctgagaatgatggttttcagcttcatccatgtccctacaaaggacatgaagtcatcattttttatggctgcatagtattccatggtgtatatgtgtcacattttcttaatccagtctatcattgttggacatttgggttggttccaagtctttgctattgtgaatagtgccacaataaacatacgtgtgcatgtgtctttatagcaacatgatttataatcctttgggtatatacccagtaatgggatggctgggtcaaatggtatttctagttctagatctgtgaggaatcaccacactgacttccacaatggttgaactagtttacaatcccaccaacagtgtaaaagtgttcttatctctccacatcctctccagcacctgttgtttcctgactttttaatgatcaccattctaactggtgtgagatggtatctcattgtggttttgatttgcatttctctgatggccactgatgatgagcattgtttcatgtgtcttttggctgcataaatgtcttcttttgagaagtgtctgttgatatcctttgcccacttgttgatggggttgtttgttttcttcttgtaaatttgtttgagttcattgtagattctggatattagccctttgtcagatgagtagattgcaaaaattttctcccattctgtaggttgcctgttcactctgatggtagtttcttttgctgtkcagaagctctttagttcaattagatcccatttgtcaattttggctgttgttgccattgcttttggtgttttagacatgaagtccttgcccatgcctatgtcctgaatggtgttgcctaggttttcttctagggtttttatggttttaggtctaacatttaagtctttaatccatcttgaattaatttttgtataaggtgtaaggaagggatccagtttcagctttctacatatggctagccagttttcccagcaccatttattaaatagggaatcctttccccattgcttgttttcgtcaggtttgtcaaagatcagatagttgtagatatgcggcrttatttctgagggctctgttctgttccattgatctatatctctgtttyggtaccagtaccatgctgttttggttactgtagccttgtagtatagtttgaagtcaggtagcgtgatgcctccggttttgttcttttggcttaggattgacttggcgatgcgggctcttttttggttccatatgaacttgaaagtagttttttccaattctgtgaagaaagtcattggtagcttgatggggatggcattgaatctataaattaccttgggcagtatggccattttcacgatattgattcttcctacccatgagcatggaatgttcttccatttgtttgtatcctcttttatttcattgagcagtggtttgtagttctccttgaggaggtccttcacatcccttgtaagttggattcctaggtattttattctctttgaagcaattgtgaatgggagttcactcatgatttggctctctgtttgtctgttattggtgtataagaatgcttgtgatttttgcacattgattttgcatcctgagactttgctgaagttgcttatcagcttaaggagattttgggctgagatgatggagttttctagatatacaatcatgtcatctgcaaacagggacaatttgacttcctcttttcctaattgaataccctttatttccttctcctgcctgattgccctggccagaacttccaacactatgttgaataggagtggtgggagagggcatccctgtgttgtgccagttttcaaagggaatgcttccagtttttgcccattcagtatgatattggctgtgcgtttgtcatagatagctcttgttattttgagataggtcccatcaatacctaatccattgagagtttttagcatgaagcattgttgaattttgtcaaaggccttttctgcatctattgagataatcatgtggtttttgtcgctggttctgtttatatgctggattatgtttattgatttgcgtatgttgaaccagccttgcatcccagggatgaagcccacttgatcrtggtggataaggcttttgatgtgctgctggattcggtttgccagtattttattgaggatttttacatcgatgttcatcagggatactggtctaaaattctcttttttggttgtgtctctgccaggctttggtatcaggatgatgctggcctcataaaatgaattggggaggattccctctttttctgttgattggaatagtttcagaaggaatrgtcccagctcctccttgtacctctggtagaattcggctgtgaatccatctggtcctggatgttgtttggttggtaagctattaattgttgcctcaatttcagagcctgttattggtctattcagagattcaacttcttcctggtttagtcttgggagggtgtatgtgtcgaggaatgtatccatttcttctagattttctagtttatttgcgtagaggtgtttatagtattctctgatggtagtttgtatttctgtgggatcggtggtgatatcccctttatcattttttattgtgtctatttgattcttctctcttttcttcattagtcttgctagcggtctatcaattttgttgatcttttcaaaaaaacagctcctggattcattgatttttttgaagggttttttgtgtytctgtttccttcagttctgctctgatcttggttatttcttgccttctgctagcttttgaatgtgtttgctcttgcttctctagttcttttaattgtgatgttaggttgtcaattttagatctttcctgctttctcttgtgggcatttagtgctgtaaatttccctctacacactgctttgaatgtgtcccagagattctggtatgttgtgtctttgttctcattggtttcaaagaacatctttatttctgccttcattttgttatgtacccagtagtcattcaggagcaggttgttcagtttccatgtagttgagcggttttgagtgaatttcttaatcctgagttctagtttgattgcactgtggtctgagagacagcttgttataatttctgttcttttacatttgctgaggagagctttacttccaactatgtggtcagttttggaacaggtgtggtgtggtgctgaaaagaatgtatattctgttgatttggggtggagagttctgtagatgtctattaggtccacttggtgcagagctgagttcaattcctggatatctttgttaactttctgtctcgttgatctgtctaatgttgacagtggggtgttaaagtctcccattatattgtgtgggagtctgagtctctttgtaggtcactaaggrcttgctttatgaatctgggtgctcctgtattgggtgcatatatatttaggatagttagctcttcttgttgaattgatccctttaccatkatgtaatggccttctttgtctcttctgatctttgttggtttaaagtctgttttatcagagactaggattgcaacccctgccattttttgttttccgtttgcttgrtagatcttcctccatccctttattttgagcctatgtgtgtctctgcacgtgagatgggtctgctgaatacagcacactgatgggtcttgactctttatccartttgccagtctgtcttttaattggagcatttagcccatttacatttaaggttaatattgttatgtgtgaatttgatcctgtcattakgatgttagctggttattttgctcattagttgatgcagtttcttcctagccttgatggtctttacaatttggcatgtttttgcagtggctggtaatggttgttcctttccatgtttagtgcttccttcaggagctcttttagggcaggcctggtggtgacaaaatctctcagcatttgcttgtctgtaaaggattttatttctccttcacttatgaagcttagtttggctggatatgaaattctgggttgcaaattcttttctttaagaatgttgaatattggcccccactcccatctggcttgtagggtttctgctgagagatccactgttagtctgatgggcttccctttgtgggtaacccgacctttctctctggctgcccttaacattttttccttcatttcagctttggtgaatctgacaattatgtgtcttagagttgctcttctcgaggagtatctttgtggcattctctgtatttcctgaatttgaatgttggcctgccttgctagactggggaagttctcctggataatatcctgcagagtgttttccaacttggttccattttccccgycactttcaggtacaccaatcagacgtagatttggtcttttcacatagtcccatatttcttggaggctttgttcgtttctttttattcttttttctctaaacttctcttcttgcttcatttcattcatttgatctkccttcactgatatcctttcttctagttgatcgaattggctactgaggcttgggcattcgtcacgtagttctcgtgccatggttttcagctccatcaggtcttttaaggacttctctgcattggttattctagttagccattcatctaatttttttcaaggtttttaacttctttgccatgggttcaaacttcctcctttagctcagagtagtttgatcgtctgaagccttcttctctgaactcatcaaagtcattctccatccagctttgttccgttgctggtgaggagctgcgttcctttggaggaggagaggcactctcatttttagagtttccagtttttctgctctgttttttccccatctttgtggttttatgtacctttggtctttgatgatggtgatgtacagatggggttttggtgtggatgtgctttctgtttgttaggtttccttctaacagtcaggaccctcagctgcaggtctgttggagtttgccagaggtccactccagaccctgtttgcctgggtatcagcagcggaggctgcmgaacagtggatattggtgaacagcaaatgtagctgcctgatcattcctctggaagttttgtctcagaggagtacctggccgtgtgaggtgtcagtctgcccctactcggggatgcytcccagttaggctactcgggggccagggacccacttgaggaggcagtctgtccattctcagatctcaagctgcctgctgggagaaccactactctcttcaaagctgtcagacagggacatttaagtctgcagaggtttctgctgccttttgtttggctatcccctacccccagaggtggagtctacagaggcaggcagacctccttgagctccrgtaggctccactcagttcgagcttctcagccactttgttaacctastcaagccttggcgatggtgggcgcccctcccccagccttgctgctgccttgcagtttgatctcagactgctgtgctagcaatgagcaaggctccgtgggcgtaggactctcygagctaggcacgggatataatctcctcgtgtgctgtttgctaagactgttggaaaagcgcagtattagggtaggagtgacccgattttccaggtgccatctgtcacccctttctttgactaggaaagggaatgccctgaccccttgtgcttcccaggtgaggtgatgcctcgccctgcttcggctcaygcttggtgtgctgcacccactgtcctgcacccactgtctgacactccccagtgaggtgaacccagtacctcarttggaaatgcagaaatcgccygtcttctgtgtcactcatgctgggagcagtagactggagctgttcctatttggccgtcttcgctgttatttttaagaataaattttaaaaggacaaagtaaaactccaagttgaacttaatggcaaggaagtgtcaaaatgagactctgcatgtaactccccatgcctctccactactgatatggatctgcctggtccacatcatcctggagtgctagggtgaccctagcactgtatccagctcttctcacctctttaggaattttaagcccacaaattaagtatggaatttattacatggtatcttgsatttcagaagcagaatctgagatggggatttttgccagagatttattgggggagtgctctcagaagtgaggaaaacagaaagggacagagaaaaaaatgttgagtaaggatgtggtctcaggaaaagtctagcctcagcctgatcccgtgcagaagctctggagcagagcttatcccacccagcagcaagggggatggggtgttatcctgctgcatctgccagctagggaatggggcaggtattagttttctaggccacttcaaaaattacaaatttagcagcttaaaacagcataaagttactatctcacagtttttgtcagttaggagtctgagcatggcctgcttagcgtttcacaaggccgtactcaaggtgccagccagatcttttatgcggcttggggtcttgctccaggctctcatggccgttgctggaattcactcctgcagctgtggagcccagggtgacttgcttcttcaagactagcagaagactctttttgctgcttctagtctcttagctcagccttccagtctcttagctcagccttccagtctcttagctcactgctctccaaggattcttgacacttgcactccaacccactctgggtcagaagctattcctccctgtgaaaggggtcacttgagtaggccaattcacgccatcctttctgattcactcaattgagctgattcagaactttaattacatctgcaaactcccctcacctttgccatttaatgtaacatcacaggagtgagaaccatcatatgtccagtccttcctaccctcaaagggagaagattatacaggggcatgggtcactggcatcattttaggattctgcctgtcacagggcgtcacttgcaggcttcgctggaggagatggctcctgtcacccaagggcagttctcctgagaaagttgtgggcataagcaatgcatgtagcggctagggcactgaggtcccgtgacctggttccagcctgctctccttccctgtccatagtccctccctgcccctcccccgtgatcttgccccacagacctttctcaggtggcggtggtgatggtgttgtaggggcaactggcttttttagagtgtcaggagctctccaaggtgcttgacatccatttctctaatcttcacaacaagcatgcaaggttgattctgtcatcccattttacatctgagaaaacaagctcagagagagtaagtaaagtggccaaggttgcagtttgcaagaaatggagcttggaccccctctgaccttgaactggctgacatcaaagttgtcgctttgcctggtcctgtcacctstcttcctcagatgtctagtgtttattagacctccatagtatcttcaccaactgagaaggtgccccatcagcctgaggaactcccagggtcacccctctmcaaggattcttgacacttgcacttctacccactctgggtcagaagctattcttccctcattggattgccaccattcttgtaagggcaccttctctgcaccacagttttttgctcacactcctcctatttttctcttctcagcttccctatgcctcatgatgccaggcataaggcacacagcaaccaagtgttggcagaaggcaaattatatggtttggctgtgtccccacccaaatctcatcttgaattttagctcttataattcccacatgctgtgggagggacctggtgggagataattgaatcatgggggtgattttccccatactgttcttatggtagtgaataagtctcatgagktctgatgcttttataaggggaaactcctttcacttggctctcattctctcttgtctgctgccatgtaagatgtgccttttgccttccaccatggttgtgaggcctccccagccatatggaactgtgagtccattaaacctcttttactttataaattacccagttttgggtatgtctttatcagcagcatgagaacagactaatacaccaattgaggttcctccagagaattaacaaaatgtccakgcactctttcgttgttcccccatacccacagacctgccatccctggccctgcctggatgccggtacctggccactgctgctatattccatgcttttggacaagagcatgttcagtattgyccaggagacccagggagctcaagacagagctgagatccagttcctacagccacagttaacaccccagcccccgacacacacacagacttttcaatgcaaaatcaaaccattcccaaatatccagctacatattgttttacctttgaagagaaaaaagcatcagtggggttatgtgattttcatagatgaacaatttttgcaaatatgttaattgaagagtaattggtgctttyttgaccctcctgagcactgatgcttgccaaagggttatacatttcagactaatgatgatatccattactatatgtgcaattgcttataaactaatatatagtcatattaaaatctctaatctgattgagaarttttcagaaacaaggtacactgattttctyaccacttatttcctgctctcatgacagaatttctggagttctttgaattcacmtggtttttggagctctgtcaagtcaatatttataactgaactagttcaaacagttcaagcattgtctcttcctttctggttgaagttctgtcttagaagactgttgtagtcagctgtgcttgtcataaagttttgtttaaaattattttagaattttcttctttggctttaatttaaatttttgtttgtttacttttttttttttttttccccggctcactgcaagctccacctcccaggttcacaccattctcctgcctcagcctcccaagcagctgggactacaggcgcccgccaccaggcctggctaatttttttgtattttttagtagagacagggtttcaccgtgttagccaggatggtctcgatcttctgacctcatgatccacctgcctcggcctcccaaagtgctgggattagaggtgtgagccaccgtgcccagccttgtttactttttaatttataggattgtaaatgaaactatacttggcctcagtttattctctgggaaataggttcttgctacaggtacagtttataataaggatttatttcataatagggagctttttatagattttaatatcatagttgccatttaaaaaattgtattaaaggccgggcgcagtggcttatatctgcaatcccagcattttgggaggccaaggcgggtagatcacctgagattaggagtttgagatcagcctggccaacatggtgaaaaccccgtctctactaaaaatacaaaaaattagctgggcgtggtggtgtgtgcctgaattcccagctactctggaggctggggcaggagaatcacttgaacctgggaggcagagattgcaatgagctgagattgcgccactgcactgcacagagtgaaactctgtcaaaaaaaaaatgcattaaaaatggtaatgatcaccatttattgcttgcctacagtatgtcagtcattatacaaggtatattttataattataaatattatttattatctgattacaaatatgttataccttgcactgtgtcctgtatgtctgttatgtttatttctgaattttccttcctttttcctctccatgctttgatctggatatttcctattgagagaatacactgaggcccagtgtgatttcattcacaatcctataaattaaaaagcaracaacttctgggtcactggtcgtcttttctgctgtgttcaatctccagtaaaatatgtcagcaccttaaccactgtcctctgcctggtttcttagtctcacagccccgtgctgctgtagaattggcagatgccttgaggacaattgtggcgtacagtaaacatacctcaatatacttatttctgtttgggattttcgcccctcaagtcctcattgygttattagccctgagctcttaagttttgtcttcacagagtcataagacttccagaaattcagcttagaaactcaagaacttagctttttagccactgcttcactttcagtttcatagcctctcatcccacactgcttacaaatctggaaacacctcaagggaaaagtgcccataaatgttggggttacctccacattctttccttctctttgggaccctatactctgaagtcctggctgtcttgatagttagttccctgataactttatatatttttaatttttttaaatgaacctggcatttcaaacataagttccatgataattttaaacaggggtgtgtgtgtgtrtrtgtgtgtgtgtgtgtctgtgtgtgtgtgtgtgtgtgtgtccagcttttcgagttgtccgtgggaggacggtttcagtaagttactctatcattactggaaatgcaaaatcctgttttcttttaaaagagtcttcaagctgatgaaaattttaaagtagcttataacattttaactgtgatcttatttattatgagtatagagataaaggaaaaggcmtcccacttctgaagatttctcgtttctaggagtgtctacaagattatcataggtgaaagtagggttggatgcagagaaatagtaagaaaggatggaggatggaggggataaaaagatcacatgtttggtgaatcctcttttaaaaacacttagaagatttyccctaaactaattatctggcttaatgctaactgcttatttgctgaccttctgctttatttacaaatttaaagtggggccaacccttcctgttttcctttaatttaccccggcagctgctggttagctaaggaagaaaaaaaacccttttttttttttttttttttttaatggagacaagcagcaattaggtaggcttctaggtcaggtggccagttaggggtgccagggttcccaggtccagytttcttcgggtcatagagtgagggtgggaatcaagtcactcagatwtttctcccgaattgaaatgcgtgtcttcctttggctgggcagatgaggtcccctcttctccatctctgctgctgggtcctggtgcaagcccttactctctttccactaaacccatgtggcagcctcctccttagcctgtttctccccagtcctgcacccatcagtccactgccacacggcagctacagggacctttctagaacacagcctcctgctgcctccatgttggcctccctgcccctgtcagagggatttttatttattttatttatttatttttgagacagagtcttgctctgtcacccaggctggagtgcagtagtgtgattgcagctcactgcacctccgcctcctgggttcaagcaattctcctgcctcagcctcctgagtagctgggattataggcgtgctccaccacgcccggctaatttttgtatttttagtagagatggggtttcaccacgttggccaggctggtctcaaacttctgacctcaggtcatccgccttcctcagcctcttaaggtgctgggattacagacgtgagccaccatgcccagccaagagggacttttctataacagcctctaggatcatgctacccccttcccagctctccctagcttttaagatcacataacctgcaaagtgccctgagatctggttctgcatgaatcttctctaccctattgctgcctatcaacttgacttcccacctttgggagtcagatgmagtccgctggacagcccatgscctctccatgtggctataccacccctgccttgcccctgctctctgcctgatgtcctactgtcttttgactgtgcccaggggcatttcctctgggaagcctgccagccctcagtctgaacctttgggtccccaaagcctcccctgtcctggtatgtgttgcactgcgttgtcatctcttgtctgtttcccctgagactcattattccctgaaggtctttcatctctgtttccctgtggcccagcacattgcctggcataaagtaagcacccaataaatttcagatggagcatatgttaagttccctataaaacctcagctgctgcaaattctgccaccagcctgggtgttctcctctgtggggactccttcagttttcagagacaggagactcccatagatttttagcaggaaaaggtagattcttgccttttagtctgtcagaatgacactttattagatgctttagaactgcagaagcttcaattttagaattttcagtttgtagcgttattttttttaagcagtaaaatttcagcgactatggtctgtgccagagccctaagcctctttctccatcctaaggagtttctctgcttaattgcagtgctgagctcagggaagctgcatatccaaaaatgaaaaggaaaccgctaaattgtgctgctacttttcctttgcagctcagataaaacaggcccagtgtgggaagaaggggctgtccttttgggggtgttggcctgtttctaattgctgcaccctcctctgcctccacccatgcctcagtgtggtttgggtcccttctgcccagagctactgggacatgtaataagaagctgcttttcagacttcttaattaaaataggttccggcagccattgccaggaagcagcattcgcacccctacatgtccaaatgcattactcatccaaaataagatatgccacgactcaggtttccctcctyagccaccatggcttgaatggctgcatttagaaacagcccttacttcaagcccctatttcttaattatttgtcacttattcscattcatccttgtgtgtgaaacatttttcccctcaccctatatgctgttatgtaaacaagtaattttttaggatgatgtcagaacctgatgtagttggggtggttttaaaatagtattttatggacagcaagaaaagtagttttgcttctggtttcacttgctagctttgggatggagggacatttatttgagcttctgcacctctgtgatcttgtctataaaacggggggcaatggctggtgctgtggctcacacttttaatcccagcactttgggaagatgaggcagaagaatcacttgaggccaggagttcaagaccaccttgggcaacatagtgagaccccatctctacaaaataaaaaataaataaaagaaataaaagaatgaaagttagctaggcatggtagtatccaactgtagtcccagctactcaggaggctgaggcaggaagattgcttgagcttaagagttcaaggctgcagtgagctatgattgtcccacttctgggaaacagagcaagactctgtctcaaaaaaaaagtggaaggtgggggtcaataatctgccagctcaggtattgtaaggattaagaaagacagtgtctgtgaagagcttggcccagtctctggaacacatttggtagccaggaaatagtaaatgacttctgtttccctacccccatcttcacctcctcccctagaataacaacatcataactgacttatttcatcattaaggatttaaatgcaaaaccttaagatagtcagccttagggaaacactgaagaatttatttttaaacacataaagattgcattcattcatccttctccacaccgcgggcagtcttcaaattctggttagcagagtcagcgggcagggaggatctggatcctggggttgtgtgctttgctcccagaggacatgagtatcaaaggtctgccccgatatctggagttcaagaggcgttttctggaaacaatttgtccaaaggctcccctatcactctcttggagaagtcctgtgttttatttatgctgaatgattgaatctattcccagccgaatgttttcctgaacaccagtaaaaatcatctgccagtcactcgggctcccaccccgggagtcatctgtcccctttgcctggtctcccatgcctcacagctcagcagccacaggcatggccatatctgcctctcttgcccttgccactccacttcatcatggccgtctcctctctggggctgctgcgggagatttccagtctgccctccagtgtctctgcatgcattctactcacctcctctccccccgcagccccgaggaactctgaagaaacacaagcttctgtggccccgtacacgtaggactaccaccgcttacttggaggcagtggcagtaaaaacggaaacaacaaacaaaacagaataaaatcctctttaactttgtttaacttggtgtcccatgcagtctatttaatttcagactcttatttaccccagtcctagggaactgaggttcataggaccaatctgggtgaatgctgctacagtttgtggatgggctgctccccatttgcttgttcaggtagctttgagcccaaacattggtcagcaagggcatccatatagtgacatgctgtatgtcatcaaaaagaaggtgttcctgacatagacaatttccagaatatatgctaagtgactaaagcaaagtgcagcatgagatgccaccatgtgctgcagatgcttggactggatggatacctaagtacccccaaactggcaggcacatctgcctctggggaagggggctgggtgtcggggaggggtgggagcaaattcctccccgtgtgcctcctggggcctttagaacctctacttctttgaacacagtgctactctgctccaaacgcccccaaacttcacacagagagtagtatgaagtcctcatctctgcacttgtggccctgaggttggcctcagcctgcccgcccagcttctcttctcattcttccctgctgccactctcctgtctccccagggactcggctgtttgagccactttcctttgacacgtctcagacttgccctgctccacttggaagtccttggagcagcccacacgcacccccgccgagctcactgtctcagaatgtgggaccacctaccagctttactcctgcgtctaactctaacttgtgagattgtgggggccagagtccccaggaggcagtgacgctgtgtgcagaaaagccaagagctccagggctgaacagatgtgactgaaaatctttaccagccatgtgccctggggaactgagcctttcatttcccctttccttttctgtatawtggaggataacaagccttcactcacagggcgtgggtgtgtttctcatctccttgcagcacctagcacagtacctggcatctcatatgttcagggcatgtttgctctcctcccttcctttcccatcgtgactgtcaatcgactgttcccttggggcttgagattcttggattccaaaggaaagaacacagggccaggagtcagaatttcatccttgcctccgctgatgtctaattctgggataacgctgggccactcagtctttggattccctgccctaacacaaaatccatatttatctcaatgcaaaagagatgtggtcatcgaaacactgaatgcaaagggttagcagagtgagcacagatgttctcccatttgccaactggtttctaagaatatttggaggatgagtaaagtaatgtcttccatatgctcaagagaagatgatttagcaccatgcaaggtagagaaggagagcccccacccatcaacagaatgaccttggacaagacactagctgccctaggcctcaattacctcatttaaaatatgaaagtcataaaaccctacctcacgagggtgattgtgaggattatatgaggcaattcatgtagaaggtctttgtaaactgtgaaatgctctacgactgtcagccaggattagtagttaatgcacgtatttgtttattgtttcagcrgagggtgcaggacgtcatcagcccgatcgtgtttgaagcagcctacagcctcagtgagcatgtgactggagaggaggagagggaactgccgcctctgacaccagttctccgctggaaaaagggacaaaagattgcccaaaagaatcaggtcagaaccttaaagctcatactcagcacccaaggtggcagctgcacasagcagaaataatggcccaaaagttgagagagccgtgggyctggctgctcaggagaccgcagccaggacacacctcctctctgggtctcccttttctgatctgcaaaatgataaaataaacagtcttaggggttacttgtgactactgtgggacttaaacactttcagacaattctcaggctgttagaagttacaatcccctcgagttcgtgaactggctggccacttggtccctgaacttgcctctgttcctagactgttttcagagcttagattggtggatagtaggtgcttaatgaatgttttattggtgggagaatgagtgaggtgaagaagcaagaatggtagcttgctgaattggcagttgagttacagaatgctcaacccaagagtccctggaaaccagagcactggggcaagtacaggtggtccacactcatcagattctgggatgtgcggctgtgtagagaagctttagtgcgatgggtgtatcactcgtatgargtaggagtgagcctgtgcctgattttgtgcagcagcgctggccagctctgaggcgtgcagcactgagtgcggtgcaggaatatgcaaggaatctgcaatcccaagtctgtttcaaatcttttcttgaaacccaagatcaccacagattcagaaccctgtggaagatcaggaaaaactgtgggctaacccagcctcctaggcagggttggggcaaagctgtggaaccacctttcacagtgcttcagaccactgtaagtgtaggggaaaactagcagattgtgacccatgccttgtagattagagttgtagactgaaccacagagaagggtttgggatttgagatatccatccaggtgttcacgtaagtgctgagatttttaccaaggcatcgcattatctcccaaagcctctttcccatcatcctaagtggggttcyctagaagcagagcctgagaaagggaattgggaacacatggtctaatgatgctgtgctcttagggaaaacctgtaaaggaaaggcatgggggctcaaaatggttgtggtctcagataaagtctggctgagggactctggaacaaaaattacaccaaagagttgtcctcaccttgaggcaagaggggcttcccttttgtgccccatatcattcagccattgactggctgtkggggggaagggaagtgtaaccctccttgaaaggagatcccctcagctgaggatggttctctagagaagaatgcagatgtgagccataagcagcctacacacacatcagccaggagatgggccacagttcacwgtgcccactacacatcaaaacacaccctctgggraatgctgccaagaggttttgatttaaaacacgaaccttctttcacaacacaagtgccccaggagagtggcctgtaagtcccactggccattgatacttggaacaggccctgggggagtgagggaggacacgtggtgtctaagcaggtgggcagagtagatgggctggccttactctgaggtgtggagaaggctagagaagagtagaagataaggtgaagaggcagggcaggaagctgatggcttctgccttgactgggaagtacagacctrggtcccctcctgacagggaagtggggagaagaggttggcctggggacacagtaaagcatggtattatggtaacttctacataattggtctctagttctagaattattctgctttctaaggtcaaatcttactggactgataaacttacccatacttgggttacggaagttacccagactcggggtcctgggaagaatttcagggtcctctgtgcttatttgtttctgaattgacccagtgaggtagtcatctaccctgtccagcatcttgctagcctggacatactttccacagtkaacctatctctcattcctgcaagtctgtcagtggcacagatgtggactttctttagtgaaaagcatcttggaacctttactgacatttttagatttaagcagcccaatcaaagccagagatggagggacagattagtattgaaatgatgttcttggtcacttctggttccagatggccaaccaagcacaaatgttgatgtctgtgcctyggtaccccattgcaatgattataaatgagtagatcggaacagggaggacaacactgtgaaagaaagggcatcagctaataataagagtccagtaattttctggtatgagtgaagtaaatggaagagtgttagtgggtgaacttgaactgtacatggaagagctggcttcctgcctacccagggaacagagaagctgcagccacagccaggccaacagttacagagggggccagagtaagaagtgggactgcaagtggtggtggtattgagggaggtcagtgaaatgtgaaggttggtatgaagaagggttagagttgacttttcaccattgtccccacccctacaggcttcaggcatgcagaatagcaagcagccaggcatcgccttctctaaagtgttaartaaactgtttaagatagtgtgggcgrcctcgttctcagagaaaagaaagccttacttctggcatttgaagtcaccaacgtaagagctagctttctctcccacaatccacccaaacactttcacagattttctactcagtccttttaccttagtttgaaatatgaatggacaaccaaggaaacccaagattgaggaatatttggtgcatgaaaggaaaggctaaaataaaccaggagaataactaacttaaaaggaaacaaatgatttagggaatataagagattattttaaaaaattttaaaaatgcaacaccttaatgtctatgcagtagacccaaggagatttaggaatatattccattcttttcattttctaatggatgggattctgttcctttttaaagggaggaatgaaaggcaagggaagtgttcttaaaaattaaaaatatatttgcagcaccaaaaactcagtggaagtattagaagacaatggtaaataatttcccaatggaagtgctaaaagacaagtagaaaagaaagctaaagaataaatttacggggtcctatatctccaagtaataagaatactagaaagtaagaataccagtaataagaaaagagaaagaagggggagaaaattatgtaataatagaatagcatgtttcagagttaaagagggagactattttttaaaattggtgtaaacaacaatttacaatcamaataaaccaaaattatcatagacacatcattttgaaatgtcagtgcttcaaagacaaagggaaaattctaaatgtttcgagggcaaagaatgcaggaatgttgatcatggaggataagtcagcttacaacagaatgagagtcagactgagtagtccattagactttttataagcaagattagaaactaaactatgatgaaataaaggcttcaatgttctgagggaaaatgattttgaaattagaattttgttttcagccacacaatcaaagtatgtggtaaaaataaagtcacttttcagataagcaagaacccagaaagtttacctccctagtaactcttccaaggaaattatcttgtacttcaacaaaacaaaaatgacaaccagaaggagcaagatgtgggatacaagaaactctggaactaactctcaaaagtctaatgacaagaaatcccaggatgataactgcagcaagtctaaaaagcagccaagtctattgagaagaggagatcaattaacttccagaagaatgaagctaagcaatagaatgatgagcaagtggcaaatattcagtatatagtgcagattgaatatgtttcttttatgggtaagaaaaaaataaaagcattcaagacctctcagaaaaatagaaataagataattacctgtacagattctccttgactcacgatggggttatgtcccaataaacccatcatgaattaaaaatattgtcagttgaaaatgtatttaatacacctaacctgctgaatatcattgcctagcctaccttaaatgtgttcagaacacttacattagcctacagttgggcaaaagtcatctaacacaaagcttattttacaataaagtgttgaatatctcatgtaatgtattgracactatactgaaaatgaaaaacaaaatggttktatgggtactcaccattaacacacacagctgaaagcacactggacctaaagaatatttgaactaaaattaactgctggattatggggctactagtgtaacagggtcatccatttctctctcttctgatgagtctcaagaatagctggtagaagccactgcggtattaacactcgttgatggcttagcaggcatggtgttctgtagaaagctatcagttgtttaccctcctaatcctatarctgactgggacctgcagctcactcccactgcccagcatcacaggaagtattgtaccacatattgctaccctgggaaaagcttttgaaataaaaaatttgaaatatggtttctactgaatgcatactaccttcacaccattgtgaagtcaaaaaatcgtaggttgaaccattataagttggagaccgtctctatgtcatggttaaaatataaaacaaattaaaatgtgataaaataaccagttataactatcagatgttttttgtaagcctcatggtaaccacaaggcaaaaacctatagtaatacaaaaataaaaataaaaaagcaaagaaccaaaccataccactagagaaaatcacttgaccacaaaggaagatagcaagaaaggaagaaaggaacaaaggatctacaaaacaactagaaaacaacaaaattgcagtagtaagtccttacttatcaataattatcttaaatgtaaatggattaaactctccaatcaaaagacatggagtggttaaatggatttaaaaaaaaaaaaacaaaaaacaagacctaactatatgctgcttataagagactcacttcacctgtaaggacacacataaaatgaaagcaaagggatgaaaaaaattctatgcaaatggaaaccaacacagagcaggagtagactttaagtcaaaaatagactttaartcaaaaactgtaaaaacagacgaagatcattatacaatgataaagggatcagttcagcaagaggacataacaattgtaaatatatatgcacccaacaccagagaaactaaatatataaagcaaatattaatagatcttatgagagagwtagattgcagtacattaatattagggaatttcagtaccccactttctgcaatggacagatcatccagacagaaaatcaataaggaaacatcagacttaaactacactctagaataaatacgtctaacagacatatacacaacagtccatccaacagcgacagaatacacattcttctcaactgcacatggaacactctccaggatggatcacatagtaggccacaaaataaatcttaataaatttagccttgaaatatcaagtatcttttctgaccacaatggtataaaacttgaaataattaacaggaggaacttcagaaaattcacaaatacgtggaaattaaataacatggtcctgaatgaccattgggttaatgaaataattcaaagggaaatttaagaatttcttaagacaaatgaaaatggaaacacagcatacaaaaacttaaaatgtggtaggattttgagtaagtagaagagtataaagaagaatgttgatcctagaaatattctatctgaagtagaagttgaatattcctggactttaactttgcaactgtagaggaggatgtataatcatgacacttgtcttggctcaactgtgagcaataatcatgaaccataataaaattagcactatttattggttttcaatatttataattaagccaaaatcagagctatggtgatagcataaaatgcaaatgtcattaaacttgattatataaaggtaaaagtagaataagataagttttcttaatatcttaatcttttaaattgatgagtcaagagattgcaaaacttgatgaaacaggaaatcactgttggcttaaaattgcagaggtcatcagtagagcaacacttcctaaagtgtgattcctgaaccagcagcatcaacctctcttgggattttgtgagaaatgaaaattgtttttattttattttattttattttatttttttcctaaatttcttatttccttctctttttttaaagttttattattattatactttaagttttagggtacatgtgcacaacgtgcaggtttgttacatatgtatacatgtgccatgttggtgtgctgcacccattaactagtcatttagcattaggtatatctcctaatgctatcccacccccctcccccaaccccacaaccgtccccggtgtgtgatgttccccttcctgtgtccatgtgttctcattgttcaattcccacctatgagtgagaacatgcrgtgtttggtttttttgtccttgcgatagtttgctgaraatgatggtttccagtttcatccatgtccctacaaaggacacgaagtcatcattttttatggctgcatagtattccatggtgtatatgtgccacattttcttaatccagtctatcgttgttggacatttaggttggttccaagtctttgctattgtgaatagtgctgctataaacatacatgtgcrtgtgtctttatagcagcatgatttataatcctttgggtatatacccagtaatgggatggctgggtcaaatggcatttctggttctagatccctgaggaatcgccatattgacttccacaatggttgaactagttgacagtcccaccaacagtgtaaaagtsttcctatttctccacatcctctccagcacctgttgtttcctgactttttaatgatcaccattctaactggtgtgagatggtatctcattgtggttttgatttgcatttctctgatggccactgatgatgagcatttcttcatgtgttttttggctgcataaatgtcttcttttgagaaatgtctgttcatatccctcacccactttttgatggggttgtttgtttttttcttgtaaatttgtttgagttcattgtagattctggatattagccctttgtcagatgagtaggttgcagaaattttctcccattctgtaggttgcctgttcactctgatggtagtttcttttgctgtgcakaagctctttagtttaattagatcccatttatcaattttggcttatgttgccattgcttttggtgatttagacatgaagtccttgcccatgcctatgtcctgaatggtattgcctaggttttcttctagggtttttatggttttaggtctaacatttaagtctttaatccatcttgaattaatttttgtataaggtgtaaggaagggatccagtttcagctttctacatatggctagccagttttcccagcaccatttattaaatagggaatcctttccccattgcttgtttttgtcaggtttgtcaaagatcagatagttgtagatatgcggcgttatttctgagggctctgttctgttccattggtctatatctctgttttggtaccagtaccatgctgttttggttactgtagccttgtagtataatttaaagtcaggtagcgtgacgcctccagctttgttcttttggcttaggattgacttggcgatgcgggctcttttttggttccatatgaacttgaaagtagttttttccaattctgtgaagaaagtcattggtagcttgatggggatggcattgaatctataaattaccttgggcagtatggccattttcacgatattgattcttcctacctacgagcatggaatgttcttccgtttgtttgtatcctcttttatttcattgagcagtggtttgtagttctccttgaggaggtccttcacatcccttgtaagttggattcctaggtattttattctctttgaagcaattgtgaatgggagttcactcatgatttggctctctgtttgtctgttattggtgtataagaatgcttgtgatttttgtacattgattttgtatcctgagagtttgctgaagttgcttatcagcttgaggagatatggggctgagacgaaggggttttctacatatacaatcatgtcatctgcaaagagggacaatttgagaaaattcttgggcccaccccagacccactgaatcagaagctgatggggtgggccccagcaaactatgtttttgtttttgtttttgtttttgtttttgtgttttgagacaaagaatcctctgtcacacaggctggagtgcagtgacaggaactcggcccactgtaacctccacctcccaggttcaagtgattctcctgcctcagcctcctgagtagctaggattacaggtgcacgccactatgcctggccaatttttgtatgtttagtagagacaagttttcactatgttggccaggctggtcttgaactcctgacctcaggtgatctgtccgccttgacctcccaaagtgttgggattacaggtgtgagccaccgtgcccggccagcaatccgtgttttaacaagatggctgggtgattctcatgcagctaaagtatgagaactgatacagtagaggagttaaactartaatttgcccatcaaaattatggaggtgaaggagtggggatcgttatgtgagataaattcctgtctatcatggaaggaatttagtaaaataatgtctagatctgataaatcaacgagtagtagtatcagcatgttttctagagatatggaaataatcatcaaaagaaacataaacggacgtgggtaataatgagtaataatggttgcccctggagaggaggactcagtatggcgaggtatgtggcagggggttattatttttctaaccatgtgattctttggttgaaattaaaataaaagaaaaaattgttcttagattgggaagattgtccaggagcctgagagaagttctgggagagcagttctttcttattgtccttttcctgattatggggaaaaaaaaaaaaaaaaaaaagataatcttccagatgttggctcagtttgaggaggaggaaagattctgagagtgaggcccactgcaggaagcagagctgatctttaacctgtgtatatatacacaacagtttgacacagagcatctcacctctttcataggaaggaataaattcatcagaactctctaggtcatgttgccagataacattagggttccactactttaaatgccttgatctcttcactgagcccatgttggtacccaggactatacagaagggtggatcaaatcatgatgaccttttagagttggggtctgcccccactgatggcctaattaaagtggaatcgctgcacagactgtgtgtgtaacatggagatagtgaccagtacatgttaagtacaggcttactgattaatctgaggctttttgctatgagttaggaatgtgcaggacaggcaggagaccaagccttccctctatagggtacatagtcctgggagaagacgggttccaggatagggctttggcactaggctctggtgagtgaatagtgggattgctgctaatgctgagattggattgggattctgggcgctctggggacggtggagcttgaatgctacaagcctccgtacatacagcctgatgggcacacattgcaccttcaaaatttaaggaaagcaaagacctgcatctgtctcatcagaaagggaggcatatttgatagcaggaaaaagacaacctttttttcattaaccagaggagtattttaaaagactataaagctggaagcaattcaattgtgtgtctactttatgtaagacctcgatgaaaaaataaatcattgctgccttcattggagtcacagacagtccaggaataatttacaaagtgagatttagattagtgtgtaagaatttcactgcagaggccacttctggctgaggagaagatgttctatggagaaarggagaattggccagagccttaaaggtggagtaggatttgggtcctcagggaatggaggggctgatggatgctaaaggtctctcacgtggctgaatatctagtgagggaaaggggagaggccatctggactggagattcagtcatgcagtctgaagccacttgttcactggctgaggagttggatgtgattctacggtggacagaccatggcatattttgcagtttggggagatcgtagatgtgcctcagggagattggtgtgcctgggtatggggaggccagttaagaaagagcttgttgcaggggcctttgcaggtgagtccctggggagtctgtgtgataccccccagagagttgactcctaattaattgctagttggtctcagctgctgaaacagagggtatggaactaaatgaaacaatcatgggaagtcctggctggtcygtgtgctgggaagggagcaatgctgtccttggactggtcacctgaaggtcctttatccctcctcctcagctgagcataccaatggtgatgacagaggccctgtcttcaatccctgtacacagaatagcgctctgaaaattataactcttctcasgcttcatcagcaggcccccaaagagacctggctacagcagggcttccaggtctttcactgcggtaggcagaatggccccccaaagatgtccatgccctaatttctggagcctgtgatttggatacgttacatggcaaaagggactttgcagttgtaattaaggtgatggacttccaaatggggagaggagcctggattttccaggtgggtccaatctagtcacacgagcccttaatagcagcaaacttcctccagctggaggtgggaggaatgaggcggaataggaggtcagagagacttgaagcatgcctttgctgatgttgaagatggagtatgtgatgtgacgagaatgtggacaaccttaaggggctgggagaggcttccaggtgactgtctgcaaggaaacggggcctcagtcctacaaccacacagaaccaggtgcttccaaaaacccgaacaaagctggaagtggattctcccccagggcctctagataatcgtccagaccagctgacaccttgatttcggcctgtagaacctggagcagacccagacaacccaccgacctctgacttacagaactgtgagataatagatttgtgttattttgagcagctgaactccggtaacttrttactgcagcaatagaaaataatagacacacaatacagcccacacctccagaaccccggggcttctttcctccctgggctctctggggaaggagcacaggctgtgcagtgagatcagggccctggcccagagcactcaccctttagagcctgtttcctcacctgtcactgggggtgccatcggctgctctgcctgcctctgggtggtggtgggattacatgagggaaatgtgagaagcccggaaatgatgaggcagcactggatcctgctgttcccttcctgggaagccggcttcctggtgttgtgaggagaggatgaggccgtcatgggagcaggtctgacctgggctctgaggaagcaggtgctctgctgcctttccacatcctttcctctgaggggggtcccgtctctgcaggcccgtgggtgggctccccggtgggacgcaatggcaccatcttaggcaggagtccccaactcctggatcagtaccagtccggccacacagcatgaggtgggcagcgggccagcgagtgttaccgcctgagcgcccctcctgtcagatgagcagaggcattagattctcacaggaacatgaaccctacacatgtgagggatctagattgtgccgaaaccatcccgccccctccaccgyccgttcatggaaaaattatctttcacaaaactggtccctggtgccataaaggttggagaacactggtctaagggttctggcaggctctcagatgaacctctctggatctttagggtgtctggccctcacgtgtcaggcccaaagatgcctgttagtctgtcgcagagggagaagatctggggaggacccatataaccagaactcgggagccagccgcaccaccatgagcccagatagcatgagtcccttctcttttctccatctctgctgccattccctaggccaggccaccatcatttgtcacctagaccaggtcacatccctgcataacctcctcccgctgaggagctcccttccccctcagaagaaaatccggacacatgctaaggcccacgagagcctgtacagtggggctcctgcctcgccagcgccacccgcatactgcattcccaccaccctcaaacttaccaggcctctgcctgcctcaggccctttgcatatgctgatacctcatctagaaagcactttgccatgcttttcccgtggccagctcttcattttttaggtctcagcctaaatgttgcctcctcaaagaaccattctcccactaccctgtatttcctgactcagctgcctttctttgttttgacacagggtctcattctgtcacttaggctggagtgcagtggtgtgatcatggctcactgcagcctcgactttccaggctcaagtgatcctcccacctcagcctcccaagtagctgggaccactggtgtgtgccaccacgcctggctatttaaaaaaaaaaatttttttttctggacacagggtttccccatgttgcccaggctggtcttgaactcctaggctcaaggaatcctcctgcctcagcctccctaagtgctgggattacaggcatgrrccaccgtgcrtggccttagctgcctatttgattccttcgtgacatctaacagaacgtgttatttcgtctacttgttattgtatttacctctctagaatggaagcccagtgagggaagggatctattttatcttatttgctattgatccgcaacacctggcagagaacctggcctatagtggatgcttagtaaatagtaaatagttgaaagagcccttctggaagaacacaaggctagttcctttggcaaaaattgggcatcatatcagagcttcttcactagcagattcagcagagctataaaattaaaagaaatgtgttctgtaatccctctgggaattccccacgggcaagagagcatgatgtgtgatttgcagtgacatatctataccacggtatgtttgtagtgactacttttcaaaagacaagatggaggatatacagctggtgaaagaaaaggtgtcggctttgttgagaagtcttactttgttgtctttcaagtgaaaagtgagctattttagtctaatggtaatttttaactatgttgaagccatacactttgggtctccattgtgctggaaatcgtcactacagctcctcccaccccacacccctcaatgcatgcatataggaatatagctcatgctatggaaatccactgtttgcacagcctggacattaggtaatagtttcccggctgaggtgcccagctggcttaacatgccattatttacagctctaaggtttattttcattattatatttaaacgtctctgcagaaggaatggaaggctaagagggtgggagagtagaagaggagagggagaagagtcactccagacgtcagaaccagacaggctcctgagaccgtgcaaactgggggatttcagattgcacacttggagtcagggcagcagtttggctcagcaggaggggaaaggggtgttagaggaaaaggctcctgccctccaatgttgtttgacccagatcaaccctactcttatgggtatcagcttctgggtaaatactcttttcaaagagggcaccatggcagaacacatgtgaaaaccatctagtttgaagtatgtgtgagaaaaacaactaattcacccttctcactgaccagtggagaagtctggccttatctgtctgtctcaggcttcttctccaaggttaaccccaacgggaaaggagaggggactcatcaaaggttagaccatgtcctgaagtgacctgttgaatttgcaaaacttctttttcagtgttatgttttatttttgcaatttttgtggggggaaaatgcattctaggcttctgaaaccctttttagaagaaaatcatggtttcctcaaactcttcaagcttattgagttttcttctgtattatcctgtcctattgaaaaccttgtgcaaaagtatgtgtggggtgagaggtgtttaaacacacccggtggacagtgtctggctggggaggaaacgttagcctctcttttcttatcttatgagataatttaggaaatcaagtacaaggcccttgctgtgtgcacttatacctggagccttatttaggggatgttcttgcagatagatggggagaagtcttgctgggatcctctctggttttaaggcattttttttctcactcccagttgcctgcccatgtctggtttagcagcttttagaaacgtggctggcatccttttttcttttctctgacagcaccagcccctttatttgaacttcctagctgttttctgcctcttctgactaattaacagcaactaaaaaagaaaaatgaaacatagaacacaaaaaattccagggtgaaaaaggagaatttctagtcctggggtgcaaaagtccctagaagagagttttgagctgaaatgaaaagttgtgattatagagagacatgaaatgtgtcccataaaaggccacctagtcccaggcagatccaggaagagcactgggctgggagtcccatggggccagggcctcaccaagcagtcagccctgctcagttatcacaggggttgaactggattgcctaaatgatgcctttagatggatggaactggagtccattatcttaagtgaaacaactcagacacagaaagacaaataccacatgttctcgtttataagtgggagctaaataatgtgtccacatagaagcagattgtgggatgatggacaatggaggggtggggaagttggagctgggtggatgatgggaggttgcttgttgggtgcaatgtgcattggcccagtgatggatgcaccaaaggccctgactttgccatgacagaatatatcaatgtggcaaaactgcacttgtatcccatgaatatataccatgtttttaaaaatgttgcctttgggcagaggggataattctgcaaactgcagagccrtggagtaaaaaaaacacccaagatagcagaacttgtcatttctagtttttccacaggaccataaagcaaaattggtgccgggtttgtatttaaagggaaaccaagagggtttttttatccttccatggtttcaaaatctggaaggacaatttgtacagaccctgagatagaaggattcctcagctttaatttcatgawcgatttgcctttcattgattcttgaggatatgaatgttttagaaagcaacagtgtatgccttgattttaagaggcaatgagccttttccttccttcgtttaggcatggggctgaatggagctgaaattcctgcactcttataacgtgccacatgaagggcagttttggattctgggaaaacagcccattgaaacagaattgggagggagaaacctcttacactcaggtcatggtatttatatgaatacaaaaaaaaatttaaatactgtgctaggtgctgggggttataaacatgaattacatgattagggcctctggaaacttgtgtggggctatagaaggaacaccagttcagaaatgtcactcctgtcatccagacaggatgcttcaccataggggcagagaccttctgctaagtcataccgcatatcaagaaatatattgctaggccaggcacggtggctcacgcgtgtaatcccagcagtttgggaggctgagacgggcagatcacttgagatcaggaattagagaccagcctggcaacayggggaaaccccatctctactaaaaacacaaaaattagcggggcatggtggtacgtgcctgtaatcctagctactcaggaggctgaggcacgagacttgaacccaggaggtagaggttgcagttagccaagatcgtgccactgcactccagcttgggcgacagaacaagactcatctcaaaaaaaaaatgcattgatcaaatcagcttaaaaatagccttcttgtttgctcttcttggtgtgggattattcagtccaattcttctactttttttaggcctcagcatgggatttggttgtcatatcaaccctataaacagtgttgaatccatgtcaataattgtattttttaaaagcaaatatcaccaagtccaagaaactgatcctcctctgaacatgatagctggactaggctaagaatcctatttcctgttagatcagaagtgaagattttctggtacagatttgggtgggagaaatgagctacccttcccaaggccttagcacctagatgacatcctctctgaagtcaccctcagccaggagcggacactgagctgctatttctgaatcacatgtccccaaagctgccctggccttggtgaccatggcactgtaagagaagcacagccagccccagcgtccttactctgactcagaggaaaatgcaacttgagctggattcattgaawtcttttttttcctggcctgaaggaaatgaagaaacatagccaaatattctaaaacaggattcaacaaacagcccataggccaaatccaccactgcctgtttttgtaaataaagttttattggaacacatctatgcccattcccttatgtattatctatggctgcttttgctctacaacagcagagttgagtagtgtgactgagaccrtatagcctacaagcccaaaacatatactgtctcacccttttcagaaaaagttgccagccttgttctaaaagaagtagagtaaggatttagtgagaagctggagaaaatattttcaaagacaactgtattctccagggaaacctgagatgaagaccaaggtgaggaagragccagcagagaaatygagtccatgaggctgaggaggccactggatgtccagtcttcagctctctgaagcctgagacaggaaacagttgtctcccgagagaaaggtttgaacctcctttaactagggaggaataagagatgatggcttcttagatctgtttacatttgctggaaaaacttcttccagggaaataactagacagggctttgrccaactagcaggtgaagtctggagggaggtggaagagactgcttccaagctgggttccgatttgtctgattgaagcagccaagcttgtgtttgccagaggacttaggaggatgtggataaaatcaggctgaggcctttttttaaaggcccaagctggagctattgggattgtyccctcagaggaaaatcaggagtttgggccattggcttcatggagaacctgtactttgtaccaaggagaagtcatttctacttggtttttgaaactgcattgtcatctagtattccaaggctttagtctgtccaccctcctgctccagagagatgcctttcagttccttaggaaacaaattggccatttgcccaaagagactaatccaggactagaacacaggcactgagtttcaacctcaggctccccagtgygtgactcaggtctcttgattccatggtgtattgtttttttacctattaaacaattgcattcctagcctatggaaggtcttacctaagccaagactttggcagggattggattgtgcagcccatttttgttaayagcattgcccaagttagggaaggccattaggttggctgagtattctggtattctattgctgcataacaaactctgaaatttagtagcttaaaataacatttattttgttcatgaatttgatttcattgttttttaatgtatgtaaggtatataaaatgatgttttgatgtacatttacatagtgaaatggctactatggtcaagcaaatgaacatatccattgcctaacatagkttttttttttttttgatagtaagagcacttggaatctactytattgtcaaatttccagtatataatacaatattgtcaacatagtcatcacgctatacattcaatctctaaattttttcatgctacctaaccaaaactttgtacctttgaccaacatctccccattccctactccctaccccctccccgacccctggtaactatcagagtttcactttctggttctgtgtatttaacttgtttagattccgcaataagtgagatcatacaatatttttctttctttttgtgacttgtttcacttagcataatgtcctccagtttcatccatgttatcaaaaatggcaggatctcctttttaaaggctgaataatattccattgtatgtttatatatgtgtatatatatatatgtgtgtgtgtgtagtatatatacatatatacacaccacaatttctttatccattcacctgttgacaaacacttaggttgattccatgtcttagctgttgtgaataatgctgcaatgaacatggaaatgcaaatatttctatgaggtactgatttcattctctttgagtatatacccagaagaggaattgcagggtcatatagtagttctatttttattttttttgaggaacctccatacttttttcataatggctgtaccaatttacattcctaccaacaatgtataagggttcccttttctccatgccctcactaacactttttatctcttgtcgtttttatagtagccatcctaactgttgtgaggtgatatttcattgtgacttcgatttgaatttccctgatgattagtgatgtggatatttcagcagaaaccttgcaggtcagaagagagtggggtgatatattcaaagtattgatggaaacagtgcctcatacctgtaatcacaacactttgggaggctgaagcaggaagatcacttgagcctaggagtttgagactagcctgggcaacataatgagaccttgtctttacaaaaaataaacagaaaattatccaggcatggtggcatgtggctgtagttccagctacttgggaggctgaggtaggaggatcgcttgagcccaggaggtagaggctgcagtgagccaagatgatgccactgcactgcagcctgggtgacagagtgagaccctgtctctaataaattaataaaataaaatttaaaaaccctactagccaacaatactatacccagtaaacctgtgcttctcaagttgaaatgaaaggacactaaatagcacaagagagcataataaagaaggaaactcgttggtaaaggtaagtatatggacaaaatcagaacactatattactataaaggtgatgagtaaatagcttttatgtctatgaagaaagttaaaagacaaaagtattttaaaaaccattataagtattaactaaattatgttaatgggtacataatataaatagatataaactgaggcatcaatagcatgtaacttggggggagcagagggaaaatcagagtttttatgcaagtaaagttacattgtgracttataacagactgttacaaattatttcgtgtaagctcctggtaaccaccaagraaatacctatggaagttatatatatwaaaaaagaaaggaatcaaaacctatcgatacaaaaaaaaaaaagaaacaaaacaaaagaaaaccgcaagggagaaaaagagggacaaaagaacaagacacatagaaaatagtcaccaaaatggcaatagtaaatctgtctctatatttactttaaatgtaaaaagactaamcttcccaataaaaagatacagcatgactgaatagattattaaaaaaaacaacaacaaccaggatcaaactgtatgctgtctacaagaagctcacttttagattcaaggacacacagagagatggaaaaaggtagtccatgcaaataccaaccaaaagagagcaggagtggttaatacttatatcaacaaaatagactttaattcaaaaactgtctctagagacaaaggtcatttcttaatgacaaagggtcaattcaacaggaagacataacaattataaatgcacccagcatcagagcacctaagtatatacaacactgacagatctgcaaggagaaattgatagcactataataataggagatttcagtaccccactctcaataatggataggacatctagacagaaaatcagtaaagaagcagtagacttgaacaactggacctgtgtaacaaatggacctagctggcatatacagaactgttcagccaacagtggaagaacattcatttttctcaagtagccatggaacattctccaggatagatcacatattaggtcacaaaacaaatcttagcaaatttcagatcgaaatcataccaagtatcttttccaaccacaatggaatgaaactagaaatcagtaacagcaagaaaatgggaaaattgtttgtgaattcatttgtgaatttgcaatttggcagagcttgatcaacacagctctctgttccatataatgtctatcagctggggcaactcaatgggattggaggacatctctgaggttttcactgtcatggtgactcacgtagcctgcaagttgatgtggcagtcagtgtctcctgtgagcctctgcatggacagcttgtgtttcttgcagagtggctaaattctaagaacaaatgccccaagaaaattaggaggaagctctattgctttttatgacctagtctcagaagtcacatagtgtcacttccactgtagccaaaagtccacccagattccaggtaagggagcattagaccccacctctctatgggagtagtttcaaagtcacattgtaaggagtgccatcatcgagatattgttgcattgatttttggaaaataatttacctgcacagaggtaaattcacatcaattctttgtctccttatttcaccatccattaatgtttgtttgtttgtttgttttgagatggagttttgttcttattgcccaggctggagtgcaatggttggtctcggctcactgcaccctctctctcctgggttcaagcaattctcctgcctcagcctcccaagtagctgggattacaggcacccaccaccacacccggctaatttttgcatttttagtagagacagggtttcaccaagttggccaggctggtctcaaactcctgacttcaggtgatcacccgcctcagcctcccaaagtgctgggattacaggtgtgagccaccatgcctggccccaccatccacacccagccccaccatccattaattaagcttcatggtgttcactcagtcacactgttgtcgctctcatttgccaatgttaaatagtgatgcacagtgcctaagacaaaatygctatcactgcaagctcctacccctggctaaatgctaatctggatttatgggacagtgacgagtgctattattttcattttataaatgaggaaactgagtcctggagggaagaaaagtcaattttcttaatgtaatacaattaaaataggattacactttgaatttccttatttcttaactagtattttatctttccatgattgtgcttaattttatcttatcagtacaagcactcatataacctgtagggatatttgtgtacatgtgcatgtgtgcatatacacacacgcactgtgtgtgtgtatatgtcaaactcagtgcttgcctttgttggatggaaattcagcagcactggaggactagacagctagaaaagccagtttcagggacaggaaatagtagagttcaaggaaaagttaggacaaggaaaatgagtctttacaaagcaaccaattcctcgtgagaagtctttgcatctcacatggctaagagacagtactttggttaggggcctggagctttggttttgatgaacagtgtgctggtattggctctaagctggggcatccaccatttggctccccatttgagtggtcactctgtctctcagagcaatgtgtggtctttcggtgttgataaagcagcaactacatgccaggccctaagggcaggcacagaggcaagcaagaccagtacagtgccccctgcaatcctcttgggacatcattttagcaggggagactaccattgaacatgtaatgataaaattgattagttatgattgagatgagcagtaggaggraaaagtgtgtggaactgtgagagctcacgatgggcctgaacttgcccagggactcagagaagtggtctggatttgcttgttgaagggtgagaggacatgtactaggtgaaccagctggaggaatctggggatccacttgtggggaggccctgggtgggaagttgtaaggacaaccagagtgatagctggcatgagaaagccagggtgacagaggtgaggagggcacatgccagatctggcagcctgcatgtcaccagatggatttaggtcacatcctkttcttccgttctcacctctttcacctccatctccacctccacctctaccccttcacctctccatgcctcacaaagttggactgtcttgcctgtgagacaggaaaggcatgtgtgatgaggggactgtacactaggggccagtccaggttttgtgagacctgaggcttatatagtagagggtggggtcttgaaggaaaaaaaaaaaaggtgaaattatgaagacaaagtttgtgcaaggcttccctaggggccatgtcagctggggacctctaagctgaagtttcactagtgtggtggggaagctccctttggcaccttccctctgtcctcaaagctcataaagcccacctttcatcttgcctgagacgttcatgccatccttacacccacttcctcctgttttcttcttagttaagatggcaaagaaagagcaaatatattgaaatctcctggaaatttggctctctccttgaccccagtagtgtccaaaagaacacaggaatttcctctttttkcccaagacttccatgatattttccctgataatcaaggaagggagtgttggctgggacacttttttcttttggaaatgtggcaggggaatatgaatttycataggcgaaattactctgtctggtcgagtctagactgttcgttggccagcacgtttgctggcgcccacactgacactctgaggtgctgcctggacttattctctgggcagggaagaaataacctggaactacattttggggaaaaaactcacgaacatgagcagtgacaaggaagaagtttaataatgagtaaattacaactaaaagttgtcaacaggctcttctctccaaattccactgaaatgagcaaagccatctaacagtagtgaagagtctctgtcatctggaacttggggaagctactgtccatagatctgaaatgtcagagaggttgagacagattgaggggaagactaacaagccctccatggaccgtagaagaaagccctaacccctctccaaatgctgctgctgatctcctggcaagcctccacagatargcccaggcccaggcacagccagcaagctctctggaaatatttgggttttgacatgccaagacttggccccagtaagggctgggtggggctttggctgttgaggcccagtcttggttagagaaaaggcactgtgtccctgttaactgctggctgccccaccaacaaactggaaagaatctcccccagtctgttgtgattccctcagcctgatggcctaattgcctttgccttttcctgttaatactgacaattcaatacagtcccattgctcaggcagaacctatttcatatataaatttcctgcatccccaaggcagagcaaatagggggaaatgaccaaactrtaatytgagagttctttactcaactggattatcattcatctaagagcatctgaaagacagtctcacacaagcaaagactgaaaggacatccaccaccacgtacctctcttgaaaaaactgcttggagaagcacttcagtagactagggaatgaatcaaataagtaatgcactgacaaaatcaaaaccacagttgacttaggcttccttggagcttggaagaaccccttcccacgctggagagctggctttttggaggtgggagtagaagccctgaggggctcaggggaggaattcccactgatttgcaagaaaggaattggccactgtgtactcgtttgccactcaatcctgccctaaccttcctctcctrtctttctcacagactgtttttgaaaggaattgccgttcagaggactgtgccgcagacctgcagcttcrgggtaaactgctgctctccaggtatgtcggtgtttccttcagagcattgttctcaggctcctttttcttgaccccrggtcccaaacctgaatgtgcagatttccccactgaagaggataaacagagttgatgggttacagtaatattctgtggttttaaaaaaatgtatgttacaaaataattataacaaaagctttgttgggaagattgtttaggtttttttgtgtgttgattgcaattccacatatctcacaatgtagcttgtatttctaatttctatgagtatttgaggggtggctattttatgcttgctgattgtattaagttgaatcatatgaaattgccaatatttgaacttttggacaatttcatatgtatgattcatcctattattaaataaaggtttatgccctcctgcctccacacacacacacacacacacacacacacacacacacacacactagtgtatgttttwacaagtwacatttctgtggcaggagagggctgaaggagaggggcaggytgccctgatccaagtgagcagatagtctccttattgtttcagggtttcctcccgcactrcatgaatcccccaaggctaaaggtgaaccgtacagcggccttctgtttcctctttgccaaccttttattttagacttcatttaggatgaaggtgctggtcctgatcatttagcctcatttcacagaatggcttccttttgaaacagttccttctgaaagactgttttagccttggggccagaaacccctctattagttttattaccatttctgaaaaacagtcactagttttggtagttatttttcaaaatgcatagtgtatcccttacttaaaactatgagagttaagtttggatgaaatgacatgaatatactattatgaaccagtgcctacactaggacattttttttattgttatactttaagttccaggatacatgtgcygaacgtgcaggtttgttacataggtatacacatgccatggtggtttgctgcacccatcaacctgtcatctacattaggtatttctcctaatgctatccctcccctaaccccccacccctgacaggccccggtgtgtgatattcccctccctgtgtccctgtgttgtcattgttcaactcccacttatgactaagaacatgcagcatttggttttctgttcttgtgttaatttgctgagaataatggtttacaccttcatccatgtccctgcaaaggacatgaactcatccttttttatggctgcatagtgttctatggtgtatctgtgccacattttctttatccagtctatcattgatgggcatttgggttggttctaagtctttgctattgtaaagagtgctgcaataaacatatgtgtgcatgtgtctttatagtagaatgattcataatcctttgggtatgtatacccagtaatgggatggctgggtcaaatgrtatttctggttctaaatccttgaggaattgccacactgttttccacaatagttgaactaatttacactcccaccaacagtgtaaaagcattcytatttctccacatcctctccagcacctgttgttttcttgactttttaatgattgccattctaactggcgtgacatggtatctcattgtggttttgatttgcatttctgtaatgaccaatgatgatgagcattttttcttatatttgttggccgcataaatgtcttcttttgagaagtgtctgttcatatctttygcctactttttgatggggttgttttttttcttgtaaatttgttttagttctttgtagattctggatattagccctttgtcagatggatagattgcaaaaattttctcccattctgtaggttgcctgttcactctgatgatagtttcttttgctgtgcagaagctctttagtttagttagatcccatttatcaattctggcttttgttgccattgcttttggtgttttagtcatgaagtctttgcccatgcctatrtcctgaatggtattgcctaggttttcttctagagtttttatggttttaggtcttacgtttaactctttaatccatcttgagttaatttttgtataaagtgtaaggaaagggtccagtttcagttttctgcatatggctaaccagttttcccaacaccatttattaagtagggaatcctttccccattgcttgtttttgtcaggtttgtcaaagatcagatgrttgtagatgtgtggtgttatttctaggcctctgttctgttccattggtctatatctctgttttggtaccagtaccatgctgttttggttactgtggccttgtagtatagtttgaagtcaggtagcatgatgcctccagctttgttcttttggcttaggattgccttggctatagggattcttttttggttccatatgaaatttaaagtagttttttctaattccatgaagaaagtcagttatagcttgatggggattgcattgactctataaattactttgagcagtatggccattttcacgatattgattctttgtttccatgagcacagactgttttttcatttgtttgtgtcctcccttatttccttgagcagtggtttgtagttctcttgaagaggtccttcacatctcttgtaagttggattcctaggtattttattctgtttgtagcaattgtgaatgggagttcactcatgatttggctctctgtttgtctrttwttggtgtacaggaatgcttgtgatttttgcacattgattttgtatcctgagactgctgaagttgcttatcagcttaaggagattttgggctgagactatggggttttctaaatatacaatcatgttgtctgcaaacagagacaatttgacttcctcttttcctatttgaataccctttttttccttctcttgcctgattgccctggccagaacttccaatactatgttgaataggagtgatgagcgagggcatccttgtcttgtgccagttttcagagggaatgcttccagcttttgcccattcagtatgatattggctgtgggtttgtcataaacagctcttatttttttgagatatgttccatcaatacctggtttattgagagtttttagcatgaaggggtgttgaattttgttgaagcccttttctgcatctattgagataatcatgtgtttttttttcattggttctgtttatgtgatggattatgtttattgatttgcatatgttgaaccagccttgcatcccagggatgaagccgacttgattgtggtggataaactttttgatgtgcggctggattcagtttgccagtattttattgaggattttagcattgatgttcatcagggatattgacatgaaattttcctttttcgttgtgtctctgccaggttttggtatcagatgatgctggcctcataaaatgagttagggaggagtccctcttgttctattgaatggaatagtttcagaaggaatgataccagatcctctttgtacctctggtagaattcagttgtgaatccgcctggtcctgggctttttttggttggtaggctattaattactacctcaattttagaactcgtttttggtctactcagggattcgacttcttcctggtttagttttgggagggtgtatgtgtccaggaatttatccatttcttctagattttctagtttatttgcatagaagtgtttatagtattctctgatggtagtttgtatttctgtaggattggtggtaatatcccctttatcattttttgttgtttctgtttgattctctgttttcttctttattagtgtggctagtggtctcttttgttgatcttttcaaaaaaaaaaaaaccagctcctggatttgtttattttttttttgaagggtttttcatgtctctatctccttcagttctgttctgatcttaattatytcttgtcttctgctagcttttgaatttgtttgctcttacttctctagttcttttaattatgaagttagggtgtcaattttagatctttcctgctttctcctgtgggcatttagtgctataaattttcctctaaacactgctttaggtgtgtcccagcaattctggtatgttgtgtctttgttctcattggtttcaaagaacttatttatttctgccttaatttcattatttacccagtagtcattcaggaggccattgttcagtttccatgtagttgtgcagttttgagtgagtttcttaatcttgagttctaatttgatttcactgtggtctgagagactgttatgatttctgttcttttgcatttgctgaggagtgttttacttccaattacatggtcaattttagaataagtgtgatgaggtactgagaagaatgtatattctgctgatttggggtggaaagttctgtagatgtctrttaggtctgcttggtccagaactgagttcaagttctgaatatccttgttarttttctgtctcatgatctaatatttgacagtggagtgttaaagtctcccactattattgtgtgggagtctaagtctctttgtaggtctctaagaacttgctttatgaatctgtgtgctcctgtattgggtgcatatatattgatgatagttagctcttcttgttgcatgatcccttcaccattatgtaatgccattctttatgtttttttgatctttgttgatttaaagtctgttttatcagagactaggattgcaacccctactctcttttgctttccatttgcttggtaaatattctaccatccctttattttgagcctataygtgtctttgcacatgaaatgggtctcctgaatacagcacactgatgggtcttgactcttcatccaatttgccagtctgtgtcttttaattgggtcatttagcccatttacatttaaggttaatattgttatgtgtgaatttgaccctttcattatgatgctagccaattattttgcccattaattgatgcagcttcttcatagtgttgatggtctttacaatttggcgtgtttttgcagtggctggtactggtttttcctttccatgtttagtgcttccttcgggagctcttgtaaggcaggcctggtggtgacaaaatctcagagcatttgcttctctgtaaaaaagtttcttcttcgcttatgaagcttagtttggctggatatgaaattctggtttgaaaattcttaaagaatgttgaatattggcccccactctctgctggcttgtagggtttctgcggaaagattcactgttagtctgatgggcttccctttgtgggtaacccaacctttctctctggctgcccttaacattttttccttcatttcaaccttggtgaatctgatgattatgtgtcttgaggttggtcttcctgaggagtatctctgtagtgttctctgtatttcctgaatttgaatgttagcctgtctttctaggttggggaagttctcctggataatatcctgaagagtgttttccaacttggttccattctcctcatcactttcagatacaccaatcaaatgtaggtttggtcttttcacttagtcccattatttcttggaggctttgttcatttcttttcattcttttttctctaatcttgtcctcatgctttatttcattaagttgattttcagtctctgatatcctttcttctgcttgatcgatttggctgttgatacttgtgtatgcttcatgaagttctcgtgctgtgtttgtcagctccattgggtcatttatgttcttctctaaactggttattttagtttgcaatttctgtagcctgttttcaaggttcttagcatccttgaattgggttagaacatgctcctttagctcagaggagtttgttattacccacyttctgaagcttacttctgtcaattcatcagactcattctccatccagttttgttcccttgctggtgaggagttgtgatcctttggaggagaagaggcattctgatttttggaattttcaacctttttgtgctagtttttcctcatcttcatggatttatctacctttggtctttatgttggtgactttcagatggggtttctgtatggacgtacactagtacattttaacttatgatggcacatgatctttcattcatcaaaggaaagtaatactaagattccttttcttcagtttgagtttactggaggaagatgatgtaacacacacacacacacacacacacgcacacacacacacacaaatagtcctccaaaccacttaaatattaattagcattacttttacttagggcaatagtggtagattaaaatagcacacgttttgccaagcttacaaaattacttaaaactcatggcatggatattagaattgtttcacattagtacgaaggacctcctgggattattagaggaactgactttaaagaagtttcataaatttgcagctcattaattttaattttaaataggccttccacaaagtgttttagggaaaaaataacaagaaacaaaaatatatggatttgttttgtcttgaggcagactggaaatgctggaaatttattttgsatcgtagaaaaacttcatgtggtgggaaaatgttcacttgctccaaggtcaggtattaagttagcaaagtcctaatgcttttgctacccattagtggatgatcaaatccatctctattgaattgtgcttttcttatattaagatgtaaaattcaaggctcagtatagcacctggtggctaaagctgcctccactgccccagtctggcctttcaagtgtggtcagagctagttatcctctgtgggcccagtaatcaataatgcttgaacaactagtgtggtggccaggacccagtccccccatatgtatcagctaccaattgccacaaaaaaggctgaataaaaaagtcaccccaaaactcgatgatatgaacagcaatcactgattcccatggattttcaggtcagctggcccaggctggactcagctggaccttggctgatttgtccatgcatctgggttcagcagagggtaggttctaggcttgggtgacaccattcagctctactccctgtgtctttcattttttctttggaaccagtggacaagcctgggcatattctcacagcataacagaggtacaagaaggcatgcagaaatgtgcaatgactcttaaggcctgggctcagaactggtgcacttttcctccagccttattctattggccacagcaagtcacatggccaaacccaaagtcaagggacaggaagttagtgagaggaattacaaagccacacagcaaagggcctgagtataaggaggaggtgaagacttgggacccataatgcaattgactatactatataaacagcaaggtagccctgtctcttatcctgatgccttgttgttatcagggctatttcagtctttattgcaatgccgtctctctggaattcagacatgagatctggagactgggtgagaagattttctgaacctcagaaacaatgcctttggaccgaagctctcagcctcttaggttgggttatttctcagaggacccctggcctctcaaaatagccttttggccgaatcctccattaaagaaaccttcgttgtacttttgggcccatagctgttctcacaggaaccatcagagaaatgttcattgatacttagataacaaacctgtggttcagttatatgggatttatccagacctttggatgttcactcttcagagccagggacaatgtgagggaagatacaatcagttaagtgctagtggaaaccagggtctgaatttggttggcaaaggcatagtggctccaagcagaggtaaactgctttggttatcattgagctctcttgattcattcttstctgggatggaatgtgccctcctttcttgttcaagccaggcaagtgctaggcactgggctgcagaagtgagcagtatgtgagccctgctctcctgctgtgagcagagcaagaggctgggagatagtggtaccacacagtgagtgctaggtgggttactccagggctctggagcagcttccaagaggtggtgttgagaggaatgaggactcacgcattccdagcagagggaaaatgtgagcagaagtatggagaacaggactcccatgaagatctgcaggtgtctggaatgaaggaggcagtcaggagaacacagtgagagacagggaaggagaaagggagagaaaccagattgtggaacacttatgagtctggacttcatcttgaagccagtgggagtacagccaagttgtagtgtaagtgcttttaacctaacaagaatacagccagggggccaggcgcagtggctgtgcctgtaatcccagcactttgggcggctgaggcagatggattgcttgagctcaggagtttgagactagcctgggcaacatgtcaaaactccgtctctaaaaaaacatacaaaaattagccaggcgtggcagcaagcgcctctagtcccagctactcgggaggctgaggtgggaggatcacttgagcctgggaagcagaggttgcaatgagctgagatggcaccactgcactccagcctgggbgaccgggggcaaaaaaataataataataatgcagctgggcacactccaggagccagggtggggaagggagaggagaacattgagatggtataggtcattttaccctctattcctctcagtgaaagtacgttccagcttgagttttgagtttgctcctctctccaaccataacagttcctgcttccctgccttgggtaggtctgtggggcagctgcccttcatctcagtgcaggagcagccttttcagggttggacttatgagagatgttgtgctgatttccaccatggtgcccccctcccagggcttcacaagggcaacttggacacaatttttgctttccgtgatgtctttagaacttagctctcctgttagccgtgaccttactcactgtacgaaaagtcgaagcaaaggggtcacagagaaagatttctctgatgactgtgtagacagttggtccatggtgttgtggctggaggcctctgaatacccaccagactgaggagcctttgtcttaagacagagggaaggacatctgggagtgattgtgtcacccagagtggccagagatcaagccataggaaatgctgtctgtgaccaggattcatggatgtttttattttcctctctggagagcatgaattctggcaggcctgtgatctcttaaaacaatcaactcttcaattagaagttcatgatctttaatgggcttgagtccagttccaaaacaggccattgtcaaaacgtccaggaacagggatgaaacttgtttaaaagtttctattaagcaggactgaaaattccatttgtaaaaggatgcaactatgttttgtctttttgaatactcacagtacctaagaaagcatcacatatgataaagaaaaagactatggcaagtgagctttaaaaaaattctttttttgatgcattccatcagaaatcagtggaacatttcattgctgtctggctagccaactccgataaaataaggacttttaagggagatggaaagacacagcaggatatctgtaaagccagaatcatctggtggcaacatataattgtcctatggttgtaaccttgatagtgctgttaccatgggggttgggtggtggrgcgaagtgcatttcccaaaactgttggctagctgagggatgagagctccatccatgaaaaccagtcttccagaggaggatccccaaacccagagagctatttagagtttgaaacaaattgttctccttctcaaaagtggkagaatggttagaatcatcaactgcacagcctaggtcagaagtgaagtttgtcctgttttatgaagggaaagacacccttgtttagtgagcactgaccaagcactagataccccactgaatactccatatacataaaagcactgaagtatcttaccagctgcataaccttgagcaagttgcttaacatctctgcctgttttctcctctgtgaaatggggaaaataacagcagcaccttataaggttattttgcatattaattaattaatacatatccaagtgcttctaaaagtgcttagcatataaggaaacactcagtagtgaaaactagcattattatttcatttaatcctcaacaacactgagaataaatattcttatactctttttactgaggcggtgcagaggctcaggaaggccaggttacttgctcaaggctcatgttgtatgggaaagttaaagcttggaatgtctgattctacatcgcgctctcctcctgtacattggcttctgttgtctctgggttcagctatcagctggctctagaccagaggtactaaggctagagaccttgggtaaaaagtcttcctctctttgaaagccccaatccagagaggaggtagatgggcaaaaaatccaccagcaaagatagctgccatccctcccctccattctccccatgtgctgtctgacctggaggccttgttcaatagcttttcctcctggagacacaagcaatctgtcctgctgggtcagtggcagtccttgcattgagtcagcacattcttttttttttttttttttttttagacggagtttcgctcttgttgcccaggctggcaatggcacaatctcagctcaccataacctccacctcccgggctcaagcgattctcctgcctcagcctcccgagtagctggtgttacaggcatgcaccaccatgcctggctaattttctatttttagtaaagacagggtttctccatgttggtcaggctggtctcgagcttcccatcttggcctcccaaaatgttgggattacaggcatgaaccaccgcgcctggccgagtcagcacattctttatctatgtaggttgcattttctctccttggagagcctcagattcaatggtgagcttayggctggcatgccagcagtttcctaaaatgtaatatcatcactattattgttattatatgagggaaggtgaataggaactcatcagaaacctggaaaatgttgtcagaacattagccgtgtaatttttttccccttcattgtctgcaccagctctgaagaaaaaatgcagaagtttgttgatttggagtagctggcttttttttttttttttttagatggagttttgctcttgtcacccaggctggagtagagtggtgtgatctcagctcgctgcaaccttctccgcctgggttcaagcgattctcctgcctcagcctcccgagtagctgggattacaggtacccaccatcatgcccagctaatttttgtatttttttagtagagatggggtttcaccatgttgtccaggctagtctcgaactcctgacctcaggtgatccacccaccttggcctcccaaagtgctgggattacaggtgtgagccactgtgcctggcctagctggctttaatggttgctgtttctggaatctctggctataggaatggatttctcaatggtatattcttgaaagaaaggcaaaatgctcaaccaaatggaactttttgaataagagttgacagattgctcatccttgccctcctcagaacaagtgtttgccgtttctctgatgtgggccttctttttttttccgaaaaagtctcactttgttgcccaggctggagtacagtggcgctatcttggctcactacaatttccacctcccaggttccagtgattctcctgcctcactcagcctcctgagtagctgggattataggcgcccaccaccatgcccagctaatttttatattttttagtagagatggggtttcaccatattggccaggcgggtctcgaaatcctgatctcaagcaatccacctgccttggcctcccaaagtgctgggattacaggcgtgagccaccgtgcccagcctgatgtgggctttctaggagggggcagcagatgcctctcctcacatcccagccacgcatcaaggatgaatggacatgtgggtgtcttccgtgggagttacctggcggagggtgggatttaggccccagggaaggtgaggagcagtgtaagggacagtcacactctgggaaagacatcgaagggtgacatgcccttccagagagcccagcttctgttcacctgatgagaggtgacacaatgctacggtgttcattcgtttgacaaatgtggatggagcacttgctatgggtatgccagacctggtggaaatagacacataatgctgcatcacaatgctcccagtctagaaggggagacacacatgaaaacaggtatcactaactatagtcatgatcacgatgggaatatgagggagttccccggaagcacaagggaggcagcactctacatggtctgaggttgagttctcctagaagcagaccatgagacaaggatttgagtgcaaataattgagtgagcagtgcaggaaatgaagaagtaaggaagtacacagggaagcctgcggtgaggatgtgccatagcacttgtatatcagttacttactgctgtaacaaatcaccccagaactccatgacttaaaccagccaccatttgtttagctcctgattctgtggccagctgttgaggctaggctcagctgtttgggtcttctggtctcatttgggccccctcttgcatctgcaggcaacctcgggttggttgggtgcctggctgttggtttgtggttcgctggcgttcctccgcatggtctctcctcctccagcaggctagcccaggattactcttacagtgtggccagggcccaaaatggagagcagcagtgcactagacctcatgaggcctagttccagagcaaatatattctcacttttgctacattctgttgatcaaagcaaatgtcacagggtcgcatggaaataaactctgcttcctgatgggaggagctgcaaagtcacatggcaaagggtgtgatccagagaggctgtcaatcagtgcatcatcccctgctcccacagtggatgattggcactttgtcctgcagggaaacgtacctcttggaatgactatatctgagargtgaaggagctggagtgtttgtaccccaattcctgagattcactggttgagggctactctgggttaggtgggtggggacagttagctccctggcacttgcatccttgtctagctatgggaaaaggcccttagatacaaaaatgcagacactggcagctgaaagtcagcaaaagcattggggtcagggtggggagtgtgggaggggatggcagggacatggatgatatctcctgtacccgctttcttaaagactctcagttgatgaatttattctgaaattccaacaggagtatcatatcaccttttgacatggaggcttcttcccattagcttcctaggaatactttcatttcatgttttgccaaacacccaacattctccagtactatgataactattctctattgcattcgtctggacccttttttccccttcactagcaagcataacaatatattattgcacacatgcagaagggcatttggctttacagcaaacctatgaaccatgtatagggctccaagttttgttcccattcgctgaggacagcagcaaaggcagataagggatgtgtccacagcacgtccacaggcagagaggataagatccctgagccctgcatcatcctgggagtgacgtgggccaagcctagccatgcagcagaactctgtgtttcttaggagccctggctccagcgcagctcaggcgtaagcacaacccatgactctgggatgcccctcaattgtcttacaaagtaactcaggcattgatgtggggtagagacaagcccagcacacaagttcttccaggttgggggattttatgtgtgtacttggagccagagcatttctggtgcagaataggaagctgacagacagggattagagtcacttatctgaggtcaaaaaaattaaatagcagaggcaggagaaacacctggtgggaggctccaaagcctgatattctagcaatttgacccatgggccctcactttaaataaccattgcagcttggggaacctggcctgtctttaggtggaaacaagttttggaaattcctcctattgcagaaagcatttgatttgcaktttcctgaatgcgaggctccaagtgtagggaccgccacccaaggacgtttttctctgttgggcagactcaaagcactgagggragcttttcagggcccaccatacatgagcaacagatagctctccctacagataccatatttcagggacagccccttccctcctgagcagacactggctgagattttccagcttcgactttctagatggtgagaggatggggatgctcagagggacagtgaaggcactgaggcagtaactgtggcaaccatagaagaggctggccacgwgctcatagcggccttcctcctgagacacccgggaaggctgagtctacctcacaggtgtgcctgataaaatttttttgggcagtgttttccttggcttccaaacatagccatccattggaggttttatgtggaagcatctttccagcaggcacaatgacatggctatttcccttgtgactggacgcaaggaaaggatctatgaagagaatgtagccccgaatccctcccttctctcaacttggagcagacagggagccatgtgtggtttccttgctaagatttttgcagtttattctgtgtggctgtgtgtgttggtcccttgccaataatcctagactcacccatcccggcacaggcttktwwctgtgggccaagccaaattctgaagcagcgcagttgtttgttgtctgaactcagtcttccccaacacatacttttcttgttgtcctgcacacaccctctcatcagcacccctcccaagtttgttctgagccacctgatataacctcaggtgaacaagaaggctgccctgtggctcttcacggatgaaaagccaaaggcagctgtggcttcgstttgtccccagtagtcactggccacggtgakacctgggtttaacatgacctgcccataaatcagtttgctgcaattgcagtgagagggaaggtaccttgtagaaaacctctagattttatgagcttgtttccctgactgcattccagagccacgtgtgagacttgggtttaacgtgacctgtccgtaaatcattttgctgaaattgcagtgagagggaaggtaccaggtagagaacctctagattttatgagcttgcttccctgactccattccaggtgatcttgatccamaaatgacgaggctgggtggttgccattggtgtcacacccacatcccttgctgtgcaggtgcactgctcccagctgctgtgctggctgcwagctgctcacagtggcccgtcctttggtctggaaagtcacccttgccctgcctgggagggtgacttgttagccaatggctggctgatttggggtgtggattaactccctggtgcagtttatgctgcacagctccccttggtgtctggttgaggctagattccccctgtgcccacagccttggtccactcctgccctgtccctgccccagcctggttccctggctcgccaacagatccctggawctctgccacaagctctggcttccagggaagggagcctatcctgagatgcggtagaacctcatgttttatttatctgctcttagatctcctgtccgggcaggctgattgctttttaggattccaagtttcaaaaggaaatcaaatccaatgtatttatcagacattagtgggagagaaaaaaaaacagttgctcattggctttttatttgccctcttggaattgcagaggattttgttatttttatatttaaaaaccagacttgtggagtaatgtgtgggagaccccttcaggctggtccaggggactttgtgtctttagagattgctctggacacctcttccactgaggctttgtttttaaagaggactttccagacccaagggaatggaagggggctcccttgagagaaatggctttcatacaaaatgtccttactggtggggaactgaagacaggtacagtccttactgcataaggggacagatgatgttcagttacagtcataagcctttctcaccaggagcactggactctcctttaagaaagttttctgtgataatgagatttgaactggaagaaatgctgttctttcagttaacagttgtgttttttccaagaaaaaaaagaaatacaaatgttaaaacttttttttttttttctggtgctaaagaacaatttcacctcctaagccaagaaggaaaaaattctcatctaaaccgccaggcttaaaggtggctccttgtcagtcctgaggtggtagaattgaggtgaatgaagtcaaccacagtttctaatgtcttcttatatgccttcagaaacaccatgctcacctttcctcctgctgtcctaggctgagcctgccatccctccttccctctgtccatcacagcctccccttagggtcattaactcagtccctaccactcaccttcccataggacaggtgttcttaacctggagtctatgtcctcttgctgatctgtgaacccggataaggaaatgattgcattttgttttcastaacttcacactgaaatttaacatcatattcaattatgaatgtaggaaacagactacagtaatattaccaggacctgtgactctgtcccaaatagaaatcacaggtattgtcaaatcaagttagagttattgcagatatttcaaactaccatttacattcatccctccttcagagttatagcattagatttacctccagatctttttatttaatatgttttttttaaagcatattgctaaactacacatttgtgytctcccctttcccatagggctacctcacctcccaggagaaaagattcaaaatctaggagattcataatttcaatatattccattgcttgtgactatttatggccgtatttggttcctgagctagaaacagaaaagttatggccatgacagaattacttgtcaagggactatgatgrccctgctaacctgggctttcttgagctgtctgccccgctagctttgatgaaatgcacatacactgcttgcattttctgtgcaatggccaagtgtaacaggcagcacacatgtggcagatcgtagcagcgggcccttgccgggtcaagtcatacatcgctgcacaccggggctgtcttaggacattggacctccgagcagcctgcagatcttgggaattcctctgccccctaaagtattctttgtctttaatccagttgttacagtgagtgwacctgatttgttccagatgtcctaagatttagtgattccggaaactactcctaaagtcaaggctgatgaggatttgaattcctctgytagctgggaaccagcagttcttttcacagttaaacagatgaggcaggaggagggagactgagctgccttgagggacagggaggggcccactgactggcttatttgccttgttagaaagaggatggcctttgaagcaaatatcgattctaccactacatggctggggccaaagtcagctgggcagggacatggacgtgctattttttttaaagtaatacatatttaccttaattatctgaatgttgttgctagggaaaccactattttggctcagatcatcttagtaaatgcttttttctctcactttttgagcataaaactggcccaggtgggtacctatgagggaggtggaggtatttctggcttcctataagtgagtttttcaaaccagaaattcagtcccaggaatgatttccctgacccactgtaaattttaattgaggtgcgttacaggggtgcactatgatctctctctggagttaataaccatatggatctgttttgcctgattagaagggatttctaaagcatgatgagatggggaagcacaattcaaactacatggcatagtaactcactcccagaggaagttaaaacatgtatacatacatatagaatgttctgtttaatattattggtttatgcagtatttgaatatataaatatgaayataaagccacgtacagttatggatttaaaacaaaagcagaacttaattaatgttgctgtttggatttttttcaagtgtatttgaatgcagacaagtatccagatagatgctagtggaagtctgggacaagctgtataagggtatcaacccagggttcagctggagctgggccagactactaggttgtgtatttagagaaactagggcaggactgctggagaagaagctgagtggtgccaaggtagggcagtgatatggtttggctgtgtccccacctaaatctcgtcttgaattgtagctcccgtaattcccacatgttgtggcaggaacccggtgggaggtaaataaatcatgggggcgggtctttcctgtgttgttcttgtaatagtgaataagtctcacgagatctgatggttttataaaggggagttcccctgcacacactctcttgcctgccaccatgtaagacgtgactttscttctcattcaccttccgccatggttgtgaggcctccccagccatgtggaactgtgagtcaattaaacctctttcctttataaattacccagtctcaagtatatctttattagcagtatgagaacaggctaatacaggcgggataggcacacctgagaaggaggacagggtcagataaggtggtaagctttgaacagaagaaagcgtatcataggggatgttgagcttgttgggatgaggagcatccaatgggctagagcaggtggtttagggctgaggctgtaaaccacaggggattacctatgtttatctggggcaagttgcaggataaccacaggacaagactagtagttggmcagaaataccaatttttattattctagaatagattaaaatataaaataaaattagattttctctaatatatttagaattgaacctttttgggtacaatattcttttttagtatttcttggtgatttttttttttacaacaamaaatagagcaatacctttcttggttagtaaaataaatccctaaatatttgccacaatctctagaatcttctaaatcaggaaattttaatgattttcacagcagtgaaaattgatattcatattctaaataattccatgtttcactgaaatctgcaggaatcgaaaacaataggcagtcactaactaaaatgggacagcaagacagaaacagtttcctatccctgtaggaaagagaaatctcggagctttcattgcatgaaaaccgactccattttagtacctcgttgcactttaggctttccttgtccagagttctcacacatgacagtgagctccaactacaacctattccaagctgagagtaatggactgagaatctgaaaacatgacacatcaatccattccccacctttcccctgtgagactcaaaaaaacatttcccaggctcccttgcagataagcttcttgggaagttcagccagtggcatcactggtgtgagattggagaaagggaggaggagaaaagtcagggtgtttctcctyaactccactcactttaagcagcatctctggcagtagctacttctcctccaccgtcttagctccctcttggcagtcccagtcccagtyacaatcacaacacctcctccctcagtccctccaactctaagggtgtcagcagttgcttctgatctcagcttttccttatcttaccttgtttgctcttctggttcttttcacacctttgtacctggttccccattttaatcccttctatgaactacctggcatgggttctgctttcctctctggactctgactaatacatagtgggtttgaatcctggtactgccactagttactaaataagttattaagttgtctaccttatttagtcctcaatgtctttgcaaaatgggraggaggttggtctgtaatgaattctgagatcccttgaagctttgaaaatccgtgagtctctaaattttgatctcataatacatattcatgaaatgagtgtatttttctagctccattacagagatagtttttattatttgctttctaggacatggccttagccttcataatactgtttgtttacagatttcatgaaggcatttaccctggcattgtaccactaaaggctgatgttggcggcattattcttaggagacatagaaatgtkgtggttttgagaatgggcttttatattatttggcgtagattattaaagaacagttacctgtgtcatgaaggagaggcccccagactggcactttgaatgcaaattcttctgtgacaaatccaggggaytttggaataactctcagrtatggcagtagacttaactgtaaaagctcccagcccacagaggtgagcagaggctgaggagtaaacaccataccaacattctgggacaaaatagcctgaatgctgttgtaccttggaaatgcaatagcagctgccttcctaggtggggaagctgagagyagcctcttacaggagtgcatgccctatagacagaggctcatgaacttgtgcttgctgacatgtatatcttcttcagttggtccctagtgagtctacccaaagtgaattgcactggggaaattcagaaatatacacccctcagattcaacaagggtggtatcttgtgtgtttcctttaagttataccagtttatggcaggggcaatgttcaaaatagttaagaacctgcacagcatgagcacacctacctttaagaacagttgccagtcatagagaactggtacagctcccctggtgcaacccactgatggtcagtctggggccaggggtgtctttggtcacccacacccacatttggctggactgtgaggcctgggacttgaaccacatcagtagaaattgaggctatggcacctgggatgtctccttgtgacagttacgcaagaaggaaagtgaacagaatgtggatcccaagggttgggtagggtttgtccagagccttgggtcctttccagaaggagcttgggcccctgtaattcagagatattcagattaactgatctggtctcctgccagtgacaggcctcactcactggaccattctcctattcagaaagctgacataggatcctgtagcaggaatgatcagtgctggctgcatcccttttatatttatgtgctatgctggtatgcagctactagtaactatatctctttgccttttctgcctaccaagtatcttgccagaggtactgggagtagatgtgcagccccccgcctttgcagtagccctcaaccaatgactgactagagtggacacgtaaatattccctcatcccacaaatgggataactctgttctgctcatgtgttgcacagtttcccagagctccccagcaagattaagttccaggtgctcagggagctgactggcttgatgttgctgcctttgctggttgcctgtccttctgtgtytcactctaccccttccctactggtgttttatggaaccacctctggaataaacaacttgctttcaaacctgtctccagctctgcatctgggggcrcctgcactgacattctttattccctagatctgtgtggcttgctacttttttctcccaccacatcacaggtaatgaatgaggctcatttgcacaacatacaactttggacatcagattttggtgaaactcaaaattacttggtgagaaagaaaagcacacatatgttacgctttttttttcagcatttcacaatattcactaaagcattttataagcaagtgagttgtaggagctaaatatgatcaatttttaaaaactactttttttttttttttttttgagatggaatcttgctcttttgccagactggagtgcagtggtgtgatctcggctcactgcaatttctgcctcccgggttccagccattctcctgcctcagcctcctaagtagctgggactacaggtgtgyaccaccacacccagctgatttttgtatttttagtagagacagggtttcaccatgttggccaggatggtctcaatctcttgatctcatgatccacccgccttggcctcccaaagtgctgggattacaggcatgagtcatcacgcccggcccaaaactatttactttcatttttacccaaatttatttcccctggacgtctacttcacaagcagtaacataagcaagtatgtatcattaaagatttatcacaaatcaaccatattatatcgtaagtaaagtaaaactggtgaaacaaatttaatgcagtatatcccaaaagtaattatttgagcatgtaatcaatattaaaacaactgtggagatttttacatctttgagtatctgctgtctttgaaaactcatgtgtatgttaaacttaattcagaccagccacattttaagcgctcaaatgccacatgttatctgtagcaaccatatggggcagctctggtctagcacatgaacttcagagttgtcccactcaataggcaagggagctggggtaattatacagcagttcccatcagtcattgagggttgctgcagagcatgtcagaggcttaattcttaggcactttcctggcctgcagaaaaaagccctctgacaaagagatggggatactgactagatagaactgcagtctgtgcaggttacacagtgataagaccccaggtggaaccacttatagctgactacattttttaatatcttcactttggtgttttattattgtcaaattacttgcaataatgtatcttaagttggtcactcaagaaaacttggttaaattcatgggcctagaagatcaacatcaaatctttgtcttcaagacctaagggaatctggatgtgccctacacatatctacttgcctctcgctaatctttctgctaagagtgtccttctcctgcccctttccatgttatttctgcccaccttcatcctctgatcatgtttatttttctctctggctggaatgtactccctgtttttctgcccatcaataggcagagcattttacaagcaagtgagttttaggatcattctttcagatgtggctcaattgctacctgtctctggaagcttcatgtaataacttcagtcaacagtgatatcttttccctgagtttctcttgccccttgatcttcacctgttcctttggcaggtcttatcaacttcatggtttatttcctgggtaattcatttaccagcatgcattcaggaggtgcctgacagtcctcacttattccctgtagcttaattaacaccgtctcttaattcttcatgttataatcaatttatttggtattttttgctcatatctctcatagaaagacaacagatgagcaattttggttttatggtttactcatgtttgtaattttaaactctgaaaattgaaaagctttgatagttgtcaacaaagtacccagaaagaaggttgcccatgagagtggctaaagacatctagagtcatctcaaatgcctccacaaatttcaaagaaaattgtcaagagaaaagttaagcacctcagtagcatttgtaaagagatgacaccttatgttctaaatattctcccagtattctaaaatattctaaatgctaaggaaataaacacaattttatttataatcttatagccaagtatgtttcatatacattgatactatttagttgcatttttatatgctttaggagcaatgggaaaggcaaaggagcactgactggaccaggggttagagctctgcccttgtctgctgagtggccttggggaagtcatttaactgtctgcctttatctgcaaaatggtgacccaaatgggcccccttccagctgtcaaattccatgtctgattttatgatgtctgccctttttaagaatgggaagcattgtttgtgatttcacattgcaggggctatttacatgtatgatttgcatcattgattttatgatacattgttgagagtatctgtgattttttkggaagctgaatccttactgagggcatgctgcccctagttatgatattgctcctaggaagaataaaatctgcttcacaatgtcctttttggtatgatttccatgattgagaaaactggsgattgtatgtgtagtacatctggtttatccacttgtctgtccatggacactktgggttgtgtctacccttggctactgtgaatagtgctgctatgaacatgggggaacaaatgtctctktgagttcctgctttcagtwcaytgggtaataaacccaaaagtataattttygggttatatgacaattctatgtttaattattkkgagaaatgttcatattgttttccaagcagccactcgattttacgtycctmccaacagtgcacaagggtttwaattycyccacattcttgacaatycttgtcttctgtttttttgatagttgccatcctaatagtcatgaagtgggaaaaaatagttttwaaaaagtaacagatggataaacaactaagagaaagaaggaaggagtgaaggatggacggatggacagacttggctgccctatrctattatcctagtcatcattgttaaatatagttgtggttggtagatacaataccgataataataatgatggtgtaatgagaatttttttaatgcaaatatagttggatgcatttgattaacacttgtgctagcctttactcaggctagatttatgatggcagcaaaagaaaaggtcatggtttttatgtctaagacttaaggaaaatctaagtgatccaacagaatattattaagcaccatccaaaaaattatctggatagaagaggaaatttttgctttagttgccttagtgattcagcatatgtggttgatatggaaatgtattgcatttacccaacaaggaactttgaatggtaatcctaatgtacagtgatgaatgaggacagaaaacaagttctacagagattttctggcttgacacagctgccaagatgtcatcagtaacatcttccattgagtatagtgaatgaattggtgctaaacttaagtacaaacccaataacgcagtcaaaaaaaagccagctgctataagatatacttgggtaggatttttaataacaaatgagcaatatattttcagcaggctatatatatgctgtaagataagctttatagaagcagtacactttgtatcttatgttgactactaataatgattttcatwtaaaagcacagcaaagagatccatgtacaaagtaatataacccacttaaaagactgcacaagcaaattaaaataaatggggaaatttctcagggaataaaatttcttgaagattagaaacactgttcctcaataaataagcacccctggaatgtttagcacaaaaactctatgcttgatcgttttactatttcagcaggactgtcagagaggttggtctttgtggagtcctgttcctttcaggtgtttgtaaactttcttgccaaagcccttcccgactgagatggagttgatattagagccatggctgggacaaccttcatgccaaaggaggtgtgctgctagttgcaactcagaccctgcatggcccgggtgacctcagttgggtgggttcccctttctggggctcaacttcttcatctgtaaaatgtgaagggggagctgatgatctgttgtggggatgtcatggatgttcattcattcaagtgttcactgaacacctgctaggagagaccaacctctctgacagtcctgctgaaagatgaaaacaatcaggcacggggtttttatgctgaacattccacggtgcttagttatttattgaagaagaatctttctgatattcaaggaattttattccctgagaaattatgtgccaggcactactctgtcactaggagttcaacgataagcaaagccagagaagggtcctacccctgatgtttagattctagtaggggatagacagtcctcaaccaaaaagccccacaaacaaatgcataaccacaacttcgataagtgccatgaagggttgatggggcacatggkgggtggggggctcataatgggaggatttatttcacctaggsagggagatcaggaaggatcccctggggacatgatagtcagggggctggagaatgtgggttatgttggagaggaatgagttttgaagggataggagttgctgggttctcataccagcacagcgtcttctctctcttcatctcaatttcctcatctctctaatatgggcctaatatcaagaccctttctcagtgttgtgaggtttcagaaggatgacatatttgacaacacccaatatcatgctggcacatcacattttcatttcatttctaaaaataactttggaagcagagatrtgctgttttagtcaaagacttttttagctttggagaaagaatgaaaccccagctttgagactcctctaaaaaaaatctgagttcacattctgccctggaagttgcctggctgcttcccttaatcacagagccttgtttgaatcacttgactttgaaatcccaggaatgactttgctgtgtgattaagtgacagaggcccaaggtttggggattggcagaagtttagatgtccctggcctgatcccttaccctttacatataaggaaaggaagctgatcacatgaacaactaaactggaatgaggaggcagcccctcctccatggtcctgggctcatctatactgtctccctgccaaatattccatggaaaccttggacactgtctgatgtcaggactacttatgaatgcctgtccacttccttctcaagataaagctaggttagcactctctcataactcaagcctgaggtttattcttttaatcttccaaaagcaaacagaagaacagaaataacctatccactgtttaagattaaaatggccaacaataataaataattgccacaatagcttgagatcagggtcttaatttattggaggccgttcaagaatttgcagctcttaagttaatttttcacatcttgtttggatcctcagagcccgtgcttccaaagcaaggccatcatatttctcattgcacatgttattcttgttgatgtgccagacatgcaggagagtgaggtcctctcttcacagatgggtaatgaggattccacccccccagaaattagtatttcaaagtatttttgcctatggagattttgaagagttctcttcttttgcatggtgtattagctgtattaatggttgcaaacaagaaaaacgtatgctggttaatttaagcagaaaaggaatttattaaaaggatgtggggtggttcagagcatagacaagaaggctggggaaccaacacaggcaggaaacagaggaggcaagtcttagtccagggttccacctctgggccctttactcctctgtagctacttcagatgatccctggtgtctctgtgcaaccctcaaaatttgtagccctgggtgggagcatctgttctcacatcgctgccacttgatcacccttagatcacatgatttcacttaggcaagtgcccacaccctagtgatcaagaagaggggaaagagagggtctgccccctttctgctgatgtgccgccccacctatcttgagattcccccaaaacacgaggatgtcaggatgctgagtggccaaaaataacaacygttcattatacaaacccttatatccttaattacgtcttccattaactggttatccgattaaaactggccactcacatggatttattttgttcaaaggtcgcatcacacaataatcatcagtctctcatgcatcttcatccttgtcatcttcagcctcagccttatcaccgttctcatcctagccccgttcactcacccctgtcctgggcccccatttccctccatctcctcacctctcaaacgttcacctctttctcctccaactcccagtctttcaccctacttctatttcactacaaaatagaagcaatcacagaggaattcccgcatgttcctaccacccatctactaatgcatcttcagctcacctccagccaggcgagaacagtcattcatcagaccccagcaattgttgcctgtcgtgttttcattaattgttrcctctctaatggatcattcccattagcttgcaaatatgctatgataattcccatcttrataaaaaagagcaaaaaaactccctggagcccacttcccccaccagctaccatccaatttctctgttctcytttagagaaaaactcctccaaatagttgtctgtcctcattgcttccatttgttctcctcctacatctctgaaactctctccagttaggctttcctcccatcgtgccacttcagcagttcttatcaaggtcaccagtgacctccagaaggctgattccaatggccagttctaattattcccattgttctggcctgtctgccatattggacaaaattgatccttcctttcttgagactgtcctctgtgaccatgtggrtgactcctctctcrattttcctcttccttctctagccatgcttttccagtcttgttggctgacacctcctcatcttcaactcctaaatgtgagtcctcatttctatctatactcatttcctagtgatcgtttctagtctgtcccaaatgtatcctagcccagacccctccttcaactccagactcatgcatccacctgcctcaaaatctcctttaaaacccaataggcatttggattttctctgctgaaccttctcaacccagtctttcccatctcaataaatgacaacttttctcttctagttattgaatccaaaatccttgaagcagtccttgactcctcttttcctaacacccttcatcmagtccatgagraaaatctgttggcatgacctttgaaatgtgtccagaatatgaccccttctcaccccctcagctgccatcaccctggccttcacgttcatcttctcacacctggattgtcacaagagcctcctactcaggccccctgttcctctcctggccactccacagaccgttcacatcatagccaatgcgagcctcctttaaacactaacgtcaagtcacgctgctcctctgctcagagccctgaaggggcttccgagggtcaaaccaaggtccctgtgctggccctcaaggccctgtgggatctgctgccccaactccctcagtccctctgagctcaatccttcctgctctctttatcactcctctccagctgcactgacctccttgctgttacctgcacatgccaggcacacgcccacctcaggacttctcctttgctagtccccacataccgtgtttcttgctccccttctttcttcgggtttgtactgagaagtcacctcatcagtgagacttccctgatcaccttattgtaaattgcaccccacctcccttgtaagtctggcatgttctatcttccttaccctttgtaagttttctccacagttcttaccacaatctgacagacatatttgcttctttctatgtgtgttttctctctccctgaagctaccaggactctgttttctttgctgctacttccctagcacggagtagtggctggcacatggtaggcactcagaaataaccgcatgaattcatgtacaaatgaatcccacgcttaggttgttaagtgccttatagtttttgaagtttgatgtacaagatttcatgtgagcctctaaacagtctagtgagttaggcaaggtagaaccctgtgctttacatgaggaagctgaggccctagagctaactgattgcccaaggrcacatggctagttaatggggctcctggaacttgtagttctgatctcggtttctgccccccaccttcaactaccccctgtgcctcatgttatattagtgtaggcctcagggcattcattgctgtctatttttcgttacagtatggatgagaaaaccctgtatctagctttgggggctgtgaagaacatctccctaaacatctctatctccaacctcggagatgatgcctatgatgccaacgtgtccttcaatgttycccgggagctcytcttcatcaacatgtggcagmaggtaaggagggcatccctgtaaaaagagcagttgttccatctggtgcgcttgctgactttcattattgcctggamtaggcaatgattctacaagcactaatcctttctgtggactatcatttagaatgattagaacttttttcttcctgggcttagaaaacatgttggtatagccaaagaagcagccgtaaatgcccacagagtgccagagaagtgtctgtatttatgtagtctcccatcccttctctcttgtggaatcctctccctatggttttacatctggccccttcttggagatgatacagttgctgtctccagcacacacatgttctagagaattccagttttaggtcagtagttgtgaaagtaagggcagatcactgcttgtcgtgttagttattatgtatgatgtacttgatgtttctagtagagggtcactgctttggcctgtgctttggattatttatttatttattttttgagacaagtctcgctctgtcacccaggctggagtgcagtgccacaatctyggctcactgcracctccacctcctgagttcaagtgatcctcccacctcatcctcccgagtagctgggactacaggtgtgcacctggctaatttttgtattttttggtagagacagggttttgccatgttggccaggctggtctggaaatcctgacctcaagtgatccgcctgcctcagcctcccaaagtgctgggattacaggtgtgacccaccgcccctggccttcctaacatatttgagtgaattgaggtagttaaattatttccacaaattgagtgagtttttttagagtaaattaatttgaatgaagtgaagtttatatagcatgactcaaaggtacagtgctggtattctcccctacccataatcatcccgagtgtaccacctctcagaggaagtgaacaggcttccctgcagacaacaagggggaacaagtggacaaaagtcgactstgctctacccagtgttgctctaactgctgatagctgttcagctgggactgcttgcagctttttaatatttacagcattgaacrgggttgccttgttctttatgttaaaatggraccaaaatcactttctgtggaaaaccttcactctgcccaccgatgagcactgggcatacattgagcaggtcaacggcgtttgttcaggcacatattctgtggcctcaatagtgttgacaggtttgtgccaagcctgcccagcttaggggacagctgaaatgctcagagccaccaacagtagaggcacyccaaaactttccaagaagtcatctcagattccctgctgcttcrtagcttttaggagctccagggttgagggaggccmcaaaagcaatcaaggactgcaggaggggtgtgctttccatccactttctatattctaaaaattaccgctggattaagcccagtcaagagagaaccaagtatctgtatggwycaagtatcgctggccacacacacagtatcttttacagaatcgcatgtgctgtgatgccatctccctgtgcagggtgggttggtaggtgggggaaaggggcttccttggggatttgayctgtggaactcatctctgtggtaactgaaaagatgtarttggcaactggctcattacattacacagatttctctcactcaggacccatgcgagaaatttccttccagcctcatttaagctatttccagacttagaaatagctgtccctttgcctgagaattttggcttgtttttaccttgtgactgactaggcttcattctctttattggctgctagaaagctcagagctgaccccactctgtcagtatataggacttagtcttactattttataaactcactagcctcctgtatcttgctttgctccccctttaccatgcttttctttttagcttggagattgcataatattctaccatatggatatactgtggatttaccttaaaaattcctcttattctgtatttaggttattcccagtttctatattaagtaaaattgtgagaaatgtcttttatggagattagtaccagtaaatgatcatatycttagctctataacttttcagagggtgtgaagtcacatttttgaccacctactatacaccagggactttttgcatctcgtccgcatcccctcttcactgcatgaggcacaatgtgtgtgaattattggaggagcactctcaggagaagaggggcgagggagcagggaggggcaggggatgggctgggagggatgtgctgtygggtcaaagctagccttggtctgatttatgggctgggaagaggtggggaagccctggagcataaatcactctgcagaattgtccccccttgaagctgctggggacagcatcattttctacccctgtatcgtcattggccactggagggacgcaggcgtggtgagtagcctcccaagcatgctggacaaggaggctctaggaagtcaaagacaatgtgcctgggaaggccacaggtacaagccattgrccactgtagctggccatgggaaaaatgggagcacatcattttgatctctttgccattgaattccagcaacctttgaaacctttgtcacaaggaaccctaggtttcagttcgacagaaacttgacaaagcatcaggctcttcgggacgtggtgagtgttagctccagagtggtgatggagcagggaggtatcttgtagctgctgtggaggcagggccagccagaaacgcagatgggcaagacgaccctcagggtggcaggaaaaggaagggaaaagaaacagaaactacccttccaggactccagccacgctgcaaggttgataaacagcggatgtaaatggcatyacccagcmccgggtaggattctgacaggacccagtggctagtgaggggcaccaggagagcccccccaacctgcttaacaacccacaggcctaacaggaccaacatgggcctgtgaaatattctaatgggtaaactaagaaaagcatgactaagatacagagggaaagcataagttttaaaaagattattaatagaaaacaaaagtaaattttacagagcatctactttttgatgaaagtcaaaaaaaatgaacaaagtggaagatcagacagtagaacaatagactgtatgaaaatggaatggactgggaggcaagcaaaaataaatgttatggatgggataaagaaatgttacaatgaaaccaggaaatcagtggcagaattaaaatatgttatagtcaggaaagagcagaatcagcagaacagraaattgatttaatgatgyggaggtgtttttgagargctctgagaattcagagaaaaagaacaaagcaataaaaaaggatgacatgaggactatattgtggaaggtrgaaactggaaaacagcaaagagraaatggttccagaataattggracagaagccattccttagacagcaaaggaggatctccatttcctgaaatgggtgcagcagacaccaggcaaaaatatttaaaacattttaatgtctacaaatagcttcatgaaatttttaattttaaggatatgaaaatgwtactattaacacttagcagaaaacaaagaaaccagtttctacagacttttctgtaacattaatgtccaaaattagaacagtatattccattgtgaattttaaattcaacacacagccaacttgccctccattgtgacgtcaaaataaagatatactcagatatatgagaattcataggctattacctcttccagtttggayttccccaaaagcataccctgatacaatgatacaggtacaggtagtttatttgggggtgggcgatctcagtgktgagtttagacaggaaagagaggaaagacaggaaggcrtgcatttataagcaggttactgccgtaggcaccttgggcttgtcttcctcagaccctccaagagactgtgtgtaacaaacctcacatccacttcactccaggatgaggaagctgctggaggaccgatcccccagctcctgtcattcatcatggagaaccattccctgggcatgaactctctggcacttccagccttctctaagtaggtccacactscctggggccaggaagcaactcaggcagaaagatgtgggaagcctttgacctggaggggcatggcttcaggtgaccagaactgtggctggttctggggaatgtgagcgaggtgctrgccacatstgctatagtaaccatgagagcttcctgaaaagtagttatttactgataaactactcaagaatacaaaagtagttgaataaaaagtgtgccacagccaaataagcatagaatgaagcaaaacaatttttataaatatttacaatagtaagcaaatgtaaaaaaaagtattgccatggtaaatgcataatttaaaagattaataaaaataatcccataatctcagttataccaataacaatttgagaagaaagttgacattgtgactcctctgcttcactttcttcaggaaggagttcagactcctcagctcctcatgagaggccgtcctgagcctggtcctgcctgcctgcctttctccccagacccctggctcaccatgcccccacatactcacttgaatcagtcgccacttaataccaaagctgcctttacccaggaatcacccccaccccccatttttgtttaatgaactactatgtccttaaatctcagcttagggagcccgtgtgcaggctcctcacctggctgcacaggatctgtccacagaatagatrgatggatggatggatgggtgggtgggtggctgaatggttagataggtaggtaggtagatgactggctgggtgactgggtggatgagtgggtggatagttatgtggataggtgagtggggatggctgrctgggtggatgagtgggtatgtgggtggatgggcaggtgagtggatgactggctgggtggatgggtgtgtgagtggatggctggctgggtggatgagtggatgggtgagtggatggctggctgggtggatgggtgggcgggtaggtggatggatgattattcattttgtgcaaagttacagagactcaaggcccaggcctccaaggttacctatcttctctgtcatcacacagtccattagttatgtattagcttctaagactgaatacaaaatatcccctgcaatggatttttctgtcttctaatgcaaaactactttcatagatttattctggattattttttcctttgagggaaggctgcttataaaaacatggggtrcacatggatgaccatctgctggcttttttctctcctaaataaagctaacttgaaaacacattataaaagagggcttaatttgttggtggctactctgctggctggcgtgtgctgtccagccagagcacagggtattatggccagcaactgggtttcctcaggggcaggcccagtgcaycgtgttgcctgccgggcaaggaaccagcaaagcctcactacagagtgacaattcctggggtgccctgtgggagcagtgagagggagntcctggggccgggggrtgctgcatggttaaaaaggagcataaggaagaatagataaccactgcatcacaccagggtcaccattcacactgggttccatgtaaacgacacctccacagaatataatgtgagtggtgtccctggagatgtacagctctatggccctggagtcaaggtaaagcctcattttaatwttttgcccyggagccgtttggcacaaaggactttggctcttcttgcctttgtcaaacagccatgaatttgtttggacagcagttgttgaatgcctgctaaatgctagggactgttccagccacaaggagamacaaagatctagtccctgctcccagggagctcatggcctattggggccaaaggcatgtcagtaagcaattaaagcacaaggtgccagctgctctacagaggtgctgaaacgttgtttgaagcacagatatgacaaggtgaagcaagtcattaccacagtggctagtgccatgttggacagaatccttggataagtgcttaaggtacatggatgagcctccaaaggatctgatgtcagctgattcctacattgcagagctagggtgggtggaatgagtcagtttatttggctggtgaaggaggaacctaggttggagcagggatgagagggtagaagagagcaaaggaggaggggcaggagagaaccyrgtaggatggaaagaggctgcccatgttgaacaaagggccagtaacatttctkgtggcagggagatgtcaggacattttagaaatctgatgcctgctgttacaggcctgtcaggactttaccactcataggttctaagaaatctcccctccccacctcattctgttttgtttttagyccattctggatttctgcactcatgcatgcctcatgtgaccagggataggcagggagaaaaactcaaggggctggggttatgtgtacatcttcatggtattgactgttatggcatgcatggaaacagacctggacatgaaaggataagcttcaagccaggtgcatgagggctcccagctgacttttgggtgcamacaggatgcaacagcttgccacagagtgatagaggaggccatgctaggagagaagggagaacaagcagggcaggcaccctggcccgactcttacacacagtgtgagatgctctcttggtttgggtctcccagatggcgaggaattcagggaaatttctttatttgggagatgcaagaaataatggtagggggttgaagtgatatagtagggaggtgaaacaatggtagggaggtgaagttatataggcaggaggcagtgaatgaaaagtgagctgttaaaccaactactacagtgggcaatgggscttattcctgcagggcaacactaggaagagtaagggagctgggggttttatactcctttccccaagtgtcaagaattgaggtctcctggggctatttatattctccagtactcctgccctcccatatgcatggcaggagagacctacatggttttggaaaaatgctcttgggtgcagagatgccgtaatatagcccctggcagctggaagtgggctggagcaccctgagagtgcaagtaatgtggtcagggctcaccagcctctgccagagaggcccacaggattagaagtatctctaacctgagcacctcactttctagactcctagaagttgtgggttggtctgatagagcctcgctgaggttcttatacaagatctagtagcatacacctcacagtgtgcaggagttgggtgaggcaggtgtggtatgtgggtgaagaggaccagggtggggcaggaggaagcagtgaagacagtgggaagatggagggttccagcttcmcccacagggcagcaggctcacagcagcattcagtggttgccaggtgggagtgaggcccagcacactctattttctaataaaaccgagagatcttatgactttggcagctaattaaaatgttttctgaacatcgtatgagccaaacaaaacatgtccagtgaccacctccagcctgcaggccaccagcctgtgacctccagcctggctgttttccgtatgttctagtccggatctgcatttctggtagaactagtctgtctgcagccttactgtgtttcatgttctccccttggcaacagataaattagtcaaagagatgagagtttggggcttcaagtgtccgagtgtctggggaaggagaggagtggagagggtcaaccggaatgtagtgtccatggaatttttagaactcatgatgttttgaaaactatttgctggctggaatatttgtacttcacagtgattgcaagaagcagctaaactggagtttgaattttagaagctgctagaagtaaaataacaggcaaccagtgtgaaatagagggaaagtgtagctttggtgaccagcagatgcagagttgagattccaactctgtttcttgtggccagtgtggccttggctcaagggtcttctctctgtgcctcagtttctttctctataaagtgggattgtgccaaggattaaatgagtcctacaccatcatgtacagtcccacttgtatatgatgggtactaccatggtagtcccgactctgccacacatgagcttatactttatagctcattcatttactcagaagagatatactgatcacctacttcagaccaagattaaatgctgagggggaagaggaaaataaggcaagaatataaaacatagaatgtatgtcagggggtgataactcttccttttaagccaaaaattatcagtcattgtcttaatgaaggattgagagagagagwgwgtgtgtgtgtgtgtgtgtgtgtgtgtgtgtgtctacatactgtaaaaaaaaatagagacagtgttaaactgacatctcttaatttaatgagttgcttgtacttaagaaaataaaattatatgaaaattaatgtgaagcagtaaatataggtcagtcaataaatgtctgtgttggcttttgtgactcctgattttattaaaataatgcttgttgattttttttttcccatttacttaccattttgcttaagtattggagtttttggtttagggatattgactttttaaaaccaagatatataattgttcaaatatgtgatgcacgtaatacataatagcgaagtttagataatgaggagaataatgccctccaaaaacaatggcagggggctaggtcctgactctttcagactgggcagggaggcatctggcccaaagggctggaggagtgcggtatgggattcagactttttatcaggtaggcagtaagtgaggtcttgactgagagaacagagaacgaagracagaggctagagacatcttagaggaagaacaaagaaacagtgctgacaggccaggaaggtcagagactcagtgttgggactgctggaagaaagacaagtgaggaagaggggtgattgtgaactcagcagggagaacccagatcctctactcctgatcatgctctagcgcacagagcactgtaagctcgtgaggaatgtgcttcgyacctggcatcggttggccataagtcactgaatttggstaataagatgttgcattgtctctgatctccttgagagactgagatagatggataggccctaggtccttatttcctccatgggagggtattgtgggaggggtgatgatgttcgaagggaagctcatttttgctgtttctaaggagtataatttgagttccaaattaaactggtcttccaagttggggtttggaggcagtaaagcaccaggtcaactttcaaggctttcagtggctaattttttatgacagaaggcatcgagggcttgtaagtttgtttttcttatcaagtgattcttcagattatatctacctttaccacagaaagggtggtccctttctttcaggagtggttctctcttcactttcaaggcaaaccgctcaagatggcaccaggtgataaaacagatccacttgctaatctggatagagcaggaaggacttaaacatttatgtgtttgtatacctttatttgagggagtgctttggcctgtttttagacagaaggttccatacagaaactgcatctgggcaggagaacaaagcaaattgtgttacagccgggaaaccaagcattgagcaacagaatggttcttaggcagaagtgagcctcatccctcagtgctgggacagattacagccttccttcactgccgctttcattcagcgcagggactgattttcattgtgttctgctttctctggtgtctcttgtcaagttaatagtagcctcaagtaaaattcaacccttagatgtttatagtcatcttggcctggccattaagatgatgaatgaacttgctgcttgccctggtaagagagccctgagggtggatgccgatacttagaaaataataagtcttttccgcccccttcctgtctttaatccagtgccccaagccccctggtgactttaccttgaacttcctgtataacgccaggtagaaaagcctcaccykgctggaagcccactcgaggctctaacacaacagcaagctctttatcttgctttgttggtcttccccatccgcttatcagatggaaactcggcattcctcagagacccttcagtgtttctcagttgcttctgcaggcccttcccttcctccttgagaggacaagagaaggtggcggggagcaggcacccccagcctgtgtttgtatttcctcacctggattacctgtggcccttgcatcagggagagcccagccttgagtgaaactgcctgggagacaggctgggcgcttcctgcggcagtcggcagtgaggaagtggtggagaaacgcagatgtccatttcaaatcacaaggcggcttcagtattccrccgcggggctcagctttcacgtatatgaaaagcttcatttgtgtattcactgcgtttggaaggaaggctatgttttgctttagaaatgtcaacagagctgtagttacgacaaggatcaattaagaaggacgtttcccagagccgcaagacttgagtgaatctgtggggggaatttagaaaacatgtgttaaacctctagatttctttttttctaactaactgcaaaacagcaatttaataatttcctcttttaaggggaaaggggggagtcttggattttaaatcttcctaaagcagcacagcatctcttgaaaagaaagccatgaaagactactaagctaaggcgaataaaataaaattttcaaaaatcgagaacttcagtgtcctagtctgggtttccctgagcagatcctgagatgagggctcacatgcaagtggttcataaaggatgtgtttccgggggaagacaggtagggagtggagagacgcaggacagggcaggactgaaactcaggcagggtccctcagagcgtggcctcagcctgatgctgcaagggggatcagaggtgtgagttacgccaaggtactgttccatctccagcttaggaagctgagttttgttctcccrtaaacaccagtcattggttaagggccacttagggaggaataagtggtagaaagtggtcctaggcactttccacccaggggtgaagtgtagacagtggggcttcaatagcttaagggcagaagaagacccacggttctggctcttggagccaaacgaagactgaagccacagtgtgcatrtaaagggagtccaaggagcattgggtggggcattgaaattgtttgctacagtcggtttaccttyaactggtttccttcttgttctgaaggatatattacaagcatattgacaaaagtctttgaactcttgaggtgtttgtatgatattctgtgtcagttgcacatgggatgtttctaccagcatctgaattggggaattgacatatacagatgcccgtggaatttaacagagaatgtgaatgtacggctacagtccgtcaccatccagcttgccagggctgtcatttcatccttttgaggccaggcttacagacagtctgggcttccactgcccccatgctctgcctgtgatgtgtggtggcctctggcattgttgtaactcaggcacctgagcataactagtgagcctgtcctgctctcccaagcaagtctgtgtttaaaatcagttaggaatatgttgggctgcatgtaacagaaaagccaccttttttagcagctgatccttgtgagacttttatttttctttggtaataataaaataagaaatgggcatttcagggctagtatgcacctgtgtggtacccacaggaaccccattccttctgtctttcctctmagcctgtcttcataggggttttcatctccatactccaaggctgggctttccctgatggtgctttttggtttccgcttccaacactacagctgcattccaagcaagaaggagaaggacaaagggcaaaaggtctgcctccttttaaagagctttcctaaagctccacttgacattttccacatatatctcattggccagcaccatgccacaaggtggggtggcaaatgaattttctcagctgggcacattgctactctagacagagtcagagttgtgtttattgggaggaagggaagagtggccattgggaagcaccagcagagtcagcagggcagagacctgagagaggtagtttgtgagtgtgtatccctgagatacgtagcagaactggggaaggactgcccagtgagtctactcccttcagtatttgtcagatcytgctcaattataagatgatctttatctgtccgccttatctatcttcactgacgtgtatttcttattttcacaaaatgaagccatttcaacgatgttgtcaatgtgtttggatttctgtccttcaacagaggtgccacagctccatactaggtcaatccatgcaataaagaccaagttccagaacccctgtccttcagaccatttggtatatataatttccaggcccttcttcactgttctgtttatcactccctgtgctgtctctagtttggcatcttcctttttaaaatagaacccaggcttgaactgcaattcaaccagcccagcatagttattattgtcccgagtctaaacatgatatttctgttaatgtggtagccacagcacaattctatttattcttgaggcattccctcttttattttcttggtctttttgtgttatttggaagtgtaatcatgtcatttatacccttgctactcgaatatggtccatgaaccagcatggtgacgtcacctgggagtgtgttagaaatgcagaatctcaggccgcagccctccggggtcaggatatgcattttaacaagatcgttgggtatctgtatgaaaatgaaaaattgaaaccagggcgagatatccagggcctcagaggaaaatctcaaaatggtcagggaggtcccttcttagagatgagaaagtcactcagaggctgccatggcctaagactgagacaaagagaatatgtctgtatacaactaaagaaaaagagaaaaggttcgctgggccagagagtggctagagactcgattgtactcagacttgctgtattaccaacaggtaatgtacaggacagtcatgacctacacctggctaaatccagtagtcatttttcagtcttctttctggacccgtcagcatctattagtacaaataacgactacktctgttattattattattattattattattattattattattattatactttaagttctagggtacatgtgcacaacgtgcaggtttgttacataggtatacatgtgccatgttggtttgctgcacccattaactcatcatttacattagatatttctcctaatgctgtccctccccttgccyccaaccccacgacaggcccccatgtgtgatgttccccttcttgtgtccaagtgttctcattgttcaattcccacctatgagtgagaacatggggtgtttggttttctatccttgtgatagtttgctcagaatgatggtttccagcttcatccatgtccctgcaaaggacatgaactcatccctttttatggctacatagtattccatggtgtatatgtgccacattttcttaatctagtctattattgatggacatttgggttggttccaagtttttgctrttggaaatagtgctgcaataaacatacgtgtgcatgttctttatagcagcatgatttataatcctttgggtatacacccaataatgggatggctgggtcaaatggtgtttctagttctagatccttgaggaatcaccacactgtcttccacaatggttgaactagttgacagtcccaccaacagtgtaaaagcattcctatttctccacatcctctccagcatctgtggtttcctgactttttaatgatygccattctaactggtgtgagatgatatcttattgtggttttgatttgcatttctctgatggccagtgatgatgagcattttttcatgtgtcttttggctgcataaatgtcttcttttgagaagtgtctgttcatatcctttgcccacttttggatggcattgtttgttttttttcttgtacatttgtttaagttctttgtagattctggatattagccctttgtcagatgggtagattgcaaaaattttctcccattttgtaggttgcctgttcactctgatggtagtttcctttgctgtgcagaagctctttagtttaattagatcccatttgtcaattttggcttttgttgccattgcttttggtgttttagacatgaagtccttgcctatgcctatgtcctgaatgatattgyctaggttttmttctagggtttttatggttttaggtctaacatctaagtttttaatctatcttgaattaatttttgtataagrtgtaaggaagagatcccgttttccatcatatgaatatgccacaatatgttttctccattatcctgatgatggacattgaagttgtttctggttttatcttttgtgaataaggatactaagaacatttttataccagttttcgtgtgcatgttttttttcatttattgagtaaatgctagtgagtgtaggtgctggctcaaagggtcactgtttagctttattagaaactgccaaatagcttttcaaagtggttctgccttttacaccctcaccagcaatgtataagagtttgagttggtccccatccttgtatattcagtattgtcagtcattttwattttagccattctggtgtrtaattgtgtttctttgtgatttagagctgcatctcccatatgactaataaacacgttttcacgtgcccctcagccattggracacttattttagcctgttcaagtcttctgcactcccttcttctggggatacttttctyctcctgtgctgtggtacactcctcaccccaattcttctcactcgccactccttttctgcttcctttgttggggtctccttatcttgccaacctttcaacattggagagcctcagggtgcggtcctgagaatgcttttcttctgtgtatacgcattccctggatgaactggtcaagtctcataacttcatatcatggacatgctgacaactcccaaattttcccctccagcccagagctcactcctgaactccagcgttgggtaccaaattgcctgtttggcctctccacttgctgtctaacacatttctcacacttaagatgtccaaaatgagttcctgatcctcctgacacctgttccatttgtaggaaacagtaactccatccttcttggctctcccttttctctcatacaccacatctatttctcaaacaccctgttggctgatcctacagagtatctcataatccagccagttctcaccatcaccattggttccatcttggtccaagtcaccatcgtcttttgcctcattattgattggcaatagccttcttcataattggtttccgtgcttccacctttacctcttacactcctcctcttacactcctttgctcagaagtctccagtggcttctcatctcattgtaaagcttagttttttataatacctctaaggccctagaagatctgaccccgttgctgcctctctgaacatgtgtcctgtcactttcttccttgtagcctcagtggcctccttctgttccttgaaacacactaagcttatccctgcctcagggcgttgacactggctcttcccttaaataggcacatagcccactccccatttccttcttgtctgtgcttaaatgtcacctgattagaaatatcctactactccaaacaccctatctgtcctctttatcttgcttttctctatagaacctatgaccatctggcatactatttttttgttttgttttcttgaaacagagtctccctctgtcacccagactggagtgcagtggcatgatcttggctcactgcaacctccgcctccctggttcaagcaattctcctcctcaacctcccaagtagctgggattataggtgcatgctaccatgctcagctaattttttgtctttttagtagagatggggtttcaccatgttggctaggctggtctcgaattcctggcctcaagtgatcctccctccttggcctcccaaagtgctgggatgacaggtgtgagccactgcacctagccggacatactatttgtttgttgctggttgtcttagtcctcctacyggaattaggttaggtttctacatataatatgcaatgacttttttgagacaaggtctcactctgttgcccaggatagagtgcagtgacatgatcttggctcactgcaacctccacctcccaggctcaagcgatcctcccagcctccggagtagttgggaatacaggcatgcaccaccacacctggstaatttttgtattttctgtagagatgggggttttgccatgttgcccaggctggtcttgaactcytgagctcaagtgatccacccacctcagcctcccaaagtgctggrgattacagagtgagccaccacacccrgcctggaatgactttttattcattgattcatacctagtaactgcagcagtgcctggatgtgtggtaggatctcaatctttgttgaataaactaatggatggtgggcaaataaatggatagaagatgggtatatctatctttctctgtactttatgagcactctttcaattattgttttatattacaccagtaatttttaagtagtgttaaaaactagtaaacaatgtaggggtttggagaaaaatgctaattccttatctcccrgaaaagggaaaccatcaggaatcagaaatggagaaatgcttcccccacctggtgattgcatcttgctgtatgggatcaggcctgaaaagtgagttaagtctgttggtgctggaactcatcactgaggarcagcctatgtctgtgccttcaggggtgacagacagtggaccaaggccatgcctgcatattcctccctggacccctcattcaaagccagaatctctttcctgccagagcagtcctttgtccacrtgggtttctgcagtagcccaagtttgcaggcccttgatagggctggagtgtgagctgtaatcctatgggcttgaaataatctctgctatgggctctttaaaataaccccaagtaacactcatgtcttatttaggtatccccagaagcaaaccctgagataagaattcaagtgtaaagtacctgtagtttgtttgggaggtgaagatagggggatatattaggaagtgagacagagaaaagaaaacaggagaaaaggacagagtgtcaagccagccacaactatgggcagctgggcttactcccactggggaaccctgggtccacagagcaagctccttggggttcttctgcctgcgtggtgaggagtctggggcctttatccacctgctcccagcagctgttgattgagggctgctcctgaaggcattaagatcttgacacttctggcctgttgtttgcaggggcagagcagttttatgacaagaaaaagtcctcaggtgaaaaaatgcaggtgtcagcaggtggagacacagggcaggggatctggaggaacatcagtggggtctgcgacaacctgtgaccacctcacagacaaggtgacttctggcttctcagtgmctcagccacacttctctttttcactcactcttctttctggtcctcactaagacaaaatacagaatacagagcagcagttcacgggctatagcatttraggagattaaatacaggcctccaaccacacaggccatctggaagctttggcctccagatgaggacataacgaggtcatctctgctttcagggagctctcagagtctcaggaacagatgtacatggtccatcagagtgtggctcagggcccagggtgggttggggaaaaggtgagttatttagcattggaggagcctgtttgtagccatggctgccaacatgcatgagccacttagaagggcttagggtggtgagggtacaggtctacctgtgaagctgagtgatagtcacrgtaattacagtcacctactatagcctcacaatgagccattataaaaatgaggaaactggggctccagaaagatttctcagccccaggacggtgcagccaggaaatatcatagctgggatttgagcccagcttgtctggacactgagcctgtgttttgcacactatgcacacacttctcccagatgaagatttgccttcatccaaggggaatgtctgtgtgagacagtggcagcctctgatgggttcctgccgattggcaaggtggttagagctgtgtattgagaggtcttctccaaggtatcagttttyctctgggagggttaaagaaggaccttgcaaagcccatggcctttgaatagagagctctgttctgtttgcagtgactcccctcaaaaggcagaatgcaattctctaaagggaaaaaaaaatgaggtggctgctctctggggttaagcagagaaaaccgtcaggcaggagaggtggggctgtatttgagagggtgggagtggcccaggagacctcacggtacagtcagctgcaggagaggagctgctaaccctcatcttaagaatatcactctcttgacaatcacagttgggaaatgtgtaatctcagggtgcctccttgcccgggcatcttcattataaaagcttagtctttctaaatgcagccaagctctcctctgacaagagatgtgagaattccgttgacactcactgaccacctagaaaccagagacccagaaacccaaaggtgggtcacatggtcgccctgtccctggggaatgcacaggaaaagagctctgcctcccggaaggttccaggtgttggggtaaatagagatcctgctgctgcctctactcccttactggtctccctggggacrtatttgaacatattttactcataaattctcatctcagggtctgtttctaaccagacctaaaacagacaggtcccccccttttttaatcagtaactttggtttattacagcagaaacttcccaaattactgatctgaccaattagatatgttttaatttttttatgaccggaatcttttccttcaaatgaacctgtttggattctcttatctgtgcaatacaacctaatgtaagtctactttgtaagtatttgttctgagattatttgttctgaaggaggcccaatccagttcagttaaatctgaagtttttgatcaattgggttgctgagattacaactttctttttcattaactattagtacttaaaatattgacatgctaagtttttagtcttctcttttttgacctataaaaaaggtcaattatatcttaaaagtttcaccttctatttggctattgtgtatcattctttaaatatctggctgggttcaacttgctaagattttatttagtatatttgtatctatagtcataaacaagatttcyctgtaatttyctttcttgtcaggttttggtgtcagatttctgctagtgtttgcaaaaataagcagraagcttgcacttttctctgttctctgaagrcatacaaccaacatagttgcaacagcaggcagtgagagctgacccttactgagascttgtttatgtgccagaggctgctcaacactttttattaacgtgtttaaccctcacagcaacccagtgaggtatgtgcagttaccatctcagttttcctgatgaggaaaccatggcttagcaagcttaaggaggtgactcaacttccttagtgagtggtggggctgggattcaggcacaggcaggctggtacttaatctctctcctacaaataccagcttccttggtgagtattggggctggggttcaggsacaggcaggctgactccagtgtgctctaatgcatcttctttgcataaagaggcttatttacatgtcttttggggtatgctggctgctcacgtggctttgtagacattaccctctggagtgccaggtgctttgtgaattagatctttcttattacatcacggccagttttttgtggaggggggcaatgggcaaggaagcattgatgaattttctgagacagctgcgatttgtctaaacaaggcttttccttcagtacccaaggattctggcacacagacccagctccccaccagcctcccctggaatgagctttcctgaggtgcccgcgtgtctccactccaggtcctggaaagctggcagcagcctcactcttgggttttcctctctggaattaatttgtccccaagtgaactcaaataaaaggaagagcacctatgagagctttgcctttgactggggctgggaaggtggaaatagcatggtctatcctgttttctcatttgcccgttgagcactgaacgactggaagtagagtatgatgtgaagtcttaccctttgtgagtcagggggcttgggctgtctgcacacactgtctccaactccaccaccaccatccaactcaggcccaatatcactgggaaaaacccagatcccctacagaaatacaacaccggtgacttgctggatgctggtggctttgtgctattggcatggtgggtctgaaactcttgtagacaccaaagaaattggtaggttatggaatgattgattatatcctgtgtcagctggaatcctgcgacatgttctagtttcctagtgtgcagagtacaatgtgggcaatgctgggttgtagaacatctgtgattttcatgggataaaagcccttatttttgttttgttttattttaagtcaaaagcaatttctaccagtaagagactgaatgaataacaggaagccccttgtttgcatggttcagaactaggcattgcaaagataaccatttactctgatttcagaggtctaaaggtgttagttcccctcttagaagtaccaaacttacaaatgggaaagtggatgcttagaatggcatgaatgttggctggcttgatcatgagtgggatcacgatggcattcactctttcattcagcaaagttatgtgttaacaggtattaagtataccgttatcatttttccttactttagaagataagccaaaaaatttgaccttaatgaaaatagaggatttttaatggagatcagaattttcacttataaaagtaccatttacacatttcgtcactgctgacagtcattagctagtggatagatccaagctttaaatctgaatcttgtcayaggaggatggaagctcaagttgttaaaggcctaaaaggttgcatgttacatatagaacaaggccctgggaaaggaaatggtctgttgaaagtcacaaggccaaatggcataccaggtttttggtccttgtttaagaaaaccaaatgtaggttcagaatagtttcttctttcttccacgtctctgaaagtccagcttcgtgtgggagagctctgaggccctctcccagccctcgtttttcagctcggggttaccacgtgtattccgtgaaatgctctacctgctttctgtatcggctttctagccagttgcagtgtacaatattagttttggctttgggaaatgaggtttctttgacttggctggaagtatacagcaaccattttatttttcttgtgcctcatgaattaatagggcagtgagaggaaagagcatgcatactgagcatctgagcttttttaaagcaaygattcacccagctttctagtataaaaaacttcctctggcccaccccgagcaaaccctcattcactgctcagtcctcccatttgttcatctggaaagaaggaatgttctagtggggccaggccccatgtggtatcttccttttctgaagtcatccattcattctcttcctggtggggacttaaggttggaggcagcaaaaagtggaaagactggtagatagtctgtcagctctgtggggtgggtgtgccatttggggggaaatgaaaccagaggaagtttggctttgcagagtgaggacccaggcaagttcattttttacactctggttccatctccttccccctgcacacatgagtcagctcccaggaggaccccgtgtccttgactcttccttgctgtctcttcaagctatcaatatgccctctctctatcttctccctctggaattctccctttccgtctcagttggactatctggactttttgattctgcttcttcccaaagtgctcttttcagtccattgtttttcctgagatgtaatgactcaagggtaaatggtacctgtcagttgcaacgcctgaaaccatagatgcataggtgcaggtggtttatttgagtagcgccccagaaagtaagaaagaaggaagaaaaggagggtatgtctttgaggtcactgccattggtgctaagacttttttgagaagcatatagaaagtcacctagaaatgcttacctataggacaggagactggagcactcacgccccagctccaatcccaggttgttaagggccacctccaaggaatggattgtcctgccctggccaggggtgtcattgagtttgggtgccctcagaatgctactgaagatggtacaaagctgaaatcatcagagttgggccagaaagaagtgacacagaacatctaaggcatatcataaaccatttctgaccctgatctcggaacaggatcccagaacagttcaacctgtaattgctttctgacatttgagcaaaagcatcagtagctcttctcatgaccacaatcagtttactaggatttttccataggctcaaagaaaagacagtctatgttctaagtacagatgaagaagtaaaagtttgtgttctggaggggtggggcttcaatctagaccttgcctctttctgatcactgttcttgacactggatctaaattaagaaaaacattaaatctaaaaatgtctaaaaagttaggacatttaacctatactatacaagaagttatcagctaagcaaataaaatccagactttgaaaaaggtaaataaggaactgatttactttaatcacaagttccttctgcttacaaaatgattcatactgaaatttttaaaaaatttcttaacagagtttagtgcaattcacataaaaaatgtacttcagtaatttgcaaatatttacttaaggatttagtaatttagtaatgtttagtaattttttcaacaagttcttttctgtttaagtgggttctcagaagtggttgcaccttcagcaggcaaggaaaatatttatttgaagacgtttatgaaacacctcccttgtttttattatgtttgtgttcttcttatatttctttttatttgcagtaccctcaagtactttgaaggtttggggacagtaaataaaattgatggccattttttgtcatgcatcttctgaattggtatgtttttctgtgttcagaatgtcattcctcagcccccaggggacataagtacaaagtgaaatgaggcgatgtcaggatcacctgtgcacattctgcttctctccaggccctggcttctcttctttccggtagatgaacttgagcacatgatctcaccacttggagcctagtaaaatccatgctactgttctgcaattgttcttttattytttctctctactaatgttttcacctatggatgtcagttctacttctccttggrgctttaactaaaaaggaagaattgtctgtggcttcttagaaagtggtgtgtggacaggcaagggctgccctgcccttggctggcagcacaggctctgcaaagggggtgggtgagtgaccacatcatcatggctaccccttcccgagtgcttcctgtgggctaggcagggcccaggtagctcaaaggtgttcccatttgttcttcacagcagctctgaattcattagcataacaaaccacccccaaatctagtgggcttaatacagcaatcatttctatttgctcataactctaggggttagctaggcagtttttcagttctgggccaggctcggctgttcttggccaaccttactcatgtgtctgtggttagctgcaggtcagctggaacccaaatgttgtctggaacaaggggagtgatttagctagtggctctcatccccagcaggctggcccaggctcctgtagggttccaaaagagtgagtagaagttccaaggctttttgaaatctaggcctggaacagacagcatcatttctgctgcattctgttggtgagagcaagtcatgatttcagctcaaattcaaggtgggggaataaaatctacctcgtgatgggagtagctgcgaagtcaaaactgcaagggatgtagttaaagggagggttggagagtgggcgtttttgcaaactatctaccccaacctctgagcrgtaggtataattatcccagtggttctcaaccaagggtaattttgtctcctaagacacagttcacaacttttggagaaatttttggtttccacaactagttcagcgctattagcatctagtgggtatgccagggatgctgctaaatacccmacaatgcacaggacagctccccayacaacaargaattatccaacaatgcacaggacagctccccacacaacaaggaattatccaacaatgcacaggacagctccccacacaacaaggaattatccaacaatgcacaggacagctccccacacaacaaggaattatccaacaatgcacaggacagctccccacacaacaaggaattatccaacaatgcacaggacagctccccacacaacaaggaattatccaacaatgcacaggacagctccccacacaacaaggaattatccaacaatgcacaggacagctccccacacaacaaggaattatccaacaatgcacaggacagctccccacacaaccaagaattatccaacaatgcacaggacagctccccacacaacaaggaattatccaacaatgcacaggacagctccccacacaacaaggaattatccaacaatgcacaggacagctccccacacaaccaaggaattatccaacaatgcacaggacagctccccacacaaccaaaaattatccaacaatgcacaggacagctccccacacaacaaggaattatccaacaatgcacaggacagctccccacacaacaaggaattatccaacaatgcacaggacagctccccacacaacaaggaattatccaacaatgcacaggacagctccccacacaacaaggaattatccaacaatgcacaggacagctccccacacaacaaggaattatccaacaatgcacaggacagctccccacacaacaaggaattatccaacaatgcacaggacagctctccacacaacaargaattatccaacaatgcacaggacagctccccayacaacaargaattatccagccccaatgccaacagcattgaggctgagaaaccctggattatccctttttacacatgagatgagggtcttacaggtcttctaagtggtggagcctaggtttaatcccatttccgtactcttcagcactcactgtgctagtatccctctcaggcgtatgaatacgtcaagccacttcagcatgatggcgtttaagttttagcttgtctacaaagcagcacaatacagtggttaagagtagggttttgtcaccagactttctggcttaaatctgctcccatcccagcaccacttaatatgtgttgtaccttgggcaagttcaatgatgtctctgccttggccttagttttcttcttcttttttttaatgctgcctcaattacagaacagatgcctaagttttcttatctgtgagactgagctaagaataatgttgacctyataaatttgttgcaaagattaaattagacattcatgtaaagcacttaggaccatacctgagacatagtagcctttagttatttttgtctaattcttctttccctgatacagtgcccaccataaatccccagtcatggtgctgacctggcatgtgaarctggctgggaggaaagagatttttctctcccagcaaagtagtaaacaggctctctcaagcattcatccatctggggagcttggcacacaggacagatmctttctcttaagtgtcccaaggccaaccctgaaccwtggaagccttcatttaccatcastttttctttcaaaacttctgcaagggcataaaaatgggggactaaatagggaccaaataagtgagtccatgctttggaaatgatgacctgagagtgtgaggaaggggagagccaggagctgagtggcagcattgcgggagggctcttcctcccttggttggcagatgggcgggtgtgactgaggctcaccatgggtggactgagcagacgcctgccctcacacacaaccccatgctttcagaagaaggcgtcagacctccttgtatgggaacatcatcaccttcacgctttgtctttaatttgagaagcttatgtggaaggaaacagcacattcttgtgagaagataggttttggaaagtccggagtagacagcatgaatccagggtttctaaagtataccctctccatgcttgctactcaggaagcagaggcaggagaatcgcttgaacccaagaggcggaagttgcagtgagccaagatagcgccactgcactccagcctgggtgacaagcgcgaaactctgtgaaactttcattctgacagtaggaagaggaaaagactctggctgactccttgtgatagagcaaaccaagttgagtgttgtatttacttttctggatttattttcacaaatattcagctcagaatgtgccagggaggggaggaacacaggagctgtattggccacagccatgtgcgtcatcccaggggacacttatgtgagccctgtggagcaggaattgttattcccatcttacaggggtgacagcttagctcagaaagcttgcagtttgctccacgttacaaagctagtaagtagcagagctgagattggaacccycgtccgtctaatggcaatgcttcctcttttgctattctgcctcacaattaaatggagtaggacctgatccccgacatcgagaaactgacggtgttgtcaagaaataaatatcccccccccacacacataaatagagaacaataaaagataacgtcrgaggatgaacccacgagcgtggtttgtgtgggaggatgtcttgatcctgggctcgcagggctgtccgctgaacatgacagttatcctggcttcacagtaacctttcagaggtgctctgagtcctgaacatcggagatagattctttatctggggagtgactacataatttaaccatttgttattttttattttatcagactgggatcctttaggagctgaaagggacagtatgaataattagccctaggacaacaggcagaaaccgggactgccccaggcagttaagatgcatggtgaccccacttaatggccaaaatacaaggaaggcttggtgtctccgcagcttcctgaagagggaatgaggggcaaggctctggcctcgcagccagctgagggagcgcttctctttccactgtctgattctgggtctctgcttcctcatctggatagcagccctaacacccactgtattagttatctgttgctgtgtcacaaatcacatgtcaaaacctagtagcttaaaacaacattgattagccctcatagygggttggggattccagagtggytctggctcgaggtctcttatgagactgcagycaggatgttggctggggatgcagttgtctgaaggctccactggaggatctgcttcccttgtggcccctcgcttggctggctgttggccacaggccacagagcactcaggaccaaggactggagtggtggaaccctcgtccttcattaacacaagcagggcaggaggatgagggtttgtacctgctgttggcaggggggcctcagttcttcagttcttctccatatgggtccctccaacaggtagctcaagtgttccaccatgtagtgactgactttccccaatgaaaccatccaggagagcaagaactgggcagaagctcgcctttccatgacctctcagaagtcacatagcatcacttctgccacattctgtttttcaaaatcgagccactaagtctggcctacattcaaggggaggagaatcatagctcactgtaaccttgaactcttgggctcaagtaatccttccacctcagcctctggagtagctgggactatagtcacgtgccaccacgtcctgctcattttttaatttttcgtagagatggtgtcttgctgtgttgcccaggctggcctcaaactcctggcctcaagtgaccctcccacctgagcctctcacagtgctaggattataggtgtgagccagtgcaccttgcctaggcttcacctttcaaagggaggagtgtcaaataatttgtgaacatattttaaaaccactgtacttagggtcaatgttctacacttataagttaagtaccatgtgtaaagtgcctgcagcagtacctggcacccattaaaaacagaatcttggccctccagagtccagcagctgcacttctgaatgctggtgggcacggacggggtttgatgtccagtaagcctgagcagccctgcaaatacagatgagcccaagtcacctgtacagttggggcctgaggaagttaggtcagttctgaggctcccccagatgtgggacactcctcacggacaagttcagtgttgtatttacttttctggatttattttcacaaatattcagctyagaatgtgccagggaggggaggaacatacctcctatgcggcaggagctgtattgggcacagccacgagtgtcatcccagggaactcatgtgagccctgtggagcaggctctgagcctcccccagatgtgggacactcctcaagggtttccaggtgaccacagagggtcccacctcagtgtggacatttccatgtgtcctcctgaaaccctctggtgagcatccccacccaccctttggtgtctggagccatggtggctggttgtccttcccacttaggggaaccaggcctcagaactacagctcagaggcctactctgtgggctgtccttttttctagggccttgattaaatttgcttctctgaacactgtgaggtatctgtacttgttttaactcttctagtgacagcaatagaaaacctaaattggtgtaggtaaaagagaatgtagggttttgcaaactgaaagtacctggggttggcttcgaccacagcttctggttggacctctggaagttgtcatagtgtctctttctctctctccatctgtcagcttctcttcctccttttggcttcgttctcaaacaggctctctgtcccttcagggtggcaaaatggttgccaggctacagtaaataaataatctcatttcctaaaagttcttgcaaaaatgtcatagagtctgattggtccaattgagttaagcctgggtcgcatgcccacctcctaacgggttgggagtgaggtggagtggggaggggatggctccccagagggaagggtagatggatgtgggtggcaagaaacatgtctgccatggtattgttatcctcatttaccaatgaagtgttggcactcagagcaggcaagtagcttggccagagtctcacagataatagcaggtgcagaccgtcatcctcctgccccactagtgttgatgaaggacgagggtctcacctttccagtccttggtcctgagtgctctgtggccatcttccacttaaagctctaggacagaccagcagctctggaagtgactggattaaaaccccaccaactgaagacagtggcgtgggatgatggctcgctgatgggagacagaatttctgtctctcctstcagaagccctttgaagaactcagctgtctggacaacaaaagtgggagcttttgttgtctagaagttcatgtgacctttcctttcaccttttagtgctgcctaagtgtaagatttaagcacagcattcttttcccatgtgtcatttttcagcagttaaaaatccatcagctgaggccacacaaagttggcactccctcctccaccaaccctcagctaaaaggttcagtggaagggactgatgctgtctccagatgcagactggggccatggattgagccacagagggaggagggaggagggtctcaaattaaaaagacaagaaacaaacaatctccccaaataagcagaaagtctgagcgtggaactgagctggttggagctggggagsgggtgcgggaggtactttcagcactccctcgtgagatcatggaacagggcaggaaatctgaacctgctgccaaagaaaactcgctttgccttttgtaaaaagcctgtcgagctttcttcacaagggagctgctggtggggactcacaaatgggcatgctgcctgccagcaagggtctcctggccagccctaaaggcccgggctgctctgcttacagccacacggctgtttctragctgaggatgaccctccaggtggctgagattccctccaatcttttwatttctggttgggaaaccctacacagaccagtgtctgtctcacggtttaaaaggctgcatgcaaaacatttcctcccctggtagaaatgctgcattgagccacagccctccctctgcagcctgtgcagtgtcaaggggacagtggctgcatgatgatgtgcctagcagggtgtcccccatcaggacagtcacaggggtggaacaaatgcaggagccatggagccaaactgaactgggttggaatcccagtttcagccacttaatagttacatggatattgscaagtagcctgagttctcagaggcttgatatcctcatctgtaaggtgggaagtataagacctacctcacggtgtcagtgttaaataagacagggcaaaatgatgaaggtactctgtaaatgtatgtccattccttcctcctcctctgggttccttttcagcacttcctcaccacagcaccattcttaagttttctagccycatttattttagaaggggaactggaggcagcttggagggaggtaacatctggatgtcgcagtgacagctggtggctggtgaggagtccacaggtcaggggcaacgggccctgcagacttctcagcatcccctgctcagaaggggctctcagagtccatgggctcagcaggctgattcttcccctctcctatgagaccatcctccatgtgggtcccatccaggaagctgcttccctcccaagggaaggaagccaccagtgtttctagaatctacatcagtgccactcaaagcgtggtctcctgaccactagcatccacaccagctggggcctggtcagaaaaacaaccgtgggctcctccccagacctattgagtcaaactctgggggtagtcccagcagtctgtgttttagcaagcctccatgactcgaatgtgtgccacagttggagagccactgtgctacgggcaggttatcccagagcaaaggaaggaaaacctcctctgcacaatgcactctgaaggccccactgaatacgggcatctgtgaggcagcatgggacctgatcactctaccatatatagctgttgtgtgaccttggaaagttccctcaccctctctgggtctctgtgtcctcatctgcaaaatggaacaatcataatactggattgaggatgagaagcatcaatctgttcatcctagcaaaatgtttagcaaaatgccacgtgttcagagctcaggacaggttagctccatcctgttaatgttgaggcagcccacccaggttaagggtctcattctgagagtggctttggacagcttgagaatctacaactgtaggtgacagagcaaagaaaactcttgaaaagtttctcttagagcctaatagcaataaccattaccatggtggcagccaccagagtaactcattatatcattccagcaacgctgtgggttaggagttactatctgtatttttacagggaggtacttaaggcaccacttgataagtggtagagccaagtcagtttgaaaaaaacataatcattgtgcaatgacaatttgagacattttcagggtcccagttccatcccctaggaatctgtaaagaggagagtggcttcaacctgctgttcagggcctctgccctcattccctggaggctggtttggacagtgtgagaggcatccttcccaaagcagacaaagagaaaacacatgggaatggtaattaaatgagtccatgtttaagggrcacttaagtggattaaaatcaatatgtagtcacataagtctgctaagccatccttaatgtttggcgggtggatttctttgtttaaaaaatcctggtttgcttgaaactggctgccccattgaagcatgagataggacgagagattcccaggacctggaagaccacttgctcagagtctgaaatgtttacactgcctctgactggcatctctataccagaaaggagaagagggggactagatgtttttgtgtgrtagtctctttcctgctatcttaggctgagttccctaaaacaaaatcctgagatgagacatcatgtaaaaataatttgttaggaagtgttctcaggggaatgggaagtagagcttcaaagggaaggaggccaaacaaggatgtgatatcmagcaaagtccccaggagacagaaagaaggtgggtgactttggcaccgtctaaagtataggtcacatctcactgtcccaatcagggacaaaagagcatggctgaggattcccccaaggggatgtgaattctcaagcacttccatctctccatgttcatgcaaagaaggtgccaggagccccgtggccatcctcccacaaaagacacacaggtggtggcatctggggggtcaatgtgcatggttgtgcatggtagagacccctggatggagctccatgatgtgggatttacatcccgcccatactctgctgtgagagagatggtatgcagccagtccagccatctgaagcagaacgraaaaatggtatggaaagcaaggcacctgaaaaaattttcaaagggagaaaaagaatgagcaaaactatcctgtagaggagagagacattgmaaatgacatatacagacacagaaaaggttgctcagtcaacaacttctgcaggctcaaagcatgggaagtaatcagtaaatggccaatttatctctccctcacagccaagccaactcctaacataattggaagtttaatatattccaacaagttcagracaagcatactagatcttaaggcaatctcatggccctgcagctcatcctttttttcaaagaaattaattttcaaaaaatgactctattgagattgaatttagatcttatccattgccataaccaaaagcaacccttactatttgtgtgtgcaagtcgttttaaacagctggcccattaactgaaaaatgtcaaaaacaaatataggagaaaagtaagataatcttggaaggcaaagcctgtctccctatattgttcttaaaaatacaaaagggacacataacttcatcatttaattatattaggaggtccgtcattcagtgctcttgtaaaactgtcttgcccttgttctaattgcgtattgatcaccgaggttcttggcatcgggcttttctttgatgtgtgcatgatcagaacacactaagakacagcctgtgtgctccttcctgtcctcgtgggcatttcctaaagcttcagccctaagctggtatatgtttctctgttacatcaactgccaaggcaattactttacatctgatatttaatggaaaagcttctgaggacagggctatactcacatacctccacacctggcacagtagatgagctcactatctgttgaataagttcgtgacagarcagaagttctactgcagccacaaaggcctattcacagtctttaagcctgatgaagttctgaataagtaaacccttagctacatcaggcagtttatgaatggtgttttttgttactgtcatttgtaatagcttttgacctatgtgtttgtattagtccgttttcacactgctataacgaactacccgagactgggcaatttatgaagaaagaggtttaactgattgacagttccacaggcttcacaggaagcacgactaggaggcctcaggaaacttacaatcacggcagaaggtgaacggaagcaagaaccttcttcacatggtggcaggagagaagggggctggtgggggagtgccacacacttttaaaccttcagatctcatgagaactcactcactatcacaagaacaataaggggaaaatccacctccatgatccagtcaccttccaccagatccctccttaaattcaacatgagatttgggtagggacacaaatccagaccatatcagtgtgcaaatgatgagctaattttcccactaaagtaagcactggtatggtacatagtatgactatggtagtccagtattggattccataatttaaataactagtagactttttagttagttgaaaggtaaaacaatggtaataacaatgagctgtaaaatacgacctgtggggtgggaatggggacagccaatgcttctctggtaaagggaggccagtttcagcccctggtgcaacagcacccccatgcattcatcatgtgagatgataagtgtctttccttgaaccagttcttcttcttcctcctaggctgggaacttctccttggagacagcaggaactgtgttacaaaggcatatggcccaacaaaggacactgaggctactcagtaattattaaatgagagcatgaacaaaggaatgtaagatgtaacagaaaacatacgtgtctcacacatgakaattattgtgtagaagctgtttcccatttgagacaaaataagaaacacttgttgaacgagtagatgggcttcctctgggagcacagcaggtaggcacccatgttggagccagccatggtctgcagagttcatttctctgagtccctgccccagaggcacatgacataggaggctccagacaactgactyaaagacagagaggaccataataccagggttcctcagtcctcaccagcataagaatcccagagaaggcattttttttctyacatactctaggtctcaatctcttaacttyaaaaatggcagtggctacattagctcttgggaccagtgtttcaaaggctagtgtagaacacttgcctcagatgattcaagatccaggtttcctgactctgcttctgctgtaaagaatcccactctggaggctggggcctgcaatctgcatctttaacaagcccaccagagaatttcaatgcagtttcacttttgagggtttttaacttgattgtccatcagaaccacctggggagctttcagcaaatgcatgccgacgccacatgcattrattctgcggccacacagaggggcctgcatctgggtcttttttacaaagcttttcataggattgtcatcgtcacctttccagcactgttatgcaaattggagagactcatgccaaggtgaagggcttggtgagagcagccaggtcttctatgcagtgatcagcctgcacagctgggygtggcatctctggctcccaggtggttccagtgcacacccccagttaagaaccaatgaagaatgttgcttgttaacaacctttgaaggctttttagcaaaaacaaagtgtcatattgggattcatctgtggcagtttgcagaacatatcaggggagagagstgtgtgcaaggcatccaccaggaggccgttttgtgctggtctaggtaagaggagattggagctgacctgttgaagcaacaaagagaaagggaggaaggatcatcctagaagtggataccagttctttaagaagagtcctgagatgtacccaggagtagcaaagtggatgtgccaacccgagggaagagattagtaagctgctgccccctgagacagggctccatgagctgacaggttgatctgtggagatacactctgaaggtgctagactaggaagaggtcctctcaggccccatcccttcatcttcagccaaaggaagttcagcagtagctgcccctggcctctgttctcagtccacagctccaccagcccagttgcttgtgcagagggagaggatgtgggagagatgctgtcaacaccctccatgtcccctccacccaccctggaggccgcctatgacagttcgccataggcgaactgtttctctggttaggaactttctctggctacaggagtgtgctgcacccgagtcaggagggctggaagtgcrggatagttaacgtccccagtacagttttctaccaaggagagaccggtgagatggatagatgccccagctktctcacccgttgatgacacacttcactaccctctcctggagctccctgagatcactgcccatacaaactaattgcaccccaatgcttgtcccaaagtctgctcagataagggccgtgtgaatagacaggtcttcagttccagaaaagtgtatactcacacaggaaatatctctcaaataacatgggcagtgtatatgttatttttctggagggcagagggcatcatgaggaaggtggtcttcgtggggtgaatatcatgtttcctccagggagggctcagtgacatggagcagtgcttctcaaatgtccatgttcrcagaggttagcttctaactcatcaggtctagggtggggcctgagaatctgcatttctaacagtgagcatgtccagggaccacactttgagtagcaagaccttsacagcttcaagttgcaaaccagttttgaatgagcagagtagaagggggtttgyaggtgagaaggaactcttcaccatgagtacatttctatgaagatttctggccaggattttagtaagtacctgagccccttcaaacatttgactccygcataaccttttcatccaaacaccattcatgagttgtttttatgccatgaggttaaattctttcctatcatttcaggggaggtccccacttgttgagttttccgtcagcctataaggcaaaggaaaagagtgatagaaaataaaaataacttgattcattagatggaattcaacttgaattcttagtttgttgactaagaatttgcagcctcygaggaaattttttttaattgaagaaaaactaatttttaaaaatctgaaaataattcgtttgtgactatttaacagaaggaaaaacttcctgagtgagcatcaaatactttaattacttcttaggcttcagaagggatggcttgctagtctttgtactttgggctttctgttacgactggttgacttagatttatttgtttatttagcttcttaatttcatatcctgtggtcctgaagaggacaatcaccaggatttaggggagtgtttttgtctttattcactttggaaaaatgtaaagattagtcctaagcagggttgattcaccgcactacagagggacacgttaggaacgagacagcttattcaagtgcttttgaatttgtattggttttttaaaatgtaagattatttttacttattttaaatctttcaaagcacttttttcctcagggccaagtggactctttgggaggagacctcgccgtctccatttgatcacataattgcttctgatgccagccagtctgcaactgccagtgattggcacagggttatttcatgtgcacttcaatcaaatttcttttcttgcctttttttttttttttttttttttttaagaaaaaatctcactgtggcacccaggctggagtgcagtggtgcaatcatatctcactgcaaccttcaattcctgggcctgtgatcttcccacctcaactcccaagtagctgggaccacaggtgtgtgccaccacctctggctaatttttatttttgttgagacagggtcttactatgttgtctaggctggccttgaactcctggcctcaagtgaacctcctgccttggcctcccaaaatgccgggattacaggtgtgagccatccatacctggcctccaaatttcactacctaacttgggagaggaattttgcattagcagttacatggttcatctgcctcaaacatttgttttgactctagcttttgcttgtttcacttttttaagcttggaaagaacaaacttagaatagtgtaggccttggcttccacatggatgttttgacaaaatttcaaggaagcaactggctttgtagtgctttctttgtcctgcttctccaaattccccaagtgcatgggtaatcacctctggttccctcggagtgttcgtggccagctccttcccagccttgccagcccattgtctgcatttggcatctgcgctggagtcactgtgtgctccagttccttaaggatacttttagtttatctgatctgtgctccacacctcttcagactccatttccatgaatgttttgggagaggtgaggaagaaaccttttctgctcattgttgcgcgttccccaccccaggccccgtctgatctattcttacatcacaactaaaaatattcttaaaaatgtgaatcagatggtatgactcccctgctcagaaccctccaktgccttccctctgtacttggaaccaagtccaaactcctgatgagcagcagggctccgcatggcctggcctttcatctgttgcttcccaaacgtgtggcctctggttggtttctggaactcaccatgcctttccccacacatgctggttcttctgccagggacactcttcactctcccttcatgtgcttagccccttcttagcttgcaggtctcagctaaatggtacctcctcaaaagggccttccctccacctataccaggtataatgctgtttgcctccttcagaatgcctctcacaggctgtgattactttaaacagattcgttgagatatagttcagatgccatgcaattaacccttttaatgtatacaattcagtgggtttgagtatattttcagagttgtgcatctattgccagagtcaattttagaacatttcattacctcaaaaagaaccaccatacttcttagctgtcgtaccccttcccctatttccaccagccaaaggcaaccagaaatctactttctttctctctagatttgcctattctggacattgtgtataagtggaatcatttatatgaaatggagccagtcctttgtgactggcttctgtcacttagcgtaatgttttcagagttcatttgtttgtggcatatgtcatacttcattctttttcatggctgaataatattccattgtatggatataccacattgtgtttattcattcatcagttgctggacattagattgtttccagtttttggctattacaaattatgctgctatcaatatttgtgtacacatttttgtgtgggctcatgtttttatttctcttgggtacatacctaagagtgggattgctgggttacatggtaacttatatttcactgttaagaaactgccaggctgcttttcaaagccactatactattttacattcccatcagtagtatgtaatggttccagtttgtccacatctagtccagcatttgttattgtttgtctttttgattgtagccattctaatgagtaggaagtagcatctytttgtggttttgatttagatttccctgaaggttaatgatgttgagcatcttttcatgtgattattggccatctgtatgtattttttggaaaaactattcagatcctttacccatttgatagttaggttacttatctttttattattgagctgcaagactttttaaaaatgtatcctaaagttcctattagacatatgatttaaaatattctcatcctgtggattttttcactttcttaatggtgtcctttgaaacacatgagttttaaattttgatgatatccagattatccagttttttttgctacttttgtaattattattattatttttattattattatttgaggcagagtctcgatgtgtcacccaggatgaaatgcagtagtgcgatctcggctcactgcaatctccgcctgctgggttcaattgatccttccacctcagcctcccaagtagctggggctacagatgtgtgctactacaactgggctaatttttgtgtttttagtagagacagggttttgttatgttggccaggctggtcacaaactcctggccccaagtgatccacctgccttggcctcccaaggtgctgggattacaggcatgagacactgtgccctgccagttatttttcatttccttttgaattttttgtttttgccatctccccgtgtaggctgcatgtgctgcgacggcagcgctgtgtttgccattgtagccccatcccctagaacagggcgtgatatagggcagcggtcagtgaatagctcttcagtgagttagtaaacaaagtggttctcaaaatgtaaaattcttccttgactcactaagcaaccttctgattgcaactgctttccctttttggsctccaagacaggaattctctggccctgctgacaggagccccatgttgcacagggcaactatgtcactcattggaaattaacatgtctgccctctgacttcagtatttctcccaggagcagaggatggaagttcttcacagctggatctgctgtatcattcagaagctggcttcagagcctgtgtagctggaagcctcgggctcacatcaaggaagggaatgccactcagcctctgggcacacagctgcaacttcccctggtgctgtctctcttggtgctaccctatactagccttgtccygaaacatctaccccattcatttcaccctctctgctactatgtcactgcctctcccatcacagtattccacccaaatgaggcaaattcttatcctttcaagacctaccctagagtcaccttttttgatatatttgcttttttatttactccaccaggcaaagagggtggcaccctgctatgagctcttggaacaatttatttataagttccttatagcctggatcgtattcaaccaatagtttttccccctctattaaaatgcrttaatttggagtctttgcttactaaatgctgtctcctttttttttgagacagagtttcgctcttgttgcccagcctagagtgcaatggtgcaaactcggcttactgcaacctctgcctcctgggtccaagcgattctcctgcctcagcctcccaagtagctgggattacaggcatctgcccaccacgcccagctaattttttgtatttttattagagacggagtttcaccatgttggccaggctggtctcaaacrcctgacctcaggtgatccacccacctcagcctcccaaatkgctgggattacagtcgtgagccactgagcccggtcaaaatcccttcttacctgtcatttgtrttctccccattctgtgtctgacatcttgtaggtgtttgttagatgattggtgagtgaattaatgaatgtacagatggatgatgtataagtcctttcagagggaaactttgagtatgttaagaccccaggaaggcttatacttgatctttgtatccagaatgttgccaacattctggatacaaagaaaagcaccctctctgtgacttctcagatcccatctgcctctgatctttcatgacccctgctggattgactacatgagcctctttcagaagtttgactagcaaatcaacaaaacagttcaccctctgcatctctgctcagggatcaacaggagtgcttgcttatgtggcttcattccagtgggaggttcatattttcttagttatgtatcatgtagtcttccttgattcaagagtaccatgacttgtgtttgttctgactccaggactatccatgagtaaccctcagccaagagtgtatcatcagggcctgagcaagtggcaggagacaaggtatagtgtgaatctagtacatggaagagaatgtcttgacagctggggtctgtaattcatatgctgttcaaatgacaggccttttccccacacctgtgtgtattcaaagcaccatgtcatgttctgtagggagataggcaggggagttgggtcaggagaaggaagttaagattgaaggagaacatgcagaggagctttgggaaggaatgtgcccggctcacatcctggctccatcatttaccaactgggaaaccctgggcaagtgatataacttcacattccagtttcctcctcataaaaatggaaataaagagaaggtgtacatagagtttttagataatggatttaaaacactrcctggcacacagtaaaccattactaagtagaggctatgtactccatcctacacgcatcagcagtggcagtccagcaatactcctataaggcacatgttatgacttcattttactggtaaggaactggaggcttagagaaaggatggttaatttgcctgacaacacattgctggtatatatctgagccaataatcaaaattgggacactaatgccaaaggttttacaatttctatgctgcaggctcaggtgtttttcttcatgggtaggaactttatggctcaagcccgaaggattcccctctgggaatacgactgttctggtaaggttcaagctgactcatcattgagtgctgctaataaagtgtttgctgagaatgttttctgttaactcattgagccaggttattaagaacctgtgctcacctctgacacctcagttgattggggaatttgggatgaagtgcttccaaaatttatttgaattctaaattaactaagtgagttaacgtggaagccgcttttaccagcccacaagggtcacgcttgttgtgtctggaagaaggaaagggtcttagaggaacacaaattgccagactgacagtcagatatggagacaccagggtcatcttcagtttaacaaacacatgtcagaactagaaagttggaagtgagacttcaaactctacctagcattgagcataagcaggtcactgaccacaaagatattctgttcccaaagagcaccatattcgtggtcaagtaaggccagagtctagactgrcatcaaatgcttgtatgattgggaggaaggagcccgaaggccaaagaggctcactaatttcattattcgattcttccaaccactgcacgttacaawcagggctgtagcctgggtctactggccaagcttccggggctgggacaggcaaggtatgtctggatgagagaagktctttsccaagacaagcatctcttgtgccaggcagaccagcaaatgagctgcttcttgcagccccttctttggcatctcccataagccaaggcctattcatttaataaatgcagactcaggagctactaagtgccaggctcggtgccagacactgagaatacggaaatgagtacgcataaatcaagtgtgcttttcatcactgtgtttttaaaaatgttaactgatgatttcctgatcctgagagtaatgtgcagatgctccttgaactatgttggggttatgtcctgataaacccatagttagttgaaaatatcataagttgaaaatgcatttaatacactcagcctacsaaacatcatagcttagcctagcctacttaaacatgcttagaacagttccattaacctacagttgggcagaatcatctggcaacacagccctccatagagtatcgattgtttaccctggtgatgatgtggctgacgaggtgctacagctcgctgcrctggccagcatcttgagagtattgtacagctttctaccactttccactgratacctattgtttttacaccatcagaaagttgaaaaatcttaagtagaaccatcataagtcagggactatctgtatggtagtagaaatttttaaytgaatcttctgtaatcttcagcaagaaaccctgagaatattgaacgtctttgccagacaaggaaaagtgggactggggaaaaggccagttatgtgaatcctcttaaaatagggwctaaaattttataataaaaatgtattttaaaagttttgattgagactttgcctgaaatgtgaaactgaaaattacgaaattaggtttattttatcctgcatttattcagtggcactcaaaacattgtaattataattgtcaaagatatcttagaccaaaggcaaaagattatttgctttattagagtctttaaaataacagtgccctaacttctgaaacaaaagaaggaattgagtgctggataggcagcttttgaatgtgaattttcctactatttcataagataacatcctttgcttcatattttgtctggttttcggtacaatcacaaaaggatcattttaacaatggtcacttttttctaagggcttctcttgatcttttttatttaaatctttgtcttctgaagcatcttaaagtagtatccaggagaattttgactccttcaacagttaactgatctaactctgccagatccagatttatcagtggttttgcagtggttttatccatttttcaacatcactttcattgatttcatgaaagtctgcatcttttagagcaagatttctgcttcactctgtatttgatttgcattgtattgtagtcagataatcagatgtctgcactagcagtcagggacattagatagacagtttgctcactggtccgcgttcccagtcagctaagagtctcataaccatcagccttgataaatgctaatgttaagttctctaagttaaagccagtgtaggcaatgattggaacttggaagcaatcagagcacagaagaagcctggtccctggaatctctcccatatgcatcctggtggataccaagtgcctggcagaagtcataggcaactcccaaccagagygctctccactgacatgttgcttagagctggggacagcttagattagccatatctccccaaaatttgtatttttaattgaattgattttttaaattgaatccattttaaacatgggattttatttttatttaaagaattaccttgtgggtatgtctgtgactcttgggtgcctgcctggctgccaagaagacatgtggctccatgatgactctgctttttaaggttatgccctgggcatgatctgaaaccaggagaacaaagtgggtactggtgttgccttgaatgaagtgctcccctaatgggggaagccttgcaacctttataaactgcagtcaggactgttttctcttccttagtatggatttaaacaagaatcataaacacgtgagctttctcctcatcctccttttgttgcctctccccacctgggagcaaatgcctaggactttccaagtggttctcggtgccagcagcctcataagggaagagtattatctgagttcaggttcatcagaagcagcacccgagatggactctcatgaaggggatttattggggcaagaggagcgaagggagcagaatgaggaggggaagaaaccaaacaggcatgtgggctcagctggagtctgcttcacccagtcctatgggagctctggaacattaattgtacaacagagttggtcttgtcttgaggcaaaggggacatccttgggtacccacatcaatcagaggctacggaatgcttttggggaaggtgtcataacctcccaggcaaagcgactccattcaagctgttgtacttatctagtaaggggttctgagtggagcaccaccagcatccacacaaggagtggtactgcttgccaaagcccatgctctgatacacctctgggcctccttggaaatcacagtagtagaagagaggggtatagaattaaaaacatttggtcagggcagttgacatggccagtataaacagctatgttggtgctgacaggcagcagaagggtaatccatgacatcccttcctgtaacaccatcccggagcacatgagtcatgaaccataagctcagctctcttgttcctagagatgatgtctttggtttactcttttggcctgtcctcaccaagatccaaccagaattttgaaatttttatttgactgagtaaggtggaagagagaccagaaatagttaaataaatgctgatataaatgttacgttctagcatttgggaattaacaaaaataaggtagctgagcagcttttgaatgatcaaaagtactgttgtcttaggtcaaagctaattaaactgaggtttcctcgagttccagagtacatttttgaagacatttatttcacacatgcaaaaactgaagaagtctttggggcaatamatctttttgatttcttttttttttttttttttttttgagacagagtcttgctctrtcaccaggctggagtgcagtggtgcgatctcggctcactgcaacctccacctcccaggttcaagtgattctcctgccgcagccttctgagtagctgggactacaggcatgcaccaccacacccagctaatttttatatttgtagtagaaacagggtttcaccatgttggccaggatggtctcaatttcttgacctcgtgaaccgcctgcctcggcctcccagagtgctgggattacaggcatgagccacagcgcccagccaataaatctttacttcaagaacagacctttgacttaaaattaaagcttctctcctggtttgaaaggaattcccagtgaggtattgggcattacaagagaaactggraacagagttaggtaagcatgtaatatatgtatatgtgtatgtgtgagatacacacacacacatacacttatatatatttgcttatcctgggacactcttgagactaattataccagaatgacagaaatgaaccaggaccgtccccaggaaaccaagagaactaaagtcatccaagactttggcttgctgcctctgatgtccacaggccaattagccaggatttagggtagtgtctacttgggacagttgtgggtgttgcttctggcaggaggaatatgaggaagaagatggtagggaaaggccatctatggtgaatcattaatgccatgcagttcttgagacagcatttgagaaattattctctggttttccttattgaaattgccaatgcctgttctctaggttctaagagcagccctcacacttgccatcacacagctatgtaaacacctatgtctctgctgggaggtccccacctcttctgaactctgagctctacgaggacagcgattaacatctctcagatatgttctctcagtgctgaaatgtggtgtgtgatacgacaactcagctacccagtgcatgctcagggcgcgttctgaatcctgtgccatttgcatgttacatacatgagcttgccatccatgagtgtttggggacaagacagaggaagaaaaccttgggggaagggctaaggaaaggtgctccttgacagtgaggacaacttaaacagaggtgtgaacataagagcaggcagggtgtgtgtagaatagtagcatatacgtgccacggggcaggggtggaagaaccacaacagaacaggatgggccaaaatggaagctgggatcttaagatttgagactttattctgtttgcagtggggacagacatattttaagaagcttcctctggcagccagccaaatggactgaaggggaaggaaagctcatagcagcagctaccaaacatcattatccggcagaatcactaattttatcactcaataattttatgtattaaaaatgctcatcccagaccctgcagtctctgtgtctactcagaaaagactcatgcwgtgcaattagagtgtggcccaggaatctgcattttatttatttatttattttttagacggagtctcgcactctcgcccaggctggagtgcagtggcaccatctctgctcactgcaagctccgcctcccgggttcacgccattctcctgcctcaaccttaaagaggctcccaaggtgatactaacgctggcgatcctgggtctctgtgtgaataacactggctaagagcacagagagatgttagaaaactaatcatcattgagatcagttatatccgagactggatgctgaaaagatatattagagtttagttttatatttatatatctcttatcttttgtttaattgtatttgggcttttaggggttttgtttcattgctattttctaagtaagagtgtattgatgtttaacaaacaaacaaaaatatacaagttattaagttcccagctcaatgaactttcacaaaatgatcaaacctgtgtaacctgcactcagaactgccttccacttattccataattactgtcttgatttctagccccatagattatttaccttttatcacctttatttttggtgcatttgataatgttcataatatattagaataataagatatgtataattggataatttaagtagatatattatggtaaatgctcacatgtttttaccagttggacacaaaataaaaatrtttttcatccacctgtctagatgccttgaaatgttagtctgagctgagatgtgagtcytggaaattggaggacctctgtaccttctcttccaaaatctgtaaayatactgtttccgcttggcagtcttgatttgctttcagtgactctgaraagccctgtggtttgtgaagagcctcttggctttcctttgaccttggttggaagccatgtgcccaggtggaaagacagcagttccctacagcctttctcttctgtttctctcaagtcgctgtgtgcagagtccagcctaagctggctacacttggaaacctctcctcacccttgtaccctccccacaccctggggagacttgctggtggacagcccagccctcactgcttcaggctttaggaagaaaccctctcttttcttggtgtgattttcttagagtttgtctttcctgaaccaccaagatctgaaaaggcaggattagggtgtgggcttaggagaaaggggccaagaagatgacagggttgccttttcatccaaaccttaggaggtctccagctcagccatggcccagcccacctcaccaggactgccctagggtttgaacccaaagcattagttaggaatgaagagtggttttgtcctcttacctgtcttcccagggaacccatgaaaaagtgggcagctggaagggggctggagacggcctggtcagggcatctcgtcccactggtgcctaccgtctgagcactgctctgaaggactcgatygccccgtrgagcctgctcccacacacctgccttttgtgcagcyggcccatctgttggtgctttttytttcaggaggagatgggcatctcctgtgagctgctggaatcggacttcctcaaatgcagcgtgggatttcctttcatgaggtcaaagtcaaaggtaagggacacagaygggacccttcctcagcagcaggyccccagcccttccaccagccactgattccgccrcctccctgaggtgaggagtcctcccaccccctgcytcccatagcagctggggcggccactgaagccctgacatgctcctgtccctggctgtgtacaccggggtatactccggaggggctgcatcatatggtctttctcttcgattcacatgatgtaccccaaatgtgaaagtgaaggacacaccacagcctctgcactttagcacgtgccatttagttgaccttcctaaaataattttttttctgagacattctgtgcctctttgagtcccctagacaacacagaagaagatgtggtctgtcacctatagtcctgtcattcccttgggtgctcacagttttctgaagagaactctcaaaattctcaaaacataaatacctgtatcccacttcatttttaagaagagtaaagaaattaagtcmctttggtattggtatggagacagattttytaagttcaaatagtatactacagcatcttcagacattcatggaacattgtagtatgtgccatcattataaggagatacaaacataggtaaaaagatgtggtgattggaggcaaaactagaatctaaaagaccaagtctgcctttggaaatggaagctattttccctgccatgaacagagtgagactccgtctcacaaaaaaaaaaaaaaaaaaaaaaaaaaaagtgaaagcttcatccttttctcctgcctgggtcatacactcagatcattttaatctccaaggctctttggtcccagtatctagtagctatttgtaaaccaatggtgagaatattctggtgagggagaagacttggtcatttcttagcaaatcacttgaacccataagccccattgaatgcacctcgatcttggactttccagccttcagaactgtgagaaataaatgtttaaaccacccaagctagggtaatttgtgatagaatcccaaactgactagggcaaaaaggtaataactttctcactgttagggtcaatgttgttcagtgctgtgttcacatatcacccaagataatctcatgaaccacctaaaataatcttagtgtaccactcccagtgtgaacatmctgtgatttgggtaacactgccccaaacaaatggtgttcaccatatacatatcaggcacgtgtgggaatgtgggaggaacccctgggtaggggttataggaccaggctctaccacaaactgtgtgatcttggcgaaaccacagtggccaagtggccaagtggcccatgactcctcggatttttttctgcctctcttcctcattctgtccacattcaccccaggaggagggaaacctcaataagtgtctgcccttggaaaatggattacatgtggatggcagagtacaggccaagtcccattagactccaggtagggtgagggtggagataaaggaggacgaccacaatccatggacactattgcctatagtaatgtatgtggcacatctgcacacaaatttaattaaaatcttttgagtaacagataataggcttaactggaaaacttgcaacagtttccatttcattttaaactccagcctatatcacatatcagacctaagatgtgtctttctctctctagtggagtgttamattttgtcaaatttttgtttgtttgagagggagtctctctctgtcgcccaggctggagtgcagtggcgcaatcttggctcactgcaacctccgcctcccaggttcaagggattctcctgcctcagcctccctggtagctgggattacaggtgcccaccaccatgcccagctaattttttgtgtgtttttagtagagacaggtttcactgtgttggccaggctggtcttgaactcctgacctcaagtgatctgcccacctaggtctcccaaagtgctgggattacaggcgtgagccaccgtgcccagccaacatttattagatagagcccacagaagtatgaacattggaatgttggttgttttcccagctggtaatgctaccactttcctcccacatacagatgctgggacctgaagcaagactgactaaacctggggattggggggcatgggagcagagggtgattccctggagaaagcccaacaagtcacccagcagagacggggctccccgtatccgcagcccagcgtgcactcccatgtccttccaaccctgagggtcctcaggctccaggccacatgctaagcctcatggctatactttggcttaccttggatggccatgtatttctctctctcacagcctgcccagtttctgacattctgttcttccaggcctccatccctgattttggcttctcacccaattcttttgcctgtcatctcactgtgctctttaatgtttttaatttaattcagatctcctcccagtgctgactctacaccagtcaagaccctgcctctctcttccttcttgtcctcttcccgccctgtctccatgcctgccccccaccccacwgtaagctgaccagtcccacagcaacagaaatttctgtctagaaagagatgtccatgttcactgtagatgatggtccattgtaatggaccaatgtccgttgctttcaggaaacattcagtagaattcagtgttgcaaatattagaccattgcctagaattcaccataatggaacccaaaggtttagacattgtataagttataggctctcaaaatttgatgaaatttaagaaccgttttgtccaacctcctttttttattgaaatgcaaagacagtatcttagccaagatcacagtcagtttgtggtggaacctggtcctgtgacccctacccaagggttcctcccacattctcacacatgcctgacatgtatatggtgaacaccatttacttagggcagtgccccctactcacaggatgttcaccactaagtggtacactagataattttagatggttcatgaaattatcgtgggtgatacgtggacgcagcactgaacaacattgaccctaacagtgacccttttcaccttagycagttcagtcatctataacaaattaccctgggctgggtggtttaaacaacagacatgtatttctcacagttcttaaggctgagaagttcaaggtcawggtcccggcagattcagttcctggcgagagttctcttcctggttcataaacagaaccttctctatgtgtgcccatctggctttcccttggtgtgtgtgcatggagagagagagatctctttgtcttctcttcttctgagtgcactaattccatcatgaaggcctcaccctcatctaaacctaagtaccttccaaagaccccatctccacataccatcacataggggggttaggccttccacatattaatttgaggagtggcggggggacacaaacattcagcgcataagacttttcaatagtcttccaatcctagccacactcaggagaacgtctccaatcctgctagcacatctttaacacttctctatcaccagcaaatctcccttttcaacaaagatggagtagaccttaggctcagaggcttccaaaggcaacagagttcagcattgctctgtktwcaktgtgttcatttttacaactaccttctctttttggcaagtgatcctggattcccatctatgwcagtgatataaattgttcttttaaaacaatctttaaactaaaagagtaaggcaacaaaaatatgaacaaatatcccaggtgatgtaatttgcagatgtggcagaaattgaaaagatggtatgtgagtgaaacttagaaagtcccggttaaagagtgtaaacgcatcacttcctaaggagagcctcggtggcggaacaggagcagcaggtctctggccagagtatgtgtcaggcttggttttactgttaaagctgtgactttggcctgacagtcagaaagctatacataaaactaaagcttatcatgcaaatgagcttccagaggtcataaactgcagaagatggaagagaacagtttaagtttggaatgcctgctgatgccaaataccacttcctttttcactagtatgaattcagcgtgatctttgatacaagccacctgtctggggaagaggaagttctcagcttcattgttactgctcagaggtaaggsgggggtttaaacacttttttcaaagatgagagatttatgggaccaggaaaggatrtgtcctggttaagctttgatgaatcccaggatgctgaggaggaagaaatggttactcagtgataaagccttgagccgcwaagtggaattggatttcttggggatggtggttgcctagtgctgcttgcatagccgccactgcagattgaactgagaggaactgggcatcagccactcagaggtgatgattctacagctgaggagagacaggcccaggggggtgaggctctagtccaaggtcagttcccacttggctgtgtatttcccagatcagacagatgtcctctgcaaattgtctggctgggcccactgctgcttttggacatggtgctgtatcccttgatggagtgggcaggtcacctgcagcctgagggcctggctgagcctgttggcagaggccccaagagatgctactcaagagagggcttaatttggaagccaagtggatggataggaaaggggatcgtggggtggcagcttctcccctcagtagcatgtgcccgcccctctccaggatagccatgagtgcctgtgggggcttctggggagttacaagatgccttctccagggcagatccagcatgccttgaagcagcatctaggtagcacttggctggcagctccagtggagggaggggcgttcaggtgggtgaacagggagacacaagctttgattggggtggtggttggacacccaaggcaaccttttcattttcacttggaaatgatcttaaacttaacagaagtcttacaagaatagtgcaaggaactcctatataccctttacccagattcacccagtgttaacattttgcctcatctattttatcatcctctttctatataattttttttgttaaccatgtgaaagttgcagaaatcatgcctcttgattcataaatacttcagtgtgcattcccaagaatgaggctgttctcttaakaaactgtagtatagttatcacattcaggaaattgaacattgacactatgctattagctaatccgcagtttatgttctgattatgccagttatcccaataatgtctttttagccgcttctttttactggtccacaagacttggttattttctattgacactattttcragatcacataatttacatcacataaaacatgactgtgatytaatagaagcctatgcaaagcatagatagggtagacttcattcccattgcacaaaatccagaagggcttcagtggggaggtagcatttaaacagaggagtctgttttcaggctgaagcaacatgggcacggcagtgaggctgtccatggggcaagaagccctgttacacctgtgtaggtggtgggcacgagagtgtactggggattcgtgcaccttctcagaagaaggatggggagcacacaagcacagtgggaatggggctgaaagaggagcctgggcgctaaaccatgggggacaaaggtcacctagaaaatctgaactatatcctgatggcactgaggagccactgaaagtttttgaaaaggggagtggcacagtgcaacagcttggccccagagcatgaggttgatgaatttgataaggggcggcagatgcccattcaaacctgaaaattctcattctcttgccatttcttggatccacagaacactcgccattgttgggcagacccatcaatgtgctctcttggtccttccacacctgaggcagcctgtatgcctgggaaggaatgtgacatggaagagatttcccwtgtcaaaatagaagacacttcctgcctccacctaattcagggctaatcataacagtcagagagggcagggaaccagtattgcaattgtgaaaggttcatttgttagaataacatgtccacacagcagcagtgctctggttttggatgcatattagaatcgcctggggagctttcaaaaatatcgatgcctgatctatccccagagaccctgaccctgcctctgcctggggtgagacctgggcaatggagttttcagaagggctcaccaaatgattctaatgagcagccaaggctaagaaccactatttataatcccttactctgtgctgggcacattttcactcagtaaatatttattgtgcaccttatatttaccagttgcagtgctaaatgctgggcacatgagaaaatgacagtaacctactaaattcaagaacaccccctatgtacattaacagtgctgcatagcttcaggaagcmctaggatctgtagcttcaataatataaaaatttctagtttcttaaatcacaratgttaagatgaccatawtatcttctragcacacaccagaatatttcagatgctcatttcttttcaggcattggtgaagatatggtctgactgccccggagggcacccacacacagcgcttgactccctgctatgacggaaagatccttaaagctccttatcttgaaaactacagttaaaatctcaattgttcctttcttccatcaccaccctttgaaggtctctttgcctacttgtagatttagggggacataacattgagactgagcagtttcttgaacctctcctctcagcagccaccagcctggcttttgcagaccactggaaagtatcccagctcattagcttttggaatgacgggaagccttttgatgtttgacgtctttatctcaactcttcaacttagctcattctggagcagtcacacgatgacagatgagacggttgggcctragccggccaaacaaayggcagggcaagacctggcaggatgctggggtgggggcgggagtgggccaggatggtgttaacccatccacaggggagtygcctttggcctgcccacagcagtgatcccaaggcttttgtcaccccttgggaaaggaaggacaaggaagtcaggctgtgtgggcacctgatcctgctgcttttgcaaactgtggatgcccctgagggactgatgtcaccccatgtaggaagacagatgaggagccagggcagagactgtggscctatggggtcagcgtcacacagcaccattgtttcagaacaataggagggagaaggagaggggatgtgagagctatttaagtgctgttgccattcagcacttgytggttgagagaggaaggcagtggggcagggcttggagggggcagagagagggcacagagcagacagggactcagcagatgttcagggaacggcgtggtggggaacagtcaggatgagctgagccagcctcagcaggtctaggggactcttttcttccgcccatgcagggtgaacttgggaaccaactgtgaatgtaggttcaagaacatgtacccaagagccacgcattttcccaaggaataatgatcacaattcctattagaaatttaataaagtaataaagggaaactaggtcttctctctcttcctcctgttccttctcctcccttcttcttttgctcctcttccttctcgctcccaaatctggcatcaggagcaggagtcacagctgagagagccctagtttgaagtctgactgagctggttggaatctcagctctggtttgcaggggggccttgggcagttacctgatttatctgacttgctccttacctgtcaaaggtgggtgctccatctccctctggggttgctctgaggtctcagtgaggccatgctgagaaatgcccggcatagtgcctggcacatagtagccacttaacagcatcaattccctcatgttcacctttccagaatgatctcacaagaatccccgttctgtgctttctcacccggaggccttatgtggatgtattttagaatcacctggggagctttcaaaaatatcgatgcctgatctacccccakagacttgctatagccagggtctatagcgagagcttccatgatgtttatagtggtaggtttggtcagggcctctttcctgggcttggctgtccatggatgatgggtggtcctttcaggtgagacatagctgctgaagtctagcaactccttcctggctgcaataccctaacttcattggtccattgttygtggaacaggcacttacacaagtagcacacacagtaggtgccctgcccataacccctcagccctcacccttcccaatctatccgcaaactgggcagattccggctcccagcaccagccaccctgctgaggctttctctggccagagcccactcacttgcctgacaggcaggtgccagggggttcattccaccccacccccacccccagcagcagcaacagcagctctcaggagtcagtggataaaggcctggctcccatgccctcagctaggaagactgactctgcctcacagagtccccgcgagactgggccctggctgccgacagcacgaccctcctgtatggcatgcctttattgtctccyttcctttgctctctcccttctccactctccagtcctactggcatttcctggggccacctctcgaataaactacttacactcaaatctttgtgtggaacacaaccaagacaatagagtgcccttgatagatatgtacagggaccaaaaacagactgaaggcaatgaggtgccatctgcccttggagaatgtagagattcaactctaaagtggaacagagaaagcccactgctggacagctagtgttggccagcgttcattcattctcctytctctgcacagtggcaacacggagcgctctgaatccctgcatgacaacaccctcgtgctgatggtgccactgatgcacgaggtggacacgtccatcaccgggtgagtagcctggtcctgggttgccacaacacaggagtgccctccagtggaacactgtgcttctcatatttgcatgtgtagccagccaggagccaagggctgtgccacctccacttcctcccagccttgaaaagcaggatgaagctttagctgcagtaactcatacactcctccctccttgttttctcctctgtcccacctacccacccacctggtagataatctgagaagtttgatgacaagtttaagccccataatttctttgaacattccatatacctttatgtgcatatattctcatccgcccctagtccctccagaatgctgtatggtaacaagcagcatggctcctgggattaaaatctcagctggaagttgctgggccagagattatcaccagatgtgtctccagtcctggctcacaggaggaccactttctgattagctccacaggcagtgctggctttgcttgtttctgttaactccctctgcagagccagaggtggcttttcctgatgtctrtaatggtctggaatgggcagggaaccatcccatcggccacactgtctgtctgggtcaagtccacggtcattcagtgccgctggcattgttggaaagcaggaccctgggctgcagtctgtggagacctgaaacaacctgtgtcagttttcaaccaaagccccagcttggaaaaatgagaactccatttctttccagcttcagaaaacagagtgcatacctctttgatagtggaaaaaagatttacacaattagtttagatcaggtgaggacccactgaacccttgacccaaatgcaagctgaactttctggaggttcacagtttctaatttttcggttttcaagtgcttctgggtctcagccttgattagcagtagaaatgttgatcccttgcagggagagccatccctgcactagcccgcactgctgggagccagtggaatgagtctccaagcattcctgctcctgagcttttggcatttttggtcatgttttttaaacatgaggtactgatggaatatatttgcaaattagcatatttttgcctctgttcacagctctatttttaactgtatcatttatttacttgtctcatcaaaggcacagcaagaatatacccagaaccaagccctatccttggggacaaagagaaaacattctccccaccacccccagacacttgatcatgtaatcaktccttagaggaccttgttgggaggtgttaacagcccctgatgaagccatcagttaaacaaatgagtcaacctctgatctctccaggaacctaaaacagctcttgccatttggtaatgctgggaactcactaccttactaaaataatgcactaaacattgaaaatggatgagttgttgtctattcggacttagtctcaaaaatctkccattgttgtgtttaggtgagtgagtggcctccagcatctagaagtcgatatttgtctgggagtgtcagtcagagctttgtttcttctcaggaatgtgttcatataagcaacattgaaagcattgctgcaaactgagcttgaattcttctcacctcttatgtagcctccgaaatccaagggaaaatgctatcaatgaacggattcagctttcaaatgcctaacttctagtcatcttggcagtctgayaaatttaagttttttaagtgaatttgtcatagagtggggtttaggatgccaaatacataactcatttatatttattttttaaaagcttatgatcatcttcttcaacccataaaacatttttcgaatgacaaaacagaaaatgtatacttttataatccagtttttaaaaagtcaaagctatgataatcttgtcatttcagaaaggtaatcccagtgcatatttctccatgcagcttattgacgtaacctaagatgagaagacactactattcatgcctggtcagaaagcacagactggctatgtaacagccccagcaggraagcactgggtgcaagacactggattaaaytgagacaaatgtttgcttctcagaatggcagtgaccatgggtgcttgactgtgggtggggatgacagatttcatgctttcctctttcagaatcatgtctccaacctcctttgtatatggcgagtccgtggacgcagccaacttcattcagctggatgacctggagtgtcactttcagcccatcaatatcacccttcaggtacccactcctggagacctcctctgtccgtgggggctaacggaagggcacatgggatgtctctcctacagagggctaagctcttgtcaggagaaacccttctgtggttggctggtgtggtgtgtgtgtgagatctgtaaccacacacagaatgaatccttttcgatgcctggtactctgctgtgcaggcccctctgctttttcaggatttggaaggacaggtccacgtcatgaatgccagttttccccaagaagccctctgygtggtggaggcctcagccaatgtcccagcccagatgaccccatgaggacccctttctgttctccatcattccccaccttctgggcagggctgcctcagaggatttgctgtgtcccttcctcctgagattttcttgccagctcatccaggagcccactcctcctgcaggggaacagcctttcggaagggcagttttataagaacagaggagtgtgagyccctgtgagcccccacgggaggcacgctgctccctcactgagccatggctggcttgcccaggcacacaggcatcatttccagcaagtccacttggtgtagactgtggacctcatgaaggacactgtttcttctcttagttgggggtsagcaaactttttctgaaaagagccatggggtaatttaggctttgtgggccatttggcctctgcagcatctattcaaccatacttctgtagttcaaaggcagccatagataacacagaaacaaaattttagttccttatagacaatgaaatttgaatttcgtataattttcacatcatgaaatgtaggcccaagcgagaaaggatatcctgaaggtcccagagctgggagaagccgggctggggccaagacctggcggcactggccggaccctgtgtggatgaagtgaaggagatgggcccaactcacccataggacacaacagtccatatctcctcactctctggttctacctcccagaactcttctctgcctcttgcgtccttccccatggagagatggtttcccactctggcattcactgctgtggctaaataataattattttctttccttgtggcctctcctaggtggacttaggggatgacaaataatgacagggtgagggtctagagaatgtggcagtaaaacatttgtgggctctgacaaacaatggtcttcctctccccagagtattctcccagcaacagactgcgaaaccatgatacataacacatgtccccagctcacagaggatgtgccttctgaccaactaagcccctgctgtcacaccctgctcttgatttacaggggagaaagggaaggatggggttagagcttgtttttgagacagtagagtgattgctgtgaacagcacctctgcatttctgaattgcttctcagagttattttmtttttctcctttgcttttcgtaattgggtaggamatagataaagacctgatgggtttatttcatcttagttgtttctactctttcctactcttatagttttgggggtgtcttgcaattaaagatgtagttcagaaaattatttagaagggttcaagtaacacagaccatgtaatgaagagggtatgagtgttgaaagaaggaaaagaagaacaggggttgcacagaakataccaaatgttcttatcaccctctggggaacaaaagaaagaaatctgagggtatgcagcttatccttccagttgtttctctgaaggtaatttttacagtgagtttaaagtttggtattcaggcaaatagttttcttcacatctgacctgaaataggactcaggctagagaatccagccctggggaatgagtgattggcatgtcccttagataaactcctccgtgatccattgcctcaggaagtgcacagcattcaatccagggttgagagagttgggtctgaaagattgatagtgtgtgccattgattagaaggagatccttctgtgctagcaaagcccactttttccttgagaattgtctgactacttatttattggtataatggttgttattgtggttgtcctgcaggaaggtcactaaccagcttggcagtgataatgaccagaaggtgaaaatactgtggaaggaggccaggaatacggagaaaatgtttctatatttccttattccagtaatattgttcctgaaggagaacataagactttccatatgaacagatttttctatgcttttaaaaatcggttattcaacaagctacataattgtttaaaggctccactgccattgtacacaggagaaaggcagaaatactagycttgggcctgctttttacatttcatcatagtttttaaacagacacattaatttctcgacaataagaggcttttttggcatcaaaatttaaagcatttccccacctgaaaaacaatggccaaaaataatgcagatattacacatgaacatttgcagagaatccagtataaagacatttgtkaaaaataaagatggtaatacaagctcwcctgtcctcctggctctgatgagtgaaatagtgcaaatcagcatccttttcttcattgcttaccccattcatgcttgaaatgggatttcccagacatgccaggatgtttctttttaattctgtgcactcatgtttcactkcaaattagttatttcagctatggtcagatattccttccttttctatgtcttcaggttgtttggtgaatattgttcttttttgaatcaggagttggcaacccactcatctgctctrtcagttkttatctatttattctttgaagtggaaccaactattgcagaaaaccaaagacacagttttctagggaagagctagctggagctagatcttcatacatcctgtcatgtgtgaagacctggtaagatttctggctttttgttggctctgcccttctgacctcaacttcagagttgcagattccctggattctctctctagtgcccaggccaccaagcagcatgtcattccttcctctctcctacttatcctttttaaacatttagttttaaattgacaaaacttatatattttatattttactcatctttttaaaaataacacctttattgagatatgattacataccttaaagttcacccatttaaagcatacaattcaattattttaatatgtttacacaattgtgaacctgtcatcatcatctagttgtagaatatttttaaatttttttcattttaatttttgtgagtacatggtaggtgtatatatttataggatacatgagatgttttgatacaggcatgcagtgcataataatcatgtaaaatgggggtatccatcccctcaagaaatcccttgtgtttcagacaatccaattatactcttttagttactttaaaatgtactattaaattattattgactatagtcaccctattgtgctatcaattgctaggtcttattctttcaatttttttaatccattaaccatccccaccaccccccgccacagccatccccccattatccttcccagcctctggttagcatccctctactctctgtctgcatgagttcaattgttttggttttgagttcaattgttttggttcaattttgtttgattttcacaaataagaacatgtgatgtttgtctttctatatctggcttatttctttccttttttttcttttttttttttgttttgttttgttttttgaggcagtgtctcactgtcactcaggctgctggagtgcagtggtgcagtctcagctcattgcagcctcaacctcctgggctcaagcaatcctcccacctcagcctcctgagtagctgggactagagttacacaccaccacgcctasctaattttttttgtggagagggggtcgggttttagatacggggtttcaccacgttgcccagctggtctcaaacatgcctgcctcccaaggcttattttacttagcataatgacctccagttccgtccttgytgttgcaaaattttggaacatttcaatcacccccaaaagaaatttcggccttttggccagaaccaccatcttccagtaattcgccaaaatgtcgaacacaaagggaaagaggaaaggcacctgatatatgttctctaggctttttagaaaacatggagttgtttttttggccacgtgtatgcaaatctataagaaaggtgacattatagacatcaagggaatgggtactgttcaaaaaggaaggccccgcaagtattaccatggctaaactgaaagagtctacggtgttacccagcatgctgttggcattgttataaacacacaagttaagggcaagattcttgccaagaaaattaatgtacgtattgagcacattaagcactctaagagccaagatagcttcctgaaacacgtgaaggaaaatgatcagaaaaagaaggaagctggcggcacagtagctcacgcctgtaatcctaacactttgggaggccgaggcaggcggatcacctgaggtcaggagtttgagaccaacctggccaacatggtgaaatcccgtctctactaaaatacaaaaattagccggggatggtggcagccayctgtaatcccagctactcaggaggctgaggcagggagaattgttcgaatccaggaggtggaagttgcagtgagccgaggttggcccactgcactccagcctgggcgacagagcaagactctgtcttaaaaaaaaaaaaaaaaaaaagaaggaagccaaacagaaagatacctgggtccaactgaagcaccagcctgcaccacccagagaagcacactttgtgagaaccaatgggaaggagcctgagctgctggaacctgttccctatgaattcatggcataataggtgtctaaaaaatgaaagacctctggactgtttaaaaaaaaaaaraaaaaagaaaaatccttaacccattgacatagcttcttgtattaatttcttattgctgctgtaacaaattactacaacatttgtggcttaaaacaacacaaatttgttatcttacagttctgaagaacagaagtccaaaatgggccycgctgggctaaaaccaaagtatcagggcctgtgttcttgccagaggcaccaggggaaaatccacttcttgcctttgccagcctctaagggctgcctgcattctttggctcatggcccccttccatcttcaaagccagcaatggctggtcaagtcttaggatgttctctttctgatctgacttctgcctcttccctatataaggactcttgtgagtacaatgtgctcacctggataattcaagataccctctttattttgaggtcgcttgattagcaaccttaattccccctggccacataacattcacaggttccacagatgaggacatggacatctttggggggcctgtcatgctgcctgtcctactccctattcttcctgctccccagccctaggsaaccgctaatctactttctgtctctagagatctactcactttttttattcctctgcatattctgtttcttcctcgagtttcatgttcagctttttcctctccctccttgctcttactggtctctgygacctccatctttttcctcatttctcaggaaatgrttgacttctgaagacagaaaatggagaaatgctagggaaaacaagagaggcaaagttttatagaaccaaatgctgagacagaagaggggtacagttgtgcaagtgatgagctgcagattgcctggaaaccaaatcagctggctcatgtagtaaaaacagccctttctgtatattcgatcgcttggttttgggatgacccacttggtccttgagggcctcagttacctcaaactggcaaaggaaagaggttggaccagatctgtgggtctcaagtggtggttcctggaccagcagcagcagcatctcctgggaccatgttataaatatgaatctgccagccccaccctagacctactgagtcagaaactcggcatgacccccactccatacccccccaccaaaatgtgttttaacaagcccctcagatggttctgatgttttgctgaaatttgagaaccactggactagattatgatgtctgagttctcaccaagtgtaatagtctatgagtaaattcctatrcatgtaaaaagaaaagttttagcaggaagaagacaaaatgctgaaagagaatatggtartttcaaagtttgagatttttagatgcatgttagaagtgtttctattttgttgaaatttcccgtcattcagtagttcactttacttcaagttgtgaccttccagatccgaaccttagagtttctgtatgtgatttcaaagaatcttagaatatatattgcatgacaggaaatggaggtctgctattttccactgagacttgctgtgtgtgttccacacccacaggtctacaacactggcccaagcacccttccagggtcatctgtcagcatctctttccctaatcgactctcatctggtggtgcagagatgtttcatgtccaggaaatggtggtgagttctccatttgttttcactattgctttcagctttgagccagcccattcaaattttgtattccaccctaccctgacatccaccttgagggtttggaaaattcaactcattctaccctttggagacatatctggagaggccaggggacctgtgatacctgaatttctacattgagaccatttggttaatgctgtaagaagacctctttggagatggggaagagttaattacgaaccagctcctgggatggacttcgctggctctgggaacccccagcagcatctgcagttgcatgcgtctgaatgcattttgctgagtgcattttgcacagggaaagtgcctgcagtccatgttgagaggattgtgaaagcattgctctctataggggcacgtgaaggacattcagccaaagggacagtttttccatagatagcttgaaaatcagggcagcaaggccmhtatggagcaggtgaatatctgagccgagagttgaagaggacacagcccacagggtggaggttcagaaaacattgtgtgatggtgacagtaatttctggcattgctgccctctgggtcatgtggactgaaaaccagacgcatgtgaatgttgaatgtagaacaggtcactcctcccgagatgccagctcagatgttaacatccctcatgatgttccattccagttccatggcatccccttgtctttgggctctgctgacccagcagaagaaagccgccagtgttccgcacctatgatgtactatggttggaacttagcatgaggtgaacaaaccacacaggcttctggctaccctcttaaatattattaaccatgctgaccatgccacatttccccagcatctaggagtgttctcttcctagagcatgctttctgagttgttcacrtgaacatctacartgttgcaggagcctttttttttcctatgggcaaaatcatctattgaccaaaacaagacatttaagtcactcagattctgaaggtaccccaaaaccagggataccccttttcctctttactgatcatcgagccaaggaaaagccactggaagggacttgggctcacacttacaaatagctggcttgcatggaaggcattagaagtggtttcctgaagacctggacaactgcctggctatcgttctggctgagtggaccctcagatacccaagtggtgtgagctggctgcactctgttctttgggctctgagaaacaaatcctttggattttcaaaactatatttagaattttcataaagtctgtaacagacttggccctaggatggccaagtctccatctggatagcccagcctgtgatcaaaggctgtgggcatcttcatcgtatggaaaagtaaattcactggcacatctcactaagcaagtaggaaagctctctgtgttcttataaacgatcaccactgagcccagaatgacaacaagagtagaagcataaaagcgagtgcatgaggtgctgtagtgaagaggcgagagtccccagatacttgtttcagaggcccacagctggcacaccctctgccttaaagccctcggcaagggcctcctgtggctccgcccctcccttgctcagyagggcctgagaatgctcactgggtcaggtgtgattcagagctcatgacggtttccactttggccttatgggactttgaatggagcagggctttcattctggggatttgggtggcttggtgcaagtgaaattcagtcctattaggagaaaccagcactcattctctgtactgcactaggaggtgaccctttggcctggtggcattccctccccacccccactctcagccaccaccattccccaacctccaaaggctactgaacagctgggcaccagctggacatgttaagccaactgaagcagaaacagattataggcatggagggaaggctcatctgtcattcctctccacacccttgggaccctcaaattgtttctccctctctaacagtgcccttggtgtctgtattgcctgtgatcatcatccatagagcataatgaggawkggcttactcgccctatgggccctgggctgtcaccctacctacggacccacgtgtggcacagttttctgacttggttcagaattcatttagaagtctctggggctgcttctggggtccctgggcaggaccaacctgcctctagctttcaccaaagagtcttttgtgtttgcccaaagcatttcttgaggtccagctgtctgtaagtggagagtgtctggcttatatatgggaggtttttacggggagcctaatgaagtgtaaccactccaaactcccagccttggctcgtgatcttctttccttgtagctaatgtctctgagcccctctgctgtgcttgtatttaccttaaaaacagagccacggtggtsgcytgaggaaagactatcaattttcactgcttcccacccacgggggttgtgtggaccctactctgacttcccacagcacagaaaaaaaaggaaacaggtcactgtggacctagtgtctgtccatcaggaagccaggttgtaatgatcatgaaaataatagaggggaagaatgacagacctttctagtctatctgaaatagcaaaattacyagtaacaaatcattcttgatttgttcacaaacactggctcagcaagtacctattacgtgccaggctccaaggagaggaataagtcccacatctgccccagaactcactgtcttgcaggaaacagatacataaaatgccattgtaataccgtataacaaatgcaataatggaggcatgcccagaccccaggatgctacaaaggttcagtgcttcacaaaggaacctcttcaagtcagggcttagaggatgtctagttcaccaagagaacaggtgaagaagagaacattccagatagaggaacagtcaccacttgtgagtgtatgatgagtatctgctgtgctgggagctacacccggttctccattctgttwgcctagctcttatacaaataggcaagagtaagtgttccgtatgccttctgcagatgtacagcagatagatattttggcagaatgacagagagtactgaaccacagtcatttcctctgtcagtttgtaaattaatcactcttcttgggtacatcgtgtgtgtgctgtagacctgaaccttcctacctgctgacttaggcatggagaaggccaagctccctgtttgatactagagtctaactacatgtcatggacattgtcagcaaaccacccttggcctgctgcaatgagcagtagctactgacctccctagcttacttttttccttctattggacagtcattctaaaaaactcacctgatttccaggaataaaatgagtgagccagacagcttatgggaggcaggctgtgtccacttgctccttagagatttctttttgaagtgaagatagatcatcttctcaatttttcagaacagacctgaaaaattgaaccacttcactttattgccattcttctgcagaggcgagccgtgtagcatagcccctgagcacaggtctaagattgcaccaagataacacatctgtcacaagcttcatggcttatgaagggragagggtagtggtctttccaaagttaagttttactcacaatttctgaaggttcaatggaagagatgggagctttatctcagactgcaagcttcacttgatggagttaaaaacctgtatctgtgagcagctttctcacactggaggagaaggctttgggatttggctcttgttaatatgcaagaaggggaaaagtcagaaatgatagctaacagggagtgaagggctagaacttttattccaggtgaaagtactggatttttgaaagaactctagtgttagtccagaagagatataaaataaatatcrtaccattcattcctcctcctgcaaaaccaattgaaaatattggcctctctggcttgttgttttcttgctatggggcagtgattctaaagaactgacctgatttccaggaggtaaaattgtagggatgaatgataattttctaaggagatayatcaatgtctttgccatagggtaccattaggacattgacttcaatatggcatgaataccaacatctgttagaatattccaagttggtgccaggactcatattttagtaaactrtaaaatcttccctccccatgcttgtacagtagacargsctacccatgatgtacgatgggtatcccacaatgagtcagttgatgtgggaacttcaattaatttatagtgggactgctcacatccctatgaagaaaatatgcacctgatacatcactgaccataacaggagcttaaaattagacataaatggaggaatgaattgttttccccaaggatgacctggaggagcttcttaagttggggccatcaaatcagtcgatataatccaaagctaaagagtaaagaaattactcctgaataactgacccccccaaaaaaatgaataccatttattgctgtcccaaggctttartagcctttttcatgtgctgtcaaatttaatccttatggcaccttcataaggtaagatcagcatcccaagttgaggaaccaagcttcaaggatttgcccaacctgacacagctgctaaaaagtagagctgggtttgtaaccaggtctgactccaaagttcacgtggttcccattgtgctgaattgcacactgctcctgaaagtgctgcccactccctaawcaccagaggcaggctcagtcaataggacagacagatgakgagtagacccccaagaatcacccaccagaggaggagcatcaacaccagggcagagaggcagcaaccgcartcaaaagaactaataccagagggtgcagtaacaaggccaacagaaggcttctgaataagcaagactgatgtyttcagagcaatgcaaaaagacagtgtttccatgaaacagaataaactagagatttgtaaattcaagatattgatcattcaaatgaaacttcaatataagccatagagtagaataaatattaaagaataaagtaggggattcgaaacttggattttctgagaatgtattgcagaagaacaaaaaagccagttaaacttattcctttttttaaatagcaatstggaatgaaaatatcagatgakcataatataagagttagaagtcaagagagatggaaatgaaagcaagtcaagattcttgtcttggggggacaagtttatgtaccaattagctcaaggctttggtaaaataaatgtttaaatatgtaaaattttaagggcaacaaaaaacaatgtaggacatccaaaccactaaagaagaagaatttaaaacataattaaattcaaaacaatccaaaaggaaagaatttatgaagaaaaaaataaatgtataataagatggaagtaataaacctaaatatttcaataatcaaaataataattaatggattaaatgccctaaagacactctcagattagaattttaaaaatccaagtaccaaataacttgtaagaaatacaccttcaaagttacccagaatgtaaggcattcaaaaaaaaaaggcaaatattaacccaaagaaataaagtatagcaatattaacagcaaatgaagtataattaaagcccaaaacccacaaacattaaacagagcaaaagaaaatatatttcagagtgttaaagatttagtccactaagaatttgtaacataaatgaaattttatataaccaacaacacagctttaaccatagaaacacaaaaagaaattgacacattcacagtcattgcaagaaaatttattgctttcccctcaaaaatcatcacacaagtaggagtaaaataatgagtatttgaataatgcaactagagttgcgatcatttatatagagaccaagacagaatgagtcagaatgtctgattttcattactgctcccttgtttaccagctatggcaacctataggaagttaccttaactccccaatcttattttcctcatctgtaaaatgaactagtagtagtacctatctcacactgtaaggactgaagaaactaatttatatggagtaattaacagagatcctaacataaataagggaatgcacattcttttcaaatgtgaacatttacaaattattcaacatacaacaacacaaaaataagcatcaatggaatttttaaagtcaaagcagtagaagccacagtctctgaccacaatgcaataaacttggaagctaaaaacaaaaggttaggcaaacaaccaaccaaaaacaaatccacttgggaaattttaaacamcattcaaattaactttttagaaaaaaaagaaatcaaagttgaagggatgaacaaattagaagtgaaagacagtgagcggttgttcatatcaaaaccaatgggatttaracaaaaccaacacagaggaaaatgccactacttacatgtggaaaatagggaagactgaaaataagtgaactaaaytgacaacataaaaactagacaagggacaatgaaataaacccaactcaaagaaagtaaaatgaaggtattattaaagacaaagcatatcctgaaatagaaaaaataataacaacaaaagtattccacattagcaaaatcaaaagctgtttttttgtccaaaaaaatagacaaacctgcagcaagcttcaacaagaaataaagaagagcgatgatgccaaaaaacaacactagaaatactttttaaagaagtaccatacttatatgaagatttaaaatttataacatcttttgagctgggcatggttggctcatgcctgtaatcccaggactttaggaggctaaggcaagaagatccttgagcctaggagttcaagaccagcccagacaaggaagtaagaccttgtctccacaaaaaataaaaaacaaattagccaggcatgtggcataaactacttgggaggctgaggtgggaggatcccttgagtccagaaggtcaaggctgcagtgagccatgttcacaccactgtactcaagccaggatgacagatcctgtctcaaaaaaacaaaaacaaaacaaaaaaatcttttcaattktattcacacaaagataaaatytgaataaaatatgcatgaggttaaaaaaaaagtccaactagactatyttagaaaaaaatgtaaaagtagacaaagacctatatcttaaaaaaaatcaccgacccagatagctatataggcagattytagtaggctttcaaggaatggataattcttatgttaatataagctgttccagagagtagaaaaagataaagmaactcattccagaaaactaacatagccctggtacagaaaccagaaatggagagcgggcacactcacgcaaaaataggaagcagtgagccaaactcactttgaaaacagatacaaaagttytaaataaattgcaaattgagggccgggcgcggtggctcacgcctgtaatcccagcactttgggaggccgaggcgggtggatcatgaggtcaggagatcgagaccatcctggctaacaaggtgaaaccccgtctctactaaaaatacaaaaaattagccgggcgcggtggcgggcgcctgtagtcccagatactsgggaggctgaggcaggagaatggcgtgaacccgggaagcggagcttgcagtgagccgagattgcgccactgcagtccgcagtccggcctgggcgacagagcgagactccgtctcaaaaaaaaaaaaaaaaaaaaaattgcaaattgattcctattagaagaataatatagtctgggtaaaacaggatgtaatccaggaatgctaagttggttctccatgaggaaactgattaatataactcattatatattattattaataataaaaggattaaatgaaaaataaccaaatgataatcttgataagggtttctaaaaagttaaaaattaaattcaacatttatttatgatattttattacatttccagtaaggaaagcatagaagacttcctcaacttgacaaagaccctttgccagaaacctataggaaacttcaagctaagtgaggaacaggcatgagtccctgctagtgtctcttcagtttagttgtgttggaggccttaacaataaaaagaaatgatagcctttattcttaaaaaaaaaagtatcctattgtaaaaattgttattgtctccctaaaaaaatccaagagaatcaactgattggccctgaggacttgtgaatacagaaggtaagagctgaagctgactgtaaactgcctgatcttcaaatgctttccccagagacacacacagacccaccaactgagggtgaaaaccttcctagatcaagatgtttacatacagcctctgaccagtcactggctgatcactaagctgtgctgatccaggacagcccctacaaaaccaggcttaaaaataaaaacaagtgataaatatatatatacatatatatatacccacacacacacacacacacacacatatacccacatacatatatatgcatacatgcaatatatattttgccagcagaaacatcagaggctrcacactccaggaaaaacagactccagagactatgtctaggcaagtcactaaacaaacaaaacaaaaaaaaagtaacaactacccctcaatgggaggggtaagaatccagaattgctacaatatattatctaaaatgtccaatttaaatacacacagacactgtatatatcatatatatttctcatgtgctatacaggaagaaaaaaacagttaataaaaactgaggaacccagatgttggatttaacaaagacttcaaagcagctattacaaatgtttaaagaactaaaatcagtttaaataaagtatgacagcaatgattcatcaaataaagaatatcagtaataatattgatgaataaattaaaataagtggaaattaaataaatgaataataaaatagatggaaattataagaaccaaggggaaattctggaattgaaagtaaaacatgggcygagcatggtggctcatgcctgtaatcccagcactttgggaggctgagttgggcatatcacctgaggtcaggagttggagaccagccaggccaacatggtgaaaccctgtctgtactaaaaatacacaaaamttagccaggtgtcgtgggcaggtgcctgtaatcccagctactcgggaggctgaggcaggagaatcgcttgaacccgggaagcagagattgcagtaagccgagatgtgccactgcactccagcctgaatgacagagcaagactccatctcaaaaaaaaaacaacaaataaataaaagaaagttaaacacctgactgggcacggtggctcatgcctgtaatcccagcactttgggaggctgaggcgggtgtgaggttaggagttcaagaccagcctggccaacatggtgaaaccccatctctaccaaaaatacaaaaaattagctgggagtggtggcagatgcctgtaatcccagctactcaggaggccgaggcaggagagtcgtctgtaatctcagctactcaggaggctgaggcaggagaattgcttgaacccaggaggcggaggttgcggtgagccgagatcacaccactgcacttcagcctgggcaaaagagtgagactctgtctcaatttaattaaaaaaaaaaaaaagcaaaacacctgaaatgaacaattcattagaggggctcaatagcatatttgagctgacacagaatcagtgaacttgaagctggattacagtacagattttccaatctgaagaacagaaggaaaaaagaataaaacacaagcaaaatggttgaagccccagaggcctttggtgtgctttgtgggacaccacaaagtttatcaagatatacacaattggagttgcagagaaagacgatagagaaaagagggcagaaaaaaaaatttgatgaaatatcgttccaaaacagtggcagtgtataaactcttcaataaatgatatgaagacaattggctatccatttgggaagamattagagaaagcctgtacctcacagaaaaaaacaaacaaacaaaaaacaggtgaattaaagttagatgttaaaaaaaatatttgcagaactgaatattttcataatctttagatgggaagctcttcttcctaagcaagccataaaatcctgaaaccataaagaaaaaattaacaaatttaaacctataaaaatgttaaacttttatgtgatcaaaatacatcataagggaaaagatatttgggagaacatatttgcaacatgggtaacaaatagataatatataaattacttctacaaaataatgcagaaaagaccaaaaattataaaaatggttgaagttatatgaacaggaaattcacaaaagaagaaattttaggggctgggtgtggtggctcatgcctgtcatcccagcactttgggaggctgaagcaggaggatcacttgaggccaggagttcaaaaagaaattttaatagcaaataaacatatagaaagatgcctagcctcactggtaatcagagcaatgcaaacttaaaatgaggtttttctcctcattaaactggcaaaaatctaaaaaattgttaagatccattgttggttaagatgaagagaaatgagcactttcaaatactgctggtatgaaaggcaatttgacaataactaccaaaatttaaaatatgaatatcaacaattccacttttaggaacctgtctcaaaattttcacataatatatccaggagaaacttctaattttctgatagtaggtgtatattatcagggttctcagcataaatgttgacttctattttggtgaagcagaatataactttaataatgctcccttaggattctgagagaaagttgttagattcagaccaaaaagtatgaaatcttactaacttattacagataggtatagtgcagagatactgtatcaagtactttacaagaacaaattaatctaatcttcataataatttcttaaggaaattgaggcaaggaagagttagagggaaggccaaggtaaattggtaagtggctaagttgacgttcactcttaacagtggggttcactgtgaaataggagttcagcaggacttgtttctcaagacgcaggtcacagagaccccgctgataaagcaggatgtggtaaagaagccagctgaagacagccagaatcaagatggtgacactaatgataattcaccagcaccatgacaatttacagatgccatggcaactcctagaagttactctgtatgctctaaaaacagaaggaaccctgggttctgagaattcgcagcccctctcctgtaaaactcatgaataatccactccttttttagcatttaatcaagaaataaccattaaaataggcaagcagcagcccttgggyktgtktwacctatggggtaaccaccttttatttctttactttcttaataaacttgctttcactttactctctgggcttcctcttgaattctttcctttaggaagccaamacccaccggccctcccaggccaaaccccaatttgggggttcatcctgccacaactgtacagtgtggggtcaaggggaacccttggtctttttcactgaaaaatcaactcagaaaaggcagattaataggagaaaaggcacacagatttatttaacttgtatacaggggaggcttcagaatgaagacccaatcccctggtaaggtacagaagcttatataccatcttgaggttatagaaagaatgcaggctcagagcatgaccacaaccaggttttaatggcaagacatgtcatgggggagagaaagaaggaggcttggctagcaaaggtggcattgttatgtagatgaagccttccaggtcataactcctagagagaatagatggtgaatttcttttcagacttgtaaaggtgtcagactcaatctgtcctagatctgggaaaggcctggaaagagaagggctggctgcattcaaggagattctctacaggtgcaaaatttccccacaagagacagttttgcaaggccacttctgtctgctggcccagcagcagccatttcaaacgatgtcaaagaaatctattttgggataaaacattttgatttcctttagccacttgcagggtcttgcgccatccttttgtctgggtgcgtagctgtccagcagctctagcactacctggaagttgaggcatggtcatgcagaactaaggccccacccaggcctgctgagtcagagccttcacttcagcaagatccccagggattcctttgtctgttcatatttaagaagccctggtctaaagcatgagacttaaatctctgctctcccattttcttatctgtaaaatggtgatgacagtcctcaccacaagaggctgttgtggggatatttttatacacatgttcattctttcaacaaatactttgcgcccagcatatgctaagcacctagtgcagagaggaaaacagacaaaaagtaatttccagccatcatgtagcttacattctggtggggaaagagtaataagtaaagcatatagtttattacatgatggtaaatgctctggagaaaaatttaaaaagcaagaggatagggattgggaaaggctgtaattttaaacggagtggtcagggacagtttcacggagacctttattcagaagttgcagggaccaaagctatcttacgggagtttgcaatgagaatttctttgcccatgragtccttgccaagtctatgtcttttctgagaattctctcccccttgatttcagccctgtttgatttctgacctttgaaatgccagcccccatgctgccgttgtgtggggttccgactggacatccagaagtctccgtgtgtgttctcattagctttcactctgggggagttttctgccacaatgtgaatcacttattttgctggcagcagcagttgacagtgacactgatttttaaagcctgcacatttcacatcagaaaagtcctggattttatgacttagctatgcttagaggataattgcaacaagaagtctcccctgcagccagcttattggagctgagacttgtataagagccagacctggcactttaaacagcccagcaaataacccaaaacaaaaatgaacaatgcacatttttatctatgctgctcttccccatcatgaacacatgcttctttttttcctcgccttcaccctcaattttttttgtggaaattcaatggttgactgtaccaagccagctctctgggtgagaggttccttctaacaaggattagaaacccctctcatgtaggaagaggtggatttgggggattatatgatccaaccctctacctttggacagaatacaatcgagatgtctccccagtacacagaactgcttttccagcaagttctctttgttaagccattctggtatccctcaaatcccttgttatgactatccacaattctccatgccccatgaccctttcttagctaaaatgaaaaataattgcctagttccctcatgtagagaagttgagctattaccttgacttcccccttctcttccaaaaaagattacaattcctttaattttctttcccatcctagggtgtcctctttgctctctccatattctccaaataaaaattcaaaactgagcagcaaatcctgtgcctcttcatccaacccctcctcatcatgaatcattatcactcaggaagtaaggacctggtttacyatctgagaactttagtcctaataatttctctacaccaacttctagtcctaataatttatccgtataatgctcagaaacactccgagattctcagtaaaaaaaaaaaaaaaaaaaaaaaaaaatcarggaaatcttaatggccaaagccataggtccaaaacccggcgttccctcccamccaactttccaggccattttctccaatagcccctcatccctgaccttgtcttccagcctccctggaccatgaatgctgctgaaggctctcactttgtacttccctgggccccctgcccttgctagtgacttctcctcccctctggctgtggaaagctactcattcttcaagacccagttcatatgtcctctctgtcaaggcttcccagatgccttcacagatggccctgcctcagggcctttgcacctgcctttgctgagaacactgttccctccaatctttgcatagctggctccttcttmttatgcagatctgagcccagagttcactttctcaataagtcttccctgaacactttacctaaagttgcaaacccccattactctctatctcatttgtatgttgttttcttcatagcacttgtcactatgtgaaattactctcttatcatcagtcttcttccacsagattaaaaacaccatgagagtaaagggcaaggtccttattttctgtgtatttgcagcatttggtgccgagaccatagtgagtggtsagacaaatgaaagaaatggctgcttccactctgttagtggcatcctcagacacacagtcaccccttgtatctcctggggattggctccaggacatccccccatctctacttgagatcgcccagtaggaatattttgaacaaattcctttaacccatggcagaggttgccttaatttcaatgtgagaataagaaggtgaaattttgaaataagagattgaattacttatcagaaacgaaagcttcttagagcaaatttaaactctacaaactttggtcagggatttgaacacatatttccttccccctcagtttctctcacacagacactgctgatytcagtaatggccctaaactttcttttctttttcttttgcattttcttctttctgcacatgtatgaatgcaagctgaatagtcaagttcctgaaatgggtcaggattakgtttgccttaaatctttttctcaacagaagccaaacacttaaaagaagggagatggctgattgaattctggaacaaaagttacattcctaggctcttggttaatttgagcttggctagagggagaaagcgtgtgtgtttctgtgcacaagttacactcaacacacaccctctggaaggtgggggtaagcttcagtcccgrctgtccgtacagagtgtggttcagaggctgccctttaacctgtgtggccagagagaataaatcaagccagcagtgctgtctccctgctgactgaaggygcccggccttatcaaggagcccaaatgtcttgtgctcacagctgctgtgacatctggaagcattaacactttgttgccagcatgtaggctagttgaatgccgatgcgtaggtgcctggtgttttctggtctgctacatgaataggcgtcaaaagttggtggtgaggagtttgcttacgttcattccttaaaagcaacatgacacagagccttgccatggcaggggtgatgggttgttaccaaagtcgataacaggaaatctcactgaggataaacagggctcatcggccattgccgagaaacacatggttctcatttaacctgccaaggactaattgtgtatgcttcggaagcgcaaaaacaggaaaacgcttttctgacatacaccccaagtttcttcagaccaaaaagaactgcctcaatgttgttagacgctgagaagtaatgatctccccagctgtcagggagccaacctcacttacttctctttaatctaaacttatgacctaaagcatatttcaggcctcccatgaagtccttgaaacttgagacttaatgaaggacactgaggtttcacttttcactgctctggtgtatgtactctcagaaaagcagtggaagaggttagatagatggtgatgtaggaatcatggcatccagaaaatgagtgtgatttaccctttgataaaagggaactaataaagcaatatatgcaggaaatgcagagacaacccagtgaataggtgtgctgctttagcctttaagggaagatgggtctgagcttcattctttaccttaagatgggtccaagagctagaaccagaatttaaacaagcagatacaattccaaggaccatgttttgtctcatatgggggctattcactcatttattacccaaatcaacagaccattctgcttccaaaatatttcattatctgtggaaggaaaacatttttggtatgcatgtcaagtgctcagataacatatttatgtatcgctttttcactaaagagaatctgacsgcatctggaaattcttttgtgtcactgcctctctcagactacttcccatctgtatcgctttaactccaataaaaggccatccccatgcctgggaaatgggctttgtctggggaacttgtctttctctgattacatgtaaattaattaaagcccatcccgttttacagggcagcctggtggtggtggcctgcactcttgactttccagcatgttggcctgtcacacgcaaaggaagagggaggaggggaggatgcaggggcattgttttagccaaaccctaaagctgatggaaatgaaatccactggcttttatcatgagaagtgaaattgttcatgaaataatggcagcctcatacagaggctgtgcattggattatactcaacctttcctctgaaacgttggtctggaggctttgcccctttattttcagtttcagatttgatctcagtaacaccctgaccttttcagactccataccacttttcacagggatgactgccttaagggatggggaaagggttagagaaagcaagtattttatttagaagacagttttcagttagaaagggagaagacatctagagttaaagttacgatcttttcctttctgtgcttaagtgatactaggtcattctttaacttcttgctccacctgctctatccccagctctgcaggtttggagtggsctgtcatgtgattttgtttacccgtttcggttcaaagacagaactctttatttgaacactgaagctagcagggactgtccaaagccagagcccctcatattagcctagcttatgttgttgtgatcatcagactgtttctgttttttggatttttgtccwtaaataaacaccttggaaccactagctacacagaggggtaaatatcagaaaatccaaatttggtgcactaatgaacacggggtctcttttcacaaagcaaaagaccatcattcttcagaaggatctcccaaagaatgccattgaaaactcctcattaccttcaaatggggtgatgcacacacragtagcatgaaattagscatgttcatattaaggagcaatctaagatcattattgctgtttctctggccttatattaaatagtgtcattgcarttgaaaaattagagtaaatgaacagagcctgtgagcatccaccctttgtaggttatcctgagtctgcattattacagggtcttgaaatgaatggtgatacgtgaaagtatttktcctaggattcattaatattattatatttwagtctttggtcaatatgaagaaatactcaatagtaaatcatagcaacatgatttaacatgagatataatttgaagggctctttaaggctgctaagcaaccatgaatcrtggtttgcatttttctagatggataatatgaagctatcttatttatctttctagaactagacaccttaggtcaggctaatcaaccagctggtatcatttctcagttattgtatgactactatctttatttcaaaccctgaagtcctaaaattaatgtcaccacagccattgtagtatgtgttcagccgcctgtgccggaataggggcttactgtcttttgatgccttggttctcagagtaggcaatgggtaattgaattagcaaagtagacattcaaaacattctctgagttttcaaactcaaggagcgtgtgacttcagagaagcaggcgataagtcagggggtgggtcatgtttacccggttgccgtcagctgcgattggtgtaatatgatatggaaaagtggcccagggatgtaactgagaacataaagtcaatgaataacacagaaacgtgagttaacaggaaacacatgttattctaaaatgaacctaggtcccttttaacccaagccaattcaacaaacatagcttttagatcataccttttaggtttttttttttttacccaaaaaccacactggggatgactccagccgtggctcatggggaacactactgtcattcagtttgttcctctgctaatttaatcttccattttcctttgattggtgatgcacgcattcaaggggcatcaagccatggacactttggtgaccctccctatccttggaaccccagccagctgatggggttcgtactggtaaaatggcaaactggtagaggcatctatgcttctgcctgttaaaaatatactaataggccaggcgtggtggctcacacctgtaatcccagcattttgggaggccgaggtggacggatcatctgaggtcaggagtttgagaccagcctgaccaacatggtgaaaccccatctctactaaaaatacaaaattagccaggcatggtggcacacacccatcatcccagctactcgggaggctgaggcaggagaatcgcttgaacccggaaggcagaggttgtggtgagctgagattgcaccattgcactccagcctgrgcaataagagcaaaactctgtctcaaaaaaaaaaaaaaaaagctaaaaatatcacataccaaagctgcaaattatttctttaattttgagcgacgttaatccacatgatctaaatcatacattctcacacattctcctacttcaaagctttccctggttcctattaccttctgggtaactacctccacccacgccatgtgtaagacttgtcacatgccctcctctgtgtccaggcccatctcccctgcctcagttctggccactgctacccagcattcatccagtgcttgacctgtgttgaactccttggctctctagactccagtctcaagtttgcccctctatgcttttgcacatgctgttctcttcctggaattcctttctccctcctccctttactcctgagaagttttctttatcctttgcgatctacctgcaatgccacttcctctgggtcagatatgagaggggctgacttcctggtggagggagaaatttgtagacaagatttataatctcattaggagctgtgctctgaggggctgcgaatggataaacagtgaggtggtggtcaggtggtgtttgggcttcagtatgtggaatagctactatgcagcctggtgcaaggaagatggagtgggacagagcatcctggtggggattttcgagatgtgcttctcagacatgacaggttacttaacctctctgggcctcagttttctcatctgtaaaaaggggtggaatttaaggagagcagaagttaaagcttatctgtcacatccctgataaatgtctctgtgctgctgttctagctggttgaacctcaaaaatgtcccagtttagacaataaattatatggtcacccttctgagagcagtaccctccacacatgggtgccgtaaggattcagcatatgccgttctctaacatactaatagcacctaatattgtattatttccattgatatctgaactcagtatagagatgggaccataagcgatttcccaggatgatgtgcttggagcatgacacttagaaaaaagatcagaggacttttctgcctcttcagtgttcaaacccaggcacagggactgtgtttggctgctctgtttggggccctgtgggaggaaacctgtgtcctctctcttgctctgagtcaacagacaactcttagaagtgcctgaytgagcctacaacatggaaatgccatttcctccaagccgtttatctgaccacctcagcctggaaagtaacagctcttgacttcccttctccacctgggatcagatgacgacaacatttgaaacaaagggtctgctctctttctcagtatcacacctatggaatcagccctgattcacacttcaaacccactacttcatgaagcaaggtcttgccagatcccctagagtgaacaggggattctttatcctctcacaggcctggcaccgtggtrgcttctgaccatgacagctcctttcactgaggctgacccagactctgccaccaagtgatggccactccttgggctcccacagccagggttcctgacagcttccccagtcaccaccatttcatggtttcagtttgcacaatgtcctctttggggtaaaggggaggacagatgccaacagaaaaccctcagtacctgccttggtagaatacagccttgtcactgtgtcctgcatcctcctktccttgtttgggtgcctggtgaagtccttttgttcaaattctaatagccatggacctctgccagctcccagaggccctgagagataagcagccatgtcatgagaagcatttggactccggtagcctgggaaataaatgaggactgactgggcagagaagagcaagggggcgatggccacagagtccttagccagccaaggaaatgacattgttggtcattggccggggatgcttgggttgtctgcaacacatgaaaaaagcatcaygtccccttgactttgagcaaagagtgcggttaaaaccaagttgtgggaggatggatagtcagtaattgtttatctgtgtgatgagataaggtagtcccctgctgtaatgaaaatgcacagacagttcatgaagtgaggaattagcaactaaggacaacctgagtgactacatgggccaacatcctcatgtgtagatgaggaaactgaggccctggagacccaaactggcacggctgttagcaggcagagctagggctgaagccaggactattgagtattcatcaagagcgtctgtaccacagaacttcactggggcccggacatgaccttggacaagtcgctgaactcggggacctctgtttccttatctgtcagctgaggccacaaggactgcatgatctcgcagctgccttccagaaacaacattccagaatgctctgttccccccttccagcccaagagactgtgcagaataggcctcttctcagtcagcaggcacttttgtctcccatggtctaggcaggagtcatttttttttgctacagtggtggaaatgggtcaggctggagaatgctgaggtttccaggctagtggtttcttcctctgaccacagtaagaggaaaggaagctttccctccacctctactcctctgtgactcctgccccagccccatcctcagcttccacctaagaggtagtgcaggaaagtggtgataagcagatgtctgcagctgtgtgacgtgtgtcccagcccagttctgtggcctgctacctggggagcctctggttgtmattgggcctcctgttgcctctcagcttgcctccmtctgtaaaatggggacagtaggccaggggctgtggctcacacctgtaatctcaacactttgggaggccaaggcaggtggatctcctgaggtcaggagttcaagaccagcctgaccaatatggtgaaaccccatctctactaaaaatccaaaaagcttagccaggcatggtgrcgtgtgcctgtaattccagctactggggaggstgaggcaggagaattacttgaacccaggaggcagaggtttcagtgagccaagatcgcaccactgcactacagcctgggtaacagagcaagactccatctcaaaaaaaaaacaaaaatgtggggacagtaatagcacctgcttcagggaactgctgtgaggactgaatgttaatgtgtggaaagcaccgagagcctggcgtgcagtaagggccatgcaagtgttaggtgccgttgtcatggctgtcacattggtacctgttcaacacacttagaggaccgcctccctccaccttgatgacccttggtaggtactgagttcctgagttttagctgaggactgaaggtgtgactgcaataggattagctggtctgaatcagacttatgtagcaccaggcaaccttcaatctccttttgaaaggggaccaccctgaacctttcagaaaaacgttgctttccccgattgaagtgattcccatgtaaccacagtcgggagcacaactggccaagattttcattcaccgcagactcagtcctcatttcccctttccagatcccaccaggggcagatgaggtgtcacattgcatcacatcacgccatcgccattaccctgttcacaggccaccccagaaactcccggcgggagacagaaactaacttctgagctgtgactctgccccttggggttgacactgaggcttaggctgtttctcactcgcttgccctgcctttcccagctccctgcccctctccgctggcgtcttgtggccagatgacagtgctagctcttcacacctgaagcacattagcaacactggctgggctggagctctgctcccaagcttcctctccctgcctagaaacctgaagcaccgatgtgcagagcaaggaggaactctgctcccacgcctgattttaatgagggatggatgcatcctgcagggctcagaggttctgtttctctaaacccagaccaaatgtgtttgggtggccaggcctcgtaatctcagcagaggaatgtgcatgccacagggctgcagaaaacagtttccagcggtctgtcagcagatgtccactccagaagacagacagggaatttggagacctacaggctttggagtgaaaaagtgatggatattaagagcacaactacacacattcggattctcaaacgcccaataaacataaatattttccatccacaatgtactatatatgcctaaatatagggcaagccccaaatagcacatcctccatttccctaattagataaatttaactctcttttttttttttgccaacttaataggaatcagaactatgattgcctttgaggtggggggagtgggcagtgggaattgactggcaagggactggtgggaactttctggagtgagagacaagttctgtactttcatgggggtggtagttactgggtgacataattcatcaaactgcaccctttagatctgtggattttaatgcctgtaaatttacctcaataaaaagaagtttggagaaatgaagaaataatcaactatctgtgtataatgtttaacttaatcatgtggttgaatgcttaaaattttataagaatgatatattaatctataatactcttcattcttatgtttcacacaataattttatccaagtgtgcatcttctgagattgatgggtttcatttctaagccacatttttagtcagcagtttaccagaatatatcatctacaatttgcctaatttakttgaaatgcagaacttcttgaatccatgttggtgctgaaatttgattggcacacaccaacgcccacttgcgtagcactgcagcagttgttttcctcatttgtcttgcaagtgaatattcatgctgctccccacatcaacagcttacgtattgctttctaaaatgggctttcaaatatttattgcaactttcaacaattgaacccaaggaataattaccaaatcttcattaaagctcattgcctccttcccattgtttccctctcgtgacctctaaaatcgtccaracctgatgttgattgagatcatttcaggctagtgtgttttccccaaatgttgtcgttcaaataaagtaattgaggctgggtgcagtggctcatgcctataatcccagtgctttggaaggccaagacaggcagattgcttgagctaaggagttcgagaccagcctgggtaatgtggcaaaactctatctctaccaaaaaaaaaaaaaagaaaccagcaaaaaacaaaacaaaacaaaaactagccatgtgtggtggcatgtgcctatagtcccagctactcaggaggctgaggaaggaggatcacctgagcccaggaggttgaagctgcagtgagctggactactgtacttcagcctgggagacagagaccctgtctccaaaaaaaaaacaaaaaacaaaaaacaaaatttccaaattaytagacacttaaattttaaaggacagtaagtcccaaactgtgagaaacttttataggcaacatcctcttttctaatagtttaacttgaggatataaaccttcaccttatttattttcagacatatatagtaaatcctggaatgtattcagatcaaagataaaatagagataaatttagcaaattttggtggtcttgttttataattcactattaatagattagcattgttagctttagtttatttgtgtagcaaaaactgaccaatagaatctaattaaactgaagagcttctacacagcaaaagagactatcaacagagtaaacagacaacctacagaatggaagaaaatatttgcaaactatgcatctgacgaaggtctgatctctgtcatctataagggacttaaatttgcaagaataaaacaactccattaaaaggagggcaaaggacatgaacagacacttttctaaagaagacatacctgcagacaacaagcatgtgaaaaactcagtatcactggtcattacagaaatgcaaatcaaaaccacggtgagataccatctcataccagtcagaatggctattattaaaaagtcaaaaattggcctggtgcggtggctcatgcctgtaatcccagcactttgggaggccgaggcgggcggatcatgaggtcaggagatggagaccatcctggctaacacggtgaaccccatatctactaaaaatacaaaaaaaaattagccgggcatggtggcaggtgcctgttgtcccagctactcgggaggctgaggcaggagaatggcttgaacccaggaggcggagcttgcagtgagccaagatcgcgccactgcactccagcctgggcaacagtgagcgactccatctcaaaaaaaaaaaaaagcaaaagtcaaaaatcaacagatgatggagaggttttggagaaaagagaatgcttatacactgttggtgggagtataaatgtgctcaaccattgtggaaagcagtgtggctattcctcaaagagctaaaagcagaactgccaattaacccagcatcccattactgggtatatatatacccaaatgaatataaatcattctaccgtaaagacacatgcacatgaatgttcattgcagcactgttcacaatagcaaagacatggaatcaacctaaatacccatcaaagacagattggataaagaaaatgttgtacagatataccatggaatactatgcagccataaaaaagaatgagatcatgccctttgcaggaacatggatggagctggaggccattatccctagcaaactaacacaggaacagaaaaccaaatatcacatgatctcaatgataagtgggagctaaattatgagaactcatgaacacaaagaagggaacaacagacactggagtctayttgagaatggaggttggaaggagggagaggagtagaaaaaataactattgggtactaggcttagtacctgggtgatgaaataatctgtaccaaaaacctccatgacacaagtttacctatataacacacctgcacatgtactcccaaacataaaataaaagttaaaaaaaaaccaacagcaaaaaaagtttttgttccctaccatgaataaaaagttgaaacattcttgaacaactatattttactcaagggcattatagacagggcaatttaacagatgcctgtggttagccatgggattgtaagcacaattctaaattatgaattactaattattaattttctggtttaacctcacatcctgtccagccttcagctacaaccagtgtgatatggtgatatataaagaagacttcatttttctaacagttcctcaatttaaacatcagaaagagtgctgtycttaaggaaatcatcaagaaagactaagcaccattgttttgtttctgatgttgctgtcactcagcaccgttgccattgctgtcagaagcaaaatcaaatcactcaccaagagctcggcaagcatgcaggtccccgtctggctcagggcagagactggtcagttatttttttggtagcaaaactctggctttagagttggaccatgagcagtcctgcttgctgctcattccctttctctagaaggacccctawggagttttacagcaccgtgggggctttctagaatggttgaaaacctctggcagcagatcatccatcaggcttggtcccaagttccagacctgggttcttgactccatgactgttggccagtgacctaagttcagtctcattttcctcattcagacaagaattgcttgtaaggatgttcttaagtgtgctttcaaaaccatggagtataaggcttattttactccttaagtcttcctrtttcctagtcacatctcatttgcatgttatatgccatctcatcaattattgggggacctaagatccacatttyctattatttggccctgttgatgctacaacttctgcctttcagcttttcagccattgttctccacttcaaaatggacaaggaggaaaggtgaattggggttctaccactcctscctctacaataagaggctccagcatcatgattcattcttgagaatgactcctctgacaggcctcttttcatttgcaggtgggccaagagaagggaaactgctctttccagaaaaacccaactccctgcatcatccctcaagaacaagaaaatatcttccacacaatatttgcttttttcacaaagtctggaagaaaagtcttggtaaggatttgtttagtggttggggtaacacgggtggtcctcactcggaagacaccagttttctatttgatatttattatttcctaaatctggttttaatcaatttgacttacaaaggcacagactgtggtcaactcctaattttcagtctgaggtttcaatcaaaatgttaaatttacattccaaatcctattacctggaaaagggataaatctttgcaacccaccaagcacaaagtaaaatgtttcttccactagaatgagtctaaacaagagtgattattcttgtgcaaacattttgggaaactgtttgataatatctactaaaacaaaacgtgtgtatcctatgacacagccattctactcttgagtatatccccaagaaaaatgagtacttgtgcttcccagaaaagacatgaaaaaggatgctcacagaaatgttaaaatagctgaaagctgagaacaatgcagatatccatcaatwggagaataagtaagcaattgtggtatatccatacactggaatattacacagtaatgaaaaataacaaactactgctaatgaatgaatctcacagacagaatatattgagtggaagaagctagagacaaaagccacatattgtaatatttcacttatacgaagttcagaaatagcaaaaactaatcatgatgatagaggtcaagaaggtggttactttcagaggaatgtggatgggatggggcatgagggagcctgcttagatgctggaaatgtcctacatcctaatcagggtggtagtcctccaggtataaacacatgtaaaaatttttaaagacaggccrggcacggtggctcatgcctgtaataccagcacttagggaggctgagggggtggatcacctgaggtcaggagtttgagaccagcctggccaacatggtgaaaccctgtatytactaaaaatacaaaaattagctggatgtggtagtgggcgcctgtaatcccagctactagggaggctgaggcaggagaatcggttgaatcagggaggcagaggttgcagtgagccaagatcgtgccactgtactccagcctgggcaacagagcaagactctgtctcaaaaaaaaaaaaaaattataaagacacacacttcagatttgttctatttactatatttgttacacctccatttttaaaaagtgcaggtattgaagatggaatgacaatgcttttccaaagcctccttttttttatctttggttacatttctctaagctccttatttcagccctggcacatctcacctttatcatttcctttctcattcttttctcctgttggagaagggtgactgtttgccacttgaaaggttgggtttttttttttttttttttttttacttacatagtgagggtgatattgttgaaagcccttagacttgttagatgtagtgatacctagtgattttatagttacgactctgtctggctgaaaattttgccgtatagatgaaacatcatcaaggtatgtatacgcattttggaacctatcatataaaaamgaaaacttttgtaacttaaatttgggatttatgttttyggytttttgtttgtttgtttgttttgagatggagtcttgctctgtcgcccagggtggagtgcagtggcatgatctcggctcactgcagcttctgcctctcgggttcatgcagttctcccgcctcagmctccccagcagctgggactacaggcggccaccactatgcctggctaacttctgtattttttgtagagacagggtttcaccatgttggccaaactggtcttgaactcctgatctcaggtgacccccctacctcagcctcccgaagtgctgggattacaggcgtgagccactgcgcccagccgagatttacgtctctattgtaacttttgtgttttcttgaggaagtgtcacatgacttcttagccctcttattyacctacctaataaataggcatgaaagtatatttgccactacacaggtggaagtcacataatgtaggaaacgtgtctgtgttcaaaactcataagaatgctttcagaatgcaaaatttaagtttgtgggtttaaaaaaaaaaacaattatttctctttgtgaattcatccaattcttggtaggataaattagtgagctgttttctcccagttgcttgacttaaaggcatgctctggttcccactgggtgggaaatcccttgaatgccctctggtggcgagaaagaacgattgcatcttcttgtggatttcctctgcctggaattgccttagtcaccaagttcatggagcccactactctgtaaattgttgtggatttgtctttgttcttaattccattggaaatttttctgacttttcttctcaggactgtgaaaaaccaggaatttcttgcctaacagcacactgtaactttagtgctcttgctaaagaagaaagtcgtactatagacatttacatgctgctgaacacagaaatactgaaaaaggtaagccctaatgaaccgcacttgtggatgcatttagaagcatttgaattgttgacatctgattttgggtaaaaaaaaggaaaaaggaaagcatytgaattggtgtcctcatgacaatctggctgcccccccttttggctgtctacaagagactgtttttatttttatgtatttagggggtacaagtgcagacttcttatatgaatatattgtatcgtgatgaaatctgggcttttagtgtacccaatagtgaacatggtacccaayaggtaacttttcaaccctcacccccctcccacattttggagtctccaatgtctgttaattccactctttatgcctatgggtacccattacttagctcccacttataagtgagaacatgcagtagttgactacttatgagttatttcacttagggaaatggacttcatttccatccatgttgctgcaaaagacataatttaattcttttttatggctgagtaatattccatggtgtgtgtgtgtgtgtatatatatatataccacattttctataaccagtcatccattcatggacacttaagttgattccctatctttgctgttgtgaatagtgctgcaataaacttaccagtgcaggtatattttttatacaatacttctttccctttgggtatatacccattagtgtgattgctggatggaatggcagttctatttttagttctttgagaaatctcgatactgcttttttgattgtactaatttatcttcccatcaacagtgtataagtgttcccttttctttgcatcctcaccaacatctgttgttgtagttgttgttgttgaactgtttagtaatagtctggctgccccttttgaaacttttccagcaagtgccattggtaattttgctggtagataatgccarggtaaaataccagacccttgctactcaaagtgtggtccgaggaccagcagcatcagcatcacctgagagtttcttagaaatgcagaatcctgggctccaccccagacttaataaatcggcatcttcatttttaacacattccccagggattttgtttggccatttaagtttctcatgctttagcttgcatcagaatcacctggagatcttgttcaaacacagattcctttggggtgcagtctgaggctctccagttgccacaagcacccaggtgatgccagtcctgcagtctagggacctcgctttggatgaaggttggctaaccttttctgtaaagggccagtggtaaatatttcaggctttgcaggccctacagtctcttgcaactgttcaactctgccattgtattgtgaaagcagccatagacaacactcaaataaatgggcatggctgtgatccagtaaaactttataaaaacaggcagagggccagatttgacccatgagtcctagtttaaatgacggtttgttttggtccaacttttgaacctcaggtcactttgctattatgagtttatcacaggtggttcattaaaaaaccacctcaaccagtgcatcggtggctcttgaagaatcatacaaatttcctatgatttattttaaggtgagagctgctgagaggccacttccaacaagttgctgtaaaaataattacatgtgaagataaaactaaatatgcatgttagcctcagagattccaattatttttctttagaaagactaaatgtgttaatctgtacaaacctatccacgtgtgaatgaataaccttagaaaagtcattctgtggttatttttaaataggcacagaggtaacacactgacctgagaggatgcaggcatcaggggatgtttttccattttcaatctgtagccgttacagccctcacacacctgaagagagctgtgcatagttctggtttctctggtttgctctggagggaaactggtttggggcaagttggactcacactgcagtgctttcttctccctttgtacctctccctttataaaggacagtgttggaggaggaccaggcctgacttagagcaccactggccatcctctgattccataagggaggctggaaaaccccacgtctggagaagtaccttcctgaaatgtgtccrcaggccaggctggaggactatgcctctgcatatgtacctgtcctgtttgtattcttcaaaaatggtgctgcagacagttttatygcctgtgccatacttgccactgtccatagagccctggtgacagcactggtggctgtaagccactctgatgtttcctttatcctcaacccagatggctgctgcttgcacttcagttatttgcacttaatcatgcacagctctgcagcctggttcttctgcttttctatcccggcagccagtggtgaccctttgccaaggaacatgtcccagtgactactgtccccatgggccagccaggccagtagagccgcaggcaagagagctgaaagctgtagggtgtcatatgaagccttcaaggctcattctccatgtgccctttcagcagaaaccaggagcacttccaggtgcagagaaaagcttagaacaaagttgacctggaagccagatggggccccagctgctcccagagcttcagttgccctgaagccagctacagcctcccttggggagtggagcccacatggctccaggcctcccgaaggatgtggagcagcgccagccttgtggtttgcctgggcctgcagtcgtgtttattttccttttgacctcaagatctggccccagacaagggaatttgaggttttactgttttgaccttaacaagttttcatttgaaatgtaggatctgatttttaaaatcactgtaggagccgggcgcagtggctcacgcctgtaatcccagcactttgggaggctgaggtgggcatatcacaaggtcaggaattcaagaccagcctggccaacatggtgaaaccccatctctactaaaaaatacaaaaattagcctgrcatggtggtgggcacctgtagtctcagctactcgggaggctgaggcagaagaatcgcttgaacctgggaggtggaggttgcagtgagccaagatcgtgccattgcactccagcctgggcaacagagcgagactctgtctcaaaaaaaaaaaatcaccgtaggattcggatttttttggaagtattcttctttcagtctgtaaggcttttctcactgattctacaaccgtgggggcccatcctgtgccagactcctcgtctgcttggcctgtaacgttggcaattatcatcatcattatcgttattaatatccaagtttatttttattyattttaatgtttttatttaaaaaaatatttttagagacaggatcttgctctgtcacccagatgggagtacagtggctcaatcatagctcactgcagcctcaaactcctgggctcaagtgatcttcctgcctcagctagtcctcagctaggactgcaggcacatgctaccatgacaggtgaatttttttttaatcttttgtagagataggatgtttccccaggctggacttgacctcctagcctcaagtgatcctcccacttcagtctctcaaagtgctgggattacaggcyttaaccatcgtgcctggcccaagattattrttattattcaagattgaaaatacagcatatcctgatacataaaaccccaactttataaaactgttaaattggtaaaagattatttgttgcttaaaattatttcttgcttaaagtgagttaactggagtaactcttttgaatgacaagcttcccaaaagcatttaaaatgtgtcttatggttgttttaagaaaagaatgataattggtgcataactcccaagtcacatatacagaccagggtccctgtgtgccccaggaaggtctttgtggkttctttggcagagatgagcaaagggtacccttggaactgttttctgtggagtcctctaccttcctgtttctttgagggtttaaccaaaggtggcatttaagtgtaagctccttgcatgacaggcaagctgggtagatgtaggtggggacaccacargacaccttgcctgtggagcccctcctgccccacaggtagaatgttgaatgcactagttctctgctatctgtttccacgacagaagccaggctgcccttctgctccacaatcaacctgtaccactggcttgaggttctggcttctccccagaccacagtttttccagtccctgtcttcttccaaattctttctccatccctgttttggcgccattttctggttatctggatcagtgtctttgaatctgagcccacaggaagacctctgcctgcctctggctggggggtgattccagagtcttagctgtgctcccttatacccctgcccctttctccttaattcataagccagatatttaccccttccccatctctccatcaggcatcctctttcaatgtttaatggttttgattccaaaatgacttcatttaagagcaaagaaagagttaaaagcaactcatatgaagggtttgagggttgtggtcaaggcaggaagatgcctataaaatgtagatcagatgccttctgtggaatgccaggcctagatttgctctacacaattaaacagctttatttatcctcaactctttgtgaacatgtcaatatcartatccaaatatctggctctaactgcttggaaaccacagcacacatcttgcgtgtgttgattactggcaaactccatcatttcccaccatccaccatgatctgcaaagaatccttaagagagaccctagtctgtgtttatgtgggtgcctgggatggagaggtatctagttcaatgataaaatttttgtctgggctacatggaatcatggaatttcagttctgcccagtccctctcaaggcccagccattatcatagaaaaatcytcaagtaagttgtgttgtttcttccacaggacagttcgtctgtcatccagttcatgtcccgcgccaaggtgaaggtggatcctgccctaagggtggtggaaatagctcatgggaacccagaagaggtgacggtgagtcagccaccccaggacagccctcctcagagggcaagggaagctgggtgacttggagacctggagctggaatttgagggtcaagacagtctctgagccaagatgttgggtttgtggcagacccaagactatgcctgccttggcttccargccccccctggagaacttctgtggttcgttcttgtgatagcattgtcctttaggatgccatcattatgtgaatgtttcctgctatgattgtccaaagggaaaatggtctggaagtacacccaygtcaacagagttggatttccactgtggagccaggactatttatatctttcttagacctttcctaagacagaccacatctgccttacccgtcacattactccatgggtaaatactgtgttttggtttggtttggtttggtttttaagagacagggtctcactctgtcacccaggctggtgtgcagtcataactccctgtagccttgaatacctggcctcaagggatcctctcaccttagcctccagagtagctaggactacaggcacactaccatgcctaatttttaaattttttaaaatttttttgtcgggatagggttccacgatgttgctcaggctggtctcaaactcctggcttcaagcgatcctcctgcctcagcctcccaaaacactgagattacaggcaaacactgggtgttttaaaaacaagttgtttgaatgacttaaagagattacatccaaattgccaagacctagtaactgctctttaactatttaccaccccmttctcctccataaagtgcagttggcrccaaggcctcagagacacgggagggtgtggcaaaccacgaggctgagagtggaggtgtgggagaggctggagggaagctatggccttggaattttattgccttttattgttgttcttgcaggagcaggggggttgaggggggttcatcctgtatttgaygcccacactcagatcccaggggagtagaggaggagacagcagccgatgcacttcttttgccagtgagctgtgcaatgatgctacctgtctgcttcccttctgtggaatttaccctctcttagaacagtcagtgttgctgtgacacatttacaaaagtgataagtttataatgattttgtgcttagaaactgttgttaatttactctctgacaacagtggagacaccacatgtcaaaatgtcagaatggggttcaaaccaaagactactcttacaagaccctggttgggaaagtttcatatagaaaataaatgctgggcaggcggatcatctgagatcaggagttcaagaccaacatggcgaaacgctgtctctactaaaaaatataaaaattagccagtcgtggtggtaggctcttrtaatcccagctacttgggaactgaggcaggagaatcacttgaaacccggaggcggaggttgcagtgagccaagatcatgccactctgctccagcctgggcaacggagtaagactccgtctcaaaaaaacaaaaaacaaacaaacaamaaaaaaaaaaccaatagtaataatgcttaggacctcaataaaacttcagtcctgtccgtttttggtgagcaagagatgagaacatcagggagtctgggatgaaaatgaattcctgaatgagtgaggggttgggcattccctactcagtgaggagaatgagtgttccatgcagacttttatgctctacccacaagataagttgtccaagcactatttttgtttgtttgtttgtttstttgtttgtttgagacagggtcttgctttgtcacccaggctggagtgcactggtgcaatcatggctcactgcagcctccacctgttggctcaggccaggcactaattttaatgatagaaaccaaatggaatgatgctgggtcatttactacttagggtcagtttttctggcaggtcagatatttggagttggtgtttcccttttcttccctgccttctggccatttaactgctaattcagacctccacctgggaagtgaaaaagaaaagtggttccctgctcattgtcatagttctggtttaaaagttttatagaatgaaatacttgcccaacatgagaggtttagartgttctggtaaaccacagtgttaataagtggaagctaatggaaatagctaacaggttttctacacgtagaatcccttgtgtagatgaaaaaaaaaaatcactgggcatattgccttccattataggactagactgtgggatccaggaaaatgttgcttaacatctcgttgttggattccaagtcatctgtactcccccaaaataccacttccawtaattactgttccattttgagcactatggtgatattttcattatcaagagttcttgggaagaggccgagaggttttttttagcactcctaagaaaaaattaacacacatgggaattccacaatgccccttctccctcctttccatgactttgccttttcagtccatgagctacaatgaagttctacaatctgttgttctcaattttcctggcaggaaaaaaaaaatcttttctgagtaggaaggtttgcctttttagaacaaacacgwtcttccctgcgtgattcttctgaatgcctggccttctgtcaactatcagtctgaaggggaatttccatagagcctcgccaccaaatttaaattaggcaaagtttcaaagattttagattaggcaccaaattgttatggccttggaaggaacaggaaatgtacttgcatttggtatcgagtgggggaggaaaacaatcagatttttaaccacataacgtgtgcacggtggtaaatttaactgatggagaaatcaagcaattttcctgtgatcttttttaataggagttttaaaatgcattttatattgagtagttatttcatgttttcttaaaacaattattgtattgaactaaaaataaactaggtagtttgttcacataacaaatctacattcaaagacatgcaaacaaattttccacttagtccatttttctgttctcagcattactacaaatgcctcattctgttatcacgttgaattcttcagcatcttctatatcatttccagggcatctctgggaagtagtgatgcctgtcttccctcagaagcacactgataaccccaatatacccacaattcacacttttttccttctctgaggtatgctgttttttgkcaaaacagaaaaaacacactamtaggatatgaaaaacttcattctgggcctggttaggtcataaactacagaaccttaggtcatatattctcaccgggcgcttgtttctccactgcaaaaaataattcgtatttgcttggtcctttgtagtactttactgtttataartgtagtacatttatcttcatgatgacccttaaatttaagtaaggtagtattatgctcattttatagaagaaattcaatctcaaagaggatacagtctcccaaagatcccacaagcagtaatatattaggcagagctaaactcacacactgtcactcaatwtcctaatattggtacatgccatgctaataagtgtgctaaaatggatgaagcggcaatttctcaggtcccttccaatgatcctgtcctctgcttctacttgatattttttctctctttcaactagcattaacatccgaaactgtatatcatcaccacatttcatttaccatggttttttaatttaattattctttaaattttyctatttccatgttaaatccagagaaattgttactttttggaaagtttctactgctgcctgcctctgaaggccacgggacttacctgtttgtttgtcaaagcagaaatgcccaacattttgtaaacactaatttttttataactgtaaagatgattattccatacttaaaaccaattcaaaataaaataaatcctcaatactycttattccctggggtagtaattttaattagattctattgattcattattttctcctgtgtgcctttatttgggaaatactgttagtttaccttgctatcgagtctctttccctaacaagaaaatgtcagccttacgagtcaggaaagcttttactttcactatcacatatgaagaatgaactaaacacctaacttggaaagtaaaacttaaatgagggattcaggacatttcccaaggggtcatctgaccaatttaagagttggtatgatgtgcctaaaatagcaaattaactcttctacttataataaaggtgcagatgtactgattagacatgctgacatgtacatataaaatatgcctaaaccaaattaaaagaaaacaaaatatattccatggcaatcttgaaaagtcagggagctcaatatatattaagagtatgcgctcagccaggcgcggtggctcacacctgtaatcctagcactttgggaggccaaggcgggtggrccacaargtcaggagatcgagaccatcctggctaacgtggtgtaaccctgtctctactaaaaaatacmmaaaaaaaaaaaaaatgagctgggtgtggtggcggscgcctgtagtcccagctactcgggaggctgagacaggagaatggygtgaacccagaaggcggagcttgcagtgagctgagatcacgccactgcactccagcctgggtgacagagtgagactccgtctcaaaaaaaaaaaaaaaaaaaaaaaaaaagactatgctctcacaatgagagcattaaacatttggtaattaacataatttaatatgccaaaaatgagaaaatagtcaggatgagggatgaggagtacacataggaaakttttgtgattttcttcattttgattgtattgctttcttgtcttcaggagggaagattttgacttcaaaagtaacaaaatatttaagaagggaattcacatctttctgttctaattggtattcttgcgctattttctcagcagtccatgtttctggataaagtttatgattgttaagaagtgtcagtgcttctacaatggaaattttgcctttgggaatgctcttaatatttatcatatcaaagtgatgacctttcagcaatctgaattcctttggctcttgatgtgtttcagcagcttttacctgcgcggaagacacaagatctttggaatcaacatacacatcttttagaaatggcagcagcttgtcatctttatgagcaatctctcccttaatttctggatagagactaatctgctctcacaggagkctgttggtagaggggtgcctgggagcaggagagggcttcatcttgctgatttcccattctgctcggttctctcggttggaatgcctgatcctgcgagtcactgcagcccccatctcataacatgatgccctcaggtttacgccacttgtgggaacactggcacaggaagcctccagggcgtctggagcatgcacacatgtcctgtgattctttatatcttttatttttatgccatggtacaagttgtgctttacagagcatttgggtgaataactagaaatatrccatagattcttgaggctttgcctggttcactaatgacaggctccagggcgtttctcagggagcrtgttagcatgtttctaggaccagccacatcagccagacctggctctgtacagacccaaacctgagaatgccatgtgagacctgtgtgactgcagaatcaaagtgctggttgcgaggtgccaattacatgttgaatttcatcttcaacccaactctacttacctttcagggagtgatgagtagggggcgagaggggaaaatgcagaaagtgttgyttgaggcccacagaaactataaagatgaagaacaggagaaacstagttaatcatgccctggaaagctggcctgcagaaagaaaaggaatttatctctgagaaggccttcagaaagaaaatgagtaggctccggagacgttcatctgtcttcgtgcagccataaaaagttatcaggtgaggctgaggggtgaaggcgctttctctgatccctgaattggttactgaggcccacagaagaggaaaggacccctgaagccagaaactcccccaaggcaaatcaagactttatggaatcagctctgttactgcaagacatcccctcaaactcccgtctcagtctgtgtgagaascgtgcatgaattcttgctattttcttgatattttcaaatagcagaatacatgataaacttgtaagtccacagatgagtcggtaagctgctgccatatggagcatgcaccagactgaggtctttggtracagctggaaagactggctctgtctcatttcagcagaatcagaatggattcgaaggctatccagtggaagtgctcagaattgcgctggaaggctggagaaccagaccaaaaatcagagggatctggaaacctgagggctataggctgcgtccaggcgcaggaagtctggcatggtgtcctggacactggacacagctatccctggcttctctctacctcgtgctctggagtcaggcagaaacctttctactttctggagttgctgagaaggttcagtgataccagcatgaagctcctagaagaagggctggtgcatagctgctgctcagggtggcacagcccctccacagtcctgcccacatgtgagttgccccttcacaccactccctaacactgccctcaccaaagatgcaagcctggtatctcaaccagagaggcatctttcaacatggcaagcaagattactccaaaaaaatgccacttaccatwcctttggtgtactgcytctagaggcaaagtttacygcttttactgtcatgaaatagactgtgacttgtkatttatcatttatgtgaccaattatagttacaatcatgttccatgtgacaatagaatctttccccccttgaacctcacattatgctgagatgtaggatgaagaggagggttgttgaagggtcatcaccgcccccatcctatgccatcagcagtgggtggtgagtagttctttctcttcacccacctccccacatgtgagaattaagctctgaccatcaagaattgagaaaactctcggtatagttttccaaacacacgagtcatattttctaatggtcatcatttgcttatttgtttgatgaatatttattgagggcttgctaagagccaggcactgtgctaggcactggggactcgatggggaacaaaagagacatgatccgtgccctcccagagctggccgagggggcagcagtcagcaaggasgcaaacaagaattctatttccagttgaggttagtccccagggagtagcctgctttagattgggggtcgaggaatgtttctacaaggaagctgagactggcagatgagaaggaattcgcttgccaagcatgaggaagagtgtctcagttggggaggagagctgtatggagccccaaaargcttggcctcttcaaggcactgaaagaccaggtagcaggaagctggttagcagtgaagagaaccatggtagacctaggcagggtccatgccaggtaacaccactgggcacttacaaaggaaagccattgaaagcttctgtttggagcagggaatggcatgatccagtgtatgttctttaaaaatcgtaggccactgtgtggatggtggattttaggggcaaaggtggaaataaggagctggttagaaggctgcgattttcacctggcaagaggtcagggtggcagaggagacagagcaagtggacagtatgtctatgtcagtgaaggtgcggtgaccggtgccactcacacgtaaggaatgcttatcctggagggctgggagtgatccagtgtcatctcgatgcaaagccccttgcacagcacatccacggtggcactctgttaatagtggctgtcattgcataaagagatggccaaggagatgaaccacatgaaaaatgagcctccttctccccaaatcctcaagtcctggtcagtttactctaaatcaaagtttccagtcgtcatgatgagtatgatcatcatcattattatttttaggcaacagaacccatttctaaattgaaatatgcttcagttgactcaggggtgaggttcctggaactccctcttggtggcttccataccccctcactggacccgtgggctctaaagaagccactgctatggaaagttgtattctcagaaggttgcccagtccatcaaaggctttcactagatgctagttatacccccagtaactatgaacaagatgaaatttttaccctcaagacttccacagccccaaacaggtcaacacacayayacacacacacacacacacacacacacacacacacacacgtgcacacacatcacacccctgcagcactgtatgcatacgtgcccagagtatctgtgctgaagaggtcaagacaggtttcacagaaggagtgacccccgaacaagtattgaaggaatttcccacgtggacaaggaagatcaggcattcaagatgaagtcagatggtgtcttgggctggattctcaagaagcagaccctgagatgagggcatcatgtaagcagtttatttagggagatgctcctaatragacccagaaataaatgggacaggataggaaagaggagaagggaagcaagggtgagatttcagggaccatcttagctccaccctgatcttgacctcggagttggtcctgcctggaagcaggggagctggggtctcacactcctgtatctgccagtcattggttggggctgttccagaggtagtaaccccaagccactttaccctctaaaagtgaggcaggcctctagaagtgaaggcatgacaaacctgggggctgggcaggccaaatcaagagaggggacccaaaaggatctgggcagagaaccgagtcttggccacagatggaaatgttctgcactcagagcttgggtgctgtgctcagtgtgcgtgtccatgtcccattaagatgaatgacctcattgtgtgaggtgtgctcgaatctgctgaattcctgtgaagtgctaggcatgtgctatgattacctcctgtcactctgacatcacccctgtgaactaggcactacaacttccatcttctttggaacagaggctccgggagtgaaggagcctgctggatgccccacagccggtcagtggaagaggaatttctggccacagctctgcctgttggcgagccctgagtctcccttgaccccttacccctctggcctgtgctgtcctgtagcccagagcccacacacagagcaggtgggaggaatcgcattcctgggtggtagacagctgaccctctgtcttaggagtgacccttggctctaatggcctcaggagcacatcatgctcagacttatttggtggtcagttggctttggaactcttcccattgtgtcctggtccttaactagatgcacagatgtgcagtcaaggggagaatgaagactcctcgggattctccatcgcttgaggtaaatgagctccatccctctctctctcaagagcaatgtgaggattatggggagtagtagatagtaaacctctcagcatggtgcctggtgcatagtaagtactctacaaatgtgatccattaccagtaacaggaattagaaagcccagctcattcctctgcaaactctgacagagaaagggattttggaaacatgacacctggcaggcatggggcatgtttgacatctctgttcatcacagcacagacttacagtgccagtcttgccaaatgtacagtttattttctgttcatttatgtcgtctccataagtctccctgtgcctctgaactggcttgccttctaggctgagttctgagagccatctgaggcatggttctgctgaaaacatttattccagccccaaccaccctgtctccctcctccctcccccacacctgcactggctattagatggaatcagaatcgggtggaaatgtcatctcactgtcacagatgttattctctttccacttcttattttatataaattccttccttctattgagacaagtgtgtgatgttgactgcagagagcatcttgcccttgtcattgaccttcagctggcctaggtctggagttgaacctcctcttggatggtattgaccgagctgtccctccgtctctggaagccctccatccagcagaagcctgggtgagatgtactgccattgtgatcatattctcaggccttgtggagacatgggcattgccagctgttacagtaggcatayttgcattgatcagaacataaaagtttccakaaacacagaagtgaatcaaatagtgtggtttaggttcacccactgcctyagactgsaagctggcttctggccactccatgacaccagcttggcaacctcaggtacgttaaattctacagaagcaggcagggtgccagtgtctggacctgtctcaaaggcctgtttgccctcctcaaaggcccccttgagacagatcctcatactccccattttcgtctgttttgttagtcagcgtccagtgtgtgagccctccagccagggtccgcaccaggccatcagccatcccttcactggccagagctcctgccttccccagctcagcctgctacgaccctcacrgccactcccccaaaaccagcagacttctcctcctcctcagtcaatcttctcctttcacaccacctcctttcttactgaaagcgtggatctaacctggggaaaccatttcccccgcagccctctcacgggggctttttccttgtactcccacattcagttatctcttctgacctagattcattttgcagtgtactttgcaaaatgcaaatcacatcactgccctgctcaaaatcctccagtggcttctcattcctcttaaggtaaagcatggagatcttactgcagcctccagctcctgtctctccagcatatcatgaacatcttcccgctgcttcttgttcatcctgttggctccagttcactgtccaatggcagtgtctcacccttgccaagttcactcatgccaaagggggtttgcacatcatgttccctctccttggaatgatcttccctcccttgtttagctggtaaacttctgcttgtcctttcaccttcagctcaaatggctcctcagggaactctgttcactcccatgcctctatcatgaggatcttttatcatcatgaacttctcctttgtagcacttccacagttataatgatgcatttatttttctaattgactagtagtctctagaagctggaagttctgtgaaagcaaagactgcctgttttattcatcaatgaatttccacaatgtctagcacataggagatactgcagacacatttgttggttggttggatggatggatggatggatgratggatggatgaatggatggatggaacgacggacagacggatggacagagcagatggacaggttgattgacagatggataggtggtggatgggcggatggacagatggatggatggccaggactcccccaaaagatataacatttgcaaatatatttttgaaggagagagaaaataatcacactcagagactccacttcaaatcccacatctcttttgttgcaaactgagtcgtgttcatacttcatctgattttatagcagaaatgatgttgaatgtattaatttgtatattcatgaatcatataatgaatcagtgccttggttcaggtgacaggaatgcatgcattcatgtctttattgtatacaaatcacagtttactggagtccgtagacaggaagatttatcattaccttaaagagtgagaaggacctagaactgggactctgaagtatacagctgtggttttaaaactctgttttgttggagccatgggttcccttgagtttgttcagtgcagctgaggtcaggttagggaggaacagggcttagaaagaggggctgggtcaggtgcagtggctcacctgcagaactttgggaggctgaggcatgcagataacttcagcccagaagttcaagaccagcctgggcaacatggcaaaatcctatctctacaaataataataataataattagttggctgtggtggtgtttgcctgtagtcccagctacttgggaggctgaggtgggagaatcacttgagcccacctcaagtgattgaggctatagtataggttgaggctatagtaagccaagattgtaccacttcactccagtctaagcaacagagtgagaccctgtctccaaaaaataaaaacaaatgggggctgagtagtctgggttctagctgcccacctaagaagctccattgtatacactgggatgctataggaggttgaaaatcactatgtttccaagagctcagagaatgattaattctgctgaaaacaggagtaaggcaggcttcttgggaaagcagatattggagcagagtctctcctttaaaaaaataaaatggttttacttgcctttaaaatgctcaatttaaaaaatagtaaaacgtagaaaagagaaataatattcataatatcaaaaaaacacctgtttactttaaagggttcctactgtattgctgcaaagctgaagtcttctacgtattagataatctttttattttttattttttattttatttttttgagactcactgtgtcgctcaggctggagtgcagtggcacaatctcaggtcactgcagccttcacatcctagattcaagtgattacaggtgtgcgccaccacacctggctaatttttgtagagacggggtttcgccatgttggccaggctggcttgagctcctggcctcaagttgatccacccgccttggtctcccaaagtgctggaattacaggtgtgatccaccatacccaacctatttatttwatttwatttwattttggacggggtcttgctctgtmacccaggctggagcgcagtggcacagttacagctcacttcagcctcgatatcccatgctcaaatgatcctcctgcctcagctccccaaatagctgggacgacagttgcatgccaccatgcccagctaatttctgtgtttttgtagagacaaggtctcactatgttacccaggctcatcttgaactcctaggctcaagcaaccctcccaccctggcctcccagagtgctgggattataggcatgagccagcatcttctgattttttaacttagcataataaacatcattttcccacattattactatgttttcaaaagtatctaaaatttggaaatcaggcaaaaagatgattacatatcctttcagtgtcatactggagcatcccctcgcccctttctactcaaagtgtggtccacagaccagcagcatcagcatcatgggggagattatttgaaatctaggctctcaggccccattctagactctaattcagaatctgcattttaatagagttcctcatgtgattcttatacacagtaaaatttgagaagcactggtggaggkcccaaattctgtaaagttacctattaacttacggaaggctgataagttataaatgactcttgccagtaaagataaaaatgatttctgtttgactgaaaatatcccaaaggttagaatttattgccttgtagggtattagccagttttgtatttgatttagtaatctgatttcagtaatttttttcctgtgactacacatttttttctggtctttttaaaactagctttgccaccctgctgacttcctcaataataaattaaataaatctttgccacgtattcactatatatttgtatgagaatcatgtttttaactttttgaaaattatgctttgacaaccagstttctgtcatcatttttaatagttctgtggtattctattttgtgattgaccatagtttacttatctattgccctaatgttagacacttaggatattgctaatttagtaccaatataaataattctgcagtgaacatctttgagcataaaactttttccgtattttatatttatttcctttgagtaagttttcaagtactgaattaatggatcaaagggtatgaacatttttattttattttttaattttttatttttttaagacagagtcttgctctttcacccaggctggaatgcagtggtgccaccttgactcactgcagcctccacctcccgggctcaagtgattctcctgcctcagcctcccaagtagctgggactacagacatacaccatcacacctggctgatttttgtatttttagtagacacgaggtttcaccatgttggccagactggtcaagtatgaacattttcagatgagcaataatgagcttgtcaaatggacaaggatggaagggcatttcaggaggcaagagcagcctgcagagaggctggggaccaccggtctcacagaggagaggcctctaactggctagaatgtaaatatgtgtcctgggagcagctggaaaggcaggaaggagaccagagtatgaaggccctggtgtcctgaattagatgctcagcctaaaggaaagtcatggatactgtaaaccgagaagtgacatgatgagacctgtgccttagaaaaacaactctatcagcaaggaggcctttccaagcctcctgaaatagtgctggtgagagaagacgagatgtgagccaggaggtacctgggatggaaacaagaggatggagagaaaagttgtttagaaaggtgtaggggcttaaccaaggatcacccagctcattggtggtgatgacgggacctgatcatcagtgcttcttgcctctccatgtcgtccatgctgctgttccttccttagagttttgttttttaatctaagatatgacttcctagagctacaggacactcagctcatcactcacagatgagtttgagagttgtgatgtgagagaacaggctctgccaaagcatggagcacgcatccaaggggatgaacagcatccctaaaaataataagagatgaagcccacattccggggaagtgacagggcattcttgtggaacttgacagactaaactgtagctgctactttaacctctgtgtccacaaaaccagacctccaacgtggcgttgctggtatgcagatttcagtgtccctaagaagccatctgggttagcacagggggctgggttttacagctaaccccgctgagctcagtgtctcagtctgattcatagtcaacaataaggtttagcagacttttctcacacccaggtgctttcacagaactgccacatttccctatcagaccgccatttcacagaggaagagaaagttggttgcctacggttgcaccaggaccagattaaagccagcgctcctccctctccatctttcctaacagttcctcacagttcatctgtacaagacaccatgagagattccaaatgcaggaagtgatttgatccacagctttttaagggcaggaacccaaagacatgagtctgtctgcctttaaagatgagagctgctcatttgaactagatagaaaatagtggatttaggatgacagacttcagagcccactctgtcctaccacctcctaccagtaaatgttcttccctgagaattgcctattatctgaaaattgctctttttaataaccccaagctggaaataatctccatgcctatcaataatagcatgaataaataaacagtggtatgtccacacagaggaatactgtacagcagtgagagtggacatgccacagcctggagcaatttcccaaacataacagtgagagaaagaaaccagatgcatgcctgtaatcccagcactttgggaggctgaagcaggtggatcacctgaggccaggagttcgaggccaggagttcgagaccagccaggccaacatggtgaaaccctgtctctatgaaaaatacaaaaatcagccgagtgtggtggcatgcgcctgtaatcccagcttcttgggaggctcagacaggagaattgcttgaacccaggaggcagaggttgcagtgagttgagattgcsccaccgcactgcagcctgagcaacggagcaagactccgtctcawaaaaagaaagaaaagaaaagagaaaagaaatgaaaccaggtactgtagttcatacatcatcattccattcatagcaaggacccaaagaagcaggtgatgctaatccaagctgttagacatccttggtgggggtggggactggaaggaagggggaagggagcttctagggagccggtcaccttctgtttcttgatctgagtgctggttacacacatgcatttagcatttggtatgtgaaaattcagcgagctatacacttaggatacctatacttttctctatgtatattcgacttcaataagtaatttttaaaaagtaaaaagagctgggagtggtggctcatgcctataatgccagcactttgggagctgaggcacaagaattgcttgaacccaggatgcagaggttgcagtgagctgagattgcaccactgcactccacctgggtgacagagagaaactctgtctcaaaaaataaaataaaaactaaaaagtagccagccatgcacaacctcaaaaaaaactccctacaatgatgctaacaggaacactccatttgtcaagggcggactctgtgccagatgctatgctggggactctgtgtgcattaccccttttcaatttctgggaaggcactgttctgctcctgtcttgcggatgagaaaactgaggctcagaaactgtggtggcctgtgtgtccatttgcctcatcccctggcacacgcacacactctcctaccccagctgcgggaatggaggcaatgaagtagaggtggtctcattttctttccttatcaccagggaagagccagtaagtaattcattcagttgacaggtagcctataaagaaggccactgtcaaccaggcactgcagtgtggtgatgacaagctcagatttgggggtttggggttggctaagagctgggttcaaatcgtgactgtgcatttgaactacacaatccagagcaaatatcctctctggacctccatgttcccctctgtaaaatgggtgtggaagacctcatagggctgttgtatgacttagacaagagattgcaaaaaaaagcataaactgacacagacaatattcaataagtgttagagagggatggaagccaggccctaaaaaggttaaataagcagtgctaggcattataacrtcagtattgtgcccagtcactgcttgggcttgagcaaggggctggaccagtgggcttcagcgatcagtgaggcttcttgacagaggatygaactaggtttagaaaagactttcccaaaggggaatggacattccaaagagatggcaaagcttggagaaagacctgtggttggccagcctgtctggagccaaaggagagaatgactgcccagagctgtgatttttttgtcttttgcagtgaggagcttaaatgggacagtggtgtattggggagagttatttggtagcagaagacgcaatagatgctttgaattctgcaaaaccaaactcccctgtgaccagtggggataaagcagagccgaaggggacaatcagaagtgagcactgatacatgtttaacaatcagttctctggcaggagggtaggggtgccctgatttgtttgccaaatactcccaccatagcccatttcaaactgccattgcaatgtcactaggtacrgagttaggaagagatgcacagttgcctctcatgagctgatatgagccagttccacataccactgggtttcaggaaaagttgggaaaacttgcctcattggaacatgggctccaattgctgtggctcccatgggaaactacagtacagcctctcgaacgagtttctccaatgtgctaggscctaccatgagacccaagacagactgtgtcctaactctagtggggtccacagtctactggggaaactggcattaatcaaataattcctctaagtgacacattgagctgaacacttggaaagaagagctgccttacatgcagagcactcccgtgttctttgtttcaaagctgaaacaaaaggtacattgtcgttatctgttctgaatcaagaacatagtgtgtcctctaagtttttcagtacacktttgttcacttcatgatatttaaatcagggttgttgtcattacaaccctttcaagacctagggcttggatttcaagtgccttttcaggtgccagtgaaaaatccatcagtttgcaaccagaaaatcgttcagcggagcttatgtatttatttattagtaacaacagtctggatacttctctgtagttctctccaaatgtcaagcccaggctgggctccatcatgctctgcgcacttctgtttaggaaacgttttcagctggcactgtggctcgtgcctgtaatcccaaaactttgggaggccgaggtgggtggatcacctgaggtcaggagttcgagaccagcctagccaacatggtgaaaccctgtctctactaaaaatacaaaacattagccaggcacctgtaatcccagctacttgggaggctaaggcaggagaatcgcttgaacccaggaggtagaggttgcagtgagccgagattgtgccattgcactccagcctgggtgacagaacaagactctgtctcaaaaaaaaaataaaaaaggaaatgttttcactgttgcgttgcctcctaggtggtcttcgaggccctgcacaatctggagccccgtggctacgtcgtggggtggatcatcgccatcagtttgttggtgggaatcctcatcttcctgctgctggccgtgctgctctggaaggtgagtctggtgattgcaggtccccctggggtccccactcatagatgcccagctctcctgcctttccagggaagamggagtatcctgttagagcttccttcatggcmccggtacagtgaaggacagtgacccttcaggcagggagtggaatcttggctccccttgaggccattcacaactgaggatttggaccacttcagagtgaaggcaaaagtctcagttctctcttctcttaccttcccttagagccctaacataggatggtgagaacctaactccaaaacagaagtctggggagcaactgccagaagggggcgatttcccatttgcttaaaaaagatcagaaggcgaactatagaacaattcttccttcttttcctctaaggaatgtgaggaagatttctgaccagaaaacttgagtaactgagatgggctacagtccagagtagcttcatcataacttctcccaacctcatggtggttcatttggaggtggcccagggtgcagacctgtcctgcctcaagcatcactctctcaaggagaaaggggtgtcctcatccccatgtctaggatgatttgtttgcctcacactctcctttcagagacccggagtccttttccttcagagcctctctattcatcagtaatggtattggaggctttagctgatgaaggtctgtctcttccttgtttccactgtgtccccagctccaaaacagcaccagggaccataactgcaacttcctgacaccaaagtccatacttctctagaattacaaatttcagatgtaggtgaaaacagcctcttagagtattatagatggatattttaaaataagacaactaatttctttgggattacaaaataatatgtatgtattgacctaacataacatatcaattaccaaaaaaagttgtaaaacaccaggagttcacatcccagaaataaccatgatgagcatagtattgcctcattttgacctttttctctgcatatatagatatmgaccaggcattctcataacatcaacttatttttgaatagtgtattagttaaatyttacagtaatatactcagcatattttcaggtgaagtacctctaaatttaaaagcagtgggttcctttttttttttaagtatggggtcttgttctgtcacccaggctggaaggcagtggcacaatcatagctctaactcctgggctcaagctgttttcctgcctcagcctcccaagtagctgggactacaggcatgcacaatgcctggctcatttttttatttttttgtaaacatagggtctcactatgtttctcatactggtcctgaactcctggsctccagctatcctcccacctcagcctcccaaagtgctgggattataggtgtgaaccaacgcacctggcctggatttgatttattaatctgggaaaaacgtatacctatttttccctgaagacagtactgtgaacatctttccatattgttcaaagcacgtttccagcacatcttaaagctgtagagtgtctgcagtctactcatccagtcccctgatactggaatttaggttgcttctgtttcacacttcttttaacagtgccacattaaatatccctggrgccaaatatttgcacaaatctttcattatgtcgttaggttgaaagcctagaaatagaattgccatcaaaaggagtgtatattttaagctttttaaaaattatatttattwttttattttgagatggagttttgctcttgtctcccaggctggagtacagtggagtgayytcagctcactgcaacctccccctcccgggttcaagcaagtctcctgcctcagcctcctgaatagttgggattacaggcgtctgtcaccacaaccagctattttttttttttttttgtatttttagtagagaccaggttttgccatgttggccagggtggtcttgaactcttgacctcaggtgatcctcccgccttagcctcccaaagtgctgggattacaggtgtgagccaccccgcccggcctaagccttttattactattgcagattgccctgtagaaaggtcataccaattcaccctcccacaagcagtgtatcagaaatgtctgtttgccaatagtggatgttaccttttaaaaacaatctgccaatttgttgtttatttaatccacatcgccagatagattcttaattctcctttttctccaactccaactccttcctgctgagacagcctctggtttgtgggtggagaacaaagcctgctcagtgtttggcatctgaaaagacaaggcttcttgctgagttgagggctttggtgcatgagtgtgtgtgggtgtgtgtgtgtgtgcgtgcgcgtgtgtgtgtgtgtatgtgacttccttctgcctttatatgggctcttaaaatgagaggagctgtgtcctttatggctgggtgtgtggaaccagacagggcacagagtggggagtgttgtggccgtgccccacttccccttatagtctgcatgccctccttctggccgccccacctggctctgcctctcaggggtgtcctgtctcctctgcacagcccctgcctcctccagcccaccacctgctttgccttgcttttgctgtgtttgtttaaaaaagcatggttgcaggagatgctgtcatgggtggggagaaccctgaggtcacccagctgtgtgggatccaaagagccaggacctgagaaggcagactctgccctctgccacagactgggagggagagggcagtcacggccgccagggacacaccgtgtgcccagaccagggcttgccgtaactaacgggtggcaggaaagctttgaggaggctgttgaatgaggccacctgggtcacaacagctttgctagtcaacccagagcagtatctcatttcggctcacatttctcgaacgcttactttgccccagtccttgctttgcctggactaggcactgggatgcagcaataactgtgcccttccctgcacttgaccgcstcaccacctagcaatagacctgcaggcataatggagggtggtgagtgctgcgcagtaactgctctggaaactgagaagaaggtgccatgagtccccctcccttgcccccaaggaggasggaggattaaaaggtcacagagaacagygtggtagatgagagcagctttcaggctgacagctgtgggcagcaatsctgactctcacacttgcctgacatgaggccttaagggggctgcttaccttctgtgaccctcastttcttcctctgtaaaaaggagaccatcacctccagtttggtatgtagaggttatgcaaggaaaatgtttagcactgcgcttagcacacagaagccaggggatatttcataaatgaggtgtcattcgagtctgacctttagtgtggtttgagttttccaggcagggaagggtagatgaagattccatccagagggaaggaagaggtgggaaaataagcagggtttgtggagagcagcttgtaaagtttgtcagggcagtcactgacctgcagcaagaccgtctgccacagttgtgaaggccactgctaaccaggacaaagggggagcatgggaggtctgtgagcagagcggtggcatgaccagatctgtgtcgagagagagatctggggctgggtgcagtggctcatgcctgtaatcccagtgctttgggaggccaaggccagaggtttacttgagcctaagaatttgaagttgcagtgagctatgatcataccactgcaccaggtggtagagcaagaccctgtctctaaaaggaaagagagatctagggacagtgtgggggcaagagtagggccattgccatgggtcaaggtaggacaggcagggtttgctgaccagttggacttgagaggtcagggagaaaaaaagaatagctgtctctccttaagataagttcagacaaaggatgggtgcccttaatcagggtggggaaggcaagatgcgaattagtttggcaagaggaggagcttggtgttgggctttctgagtgagtggtgcttagaggaggctaggagacaaggctgggcttgcctcactccctgtcgcccccacccagcagaaggaaggtcaacagaaggaagccccttctctctacttggctacacatccgcatcattctcttcccaccgcagaccagctttctctatgtttccctacacatcgtagggagatagttgcctccagcccctccaaacttgcatctcaaggactactagccacagacgcagaatgatcagccacctctgattcctggtcccacatatctgggagagaggatctgcctggcccagctctagtcaaatgtctactcccatcaactgtggaagggaggaagggagttgggagggagagaatccacctggcccaatgtgggtcatatgtctcccacggaggctagtgggggagaaagatgcaggatggtggtttaggggatactggggaggagactctcagaaaagaaaacaattaggcaggcaccccaaaggagttcgctcytgcaggatttcatcgttgttagtgctgctgctgcctgaattgcaggctgttgtatcataccagctagctatgctgcatacaaactgcccccaaattgartggcttttcacaaccattacatctgacaaatttctgggtcagggayccaggaagggtttggcggggtgattcttccgtcccacatgacattgagtgaggtcacttagtggcatttacctggtggctaagctggtcttcagagttcaagacagcttcattctcatgcctggcaccttggtagggacagctggaaggctggattcagtcaagtccttcttcctctccatgttgactcagggcctctccatgtggttcttccagcagatggtctgactttttatgtggtggcttaggctgaaagagagcgctgccagttgtcttaaatgctagcccacagctggcatagcatcatttattctgttggtaaaagcagtcatatgccagctcaggttcaagagaggggaaatagaccctgcttctcaatgagaggagtggcaaagccttagtggctgtcttttatctgtcacatacatgatgttcgaaatatgggcaaaatcttttctttttttttttttttttgtggcagtcccactctgtcactcaggctggagtgcagtagcatgatcttgactcactgcaacctccacctcttgggttcaagagattctcctacctcagtctcctgagtagctgggattacaggtgcctgccaccaagcctggctaagttttgtattttttgtagagacggggtttcaccatgttggccaggctggtctcgaactccaggcctcaagcgatctgcctgccttggcctcccaaagtgctgggattacaggtgtgagccaccgtgtcttttccctaaaagtcactattacaaacaaaaattcgcctaactagaagttttgttctattttaaagtagatgaaacctcatctctctcccatagtgtcatagataaaatcacagttgaactcctttggggaagaggaggcaaacagaaaatgttggtgcagcatttatgtcagagtgtgcagtctgttgaggcagtgttgtaatgtgataaggggcttggtggaggggatttctttagggaaaaaaatttttttttctcaaaaggctaactatgacttttgagacttataaagtctcaaaagactttataagaggttaaaagggcaattgaaatgtaggattattttaaagacctmcgtatttctagaacttcaactacagacctcttgttaactctgattcccatgtctacaacctaagaatgatacattatgtttagtgaatagtgattcggtatcacactgacagtacggtgcagtaacccaaagacctgttaattgatggtctaaactccagcctcatatttgacttatacgggaggtcttaatgtttccggcttattgccatatyccatatgtaatttcctccattcctttcaaggggaaagccactgagtgttacccagctgccactgctgacyggttgcccacttcactgagggcctttgaagacagcggttggcrgggacagtgttgaagtcctcttccctttacagaaccgtggctcttgaatgtccttctagagtagctcttggcattgctacctatggtcatttgctgctgccttgaggtccggagccaaaagtggttgttcccaaaagtgttgcataaacgtgaatcgtgwcatggtactgaaagctgagcagagcagctggccatgccgccgcattcacagcaccacacaagcctgaaggtctgcatgctttatgcttgcaagatggccagcaccttcactaggcaaagagtagtaggtccctactaggtggcaggccctgggcaaagggacaaagataaataaacaacagccctcacctagtctgtttcttttttttttttgacagagtctcactctgtcacccaggctggagtgcagtggtgcagtcttggctcactgcaacctccgcctcccgggttcaagcaattctcctgcctcagcctcctgtgtagctaggattataggtgtgygccaccatgcctggctaatttttgtatttttagtagagacagggtttcaccatattggccaggctagtcttgagctcctggcctcaagtgatccacccaccttggcctcccaaactactaggattacaggtgtgagccaccatgcctggcctcaacaacagagccctcacctagtcttgaagacctttaggaaaatcagcttcagcaaagccctgaaggtgagcaggacttggcctgtgccaccagcccctggccccacctacgcatgcactgtggtgctactgtttacctaaatcagaaagcccttatcgtgtcagcaagtgtcttttccagagctgagctccaggctccctgctgatgtgctcagccagaccagcccctcatctgcctctgaccctgtgcagctcctggcggccttcaagaaagcccatctgctggcatctcaggcatcttctcatgcttggcggcagcaggccctggctctgacacaaaatccacaatgagggccccaagctaaccagaccgctcttcaaattctgaaatggatcctaatcagctttcccaaagctgagatgttagcagacactgggagccataatttaaactttatgtgcgaggattacagtagccagccaaaccaccatgcaggaagaaaactttgaaatatgaaatgcttttaaaggaagaaaagtccaaatgagtcccctctcctttcctgcagctcctgactgggttggaagatgcctgggcctggcatctcttcaagacaatcataaaggcctgtttaggaggagaaagttaaattgctcagaggtgcaggagggataacaactttgtgtgtgactggcacctttaagaaataccttcagcttatataagccagcctggtttctgtggaaagaatgaagatgatggggtgtttctccttttgaagaaagacaccccccttcccttatttagggctccaagctcttccctccctgtctttctctctgcttccctctcaccctcctcccctccccagctctgtccttgtttgtttgcagtttgccaaaacatacaggccaccactcagtgaaggagagagaccatatcctccctcactgctgtcaaccaaggaccctctctctcccatttgacccttttgcaaaccgagatggtttggagcaaagggaagtgagactgcttggccagccctatggccatgtcttcccaggaggcccaggacctacttgctcaagtggcaaagagacaggctgcagaatgtgtttgccagccctctgaaaagggctgcctcaaaccctctatcagctggggctgttccaagagcctgctgctttaggactggctttgggctcatggtttttatttgagagcattacttctgacctaaggcagaaacacttagaaaacaaatctgtgaaatggctcagagaatgtgtaaggtttggcaacccctccagaggtcactgggttatcaccttcccttcaaactgggctgggagggcatccttgcttctcctccaaagaaaaaaaatgaacagacacatgcccatgtgcttgcacacacacccttcacactgcctcaattagaaccatgtgccaatgacattcagtgggggcttgtttatgcttgggagtaaatattgggctgatgttgcactgtcgacatctcgagacagagacatgctatgtaaatagtcaagtaactgaagagaactataaacatgaagtcttgagttagtccaaaaaaggaatttgtcccaggtcctcagaatcactgtctaggaagcaacccaaaggccgcggagtgggtaggatcccccaagagaccagatgtcatggtgttgtccagctggtccctctcaccctgcagggggctggggaggaagaggctgctgctgcagggtggataccccagaactcagtcaggcctcatgcctcacgcagcacccatctaagtaaggctgtttggggcaatctgttgtttccctaggagttttctggttgcttttggatacatggttatatgaraaaattgtgtatgtctgttacgagggttcagggagctgctctttggagctgcaggaccagcagacacaaaaaccagaaagcacactgttccttcggcttccagccaagcaaagcttggcttgagtcacctcctctagggtttctatgtttcttctgctacagatagaacagttaacagagccgcttgcccctcaaatggtgaagcaagcactggaaggttccagaaaaaatgcagaaaaacattgactccattggcttggaagtgagtgtggggctgctgggcatccagcttagcccatcattaatcatttcccagcaccttcagggtgggctcagctggcaacaaaaacagagatttgcccagtgtttctcaaagctctccccaaggcacccatgcgtgctcacatgagcgggtgtgtatgtctgaaggaggcctacttaaccttgggatgtgctaatttcccaagtgtagggggactttgggtcctggcagtaatggaataggtaggactggctatgaagtactatagcaggctgaaggggctcgtgggtttcctggcatgtgtatgaagagttacagatttagaccatgtatctcttaagcaaaggaactacaggtgctccttgacttatcatattttaagtcagaaatgcatttaataccccaataaacccatcataaagtcaaaaaactgttaagtcgaggtatggtaacttggggattatttgtacttgttagatcatcaaattcagagtcactatctttagtttagtgwwtatctttagtctttagtttttatattttatctttagccattatctttagttgaagtcattatctttacttaaggggatgacaaaaaccttgctaaatttagtttttcacttcctcattcctgattgacattctattagaaaatgttagctaggaagacctgttctttatttattgacttgcatttattgagaactgttgggaataatattgtgcctctagggcatttagaagataacatgcttttttytggttcttgcaaattactttcggtgacttgttctcatgggttgcttattttgagtttttatttttagagaactgatattttttctgttcttgatgaggtaatcaggcagtctctatgttacatgagttaagagtcctagacttacttagyyagtcctcaattctgacacttattataagacatctgatccagagctgcatgttcaactccatcaagccttgcctactttcctcatcggtaaaattgaccttaaaatcccacagttcaaaagactataaaagttaaataagtgaacataactgcatgtgttttgtgaattcaaagacctcataatcttttaaaatattattaaattctgttttatttgtttctttcaaaaattaacagatttttaaaaattgaaaattgaatttycaaaaaatytctcaaaaatctttgagaaaaattgagatgggacaaagactctgtgccttgttcccccttagtgtgagtcctgagtacccagctgtgtggcccacagtctagagccttgaattcactttggggaaaacagaaaaagctgtcatgatgtttcagggctggaagaggtctgagaatcccattgatctcttaggcrgagacgaagacactatggctcgaagccagaaaataaccttcccaggctgggcgcggtggctcacacctgtaatcccagcactttgggaggccaaggcaggcggatcatctgaggtcaggagttcaagatcagcctggccaacatggtgaaaccccatctctaccaaaatataaaaattagccaggcctggtggtgcagacctgtaattccagctacttgggaggctgaggcaggagaatcgcttgaacccgagaggtggaggttgcagtgagccaagatcgtgccactgcactccagcctggcaacagagcgagactccatcccccacccccccaaaaaagaaacaatattagtttgacagagccaccactagactatagggtacctttgtgcaaactataatagtaaatagcaccgcttcctaaagactctttacttccatctgtcagaaaaaattcagaaaactctgattttatgagaacaagacactctactgccatctgttggaaaacagttataataaacttatacacatacatgatatctgtgatgtgagtggtatcccccagccccttaaatrcagtgtagcacctgcactactgtacctacaactccctagccatgagagtgcattatgttttaagaaatggtcttcagactctaaaaaaaggaagacatacatcagtggtagctctgatctcccatccaagagattacgcataggctgtgttaggaacaggactggagaccctgcagtgttagagtggggcatagagcttgcaaggctgtttcagccaggggtgggtgggggtgattttcaggcctaatgctgacaccactccactgagagaaagragcttgcttccgggtgcctgcaagagatgacagtgccttcaccttgttgttagcaagaattgcrtacataaaaacttgagcacatgaaagccacatgtaagagtgagttcaggtgctctaaatcctttccagattgttaacacactgtctatgtcaaatccttacactagcatagtgatgagaaagtgagccagcttttgctcttagagatgaacaagagaagtctggttcaggccgggcgcggtggctcacgcctgtaatcccagcgctttgggaagccaaggcaggcggatcacttgatgtcaggagtttgagaccagcctggccaacaagatgaaaccccgtctctactaaaaatatgaaaattagctgggcagggtggtacacgcctgcagtcccagctactcgagaggctgaggcaggagaatcacttgaacctgggaggcagaggttgcagtgagccgagatggcgccattgcactccagcctgggtgacagagtgagactctgtctcaaaaaaaaaaaaaaaagtgaaaagtccagttcagcaaggcacactaactgatgctgtttaaatctagagccctatcagctgtctgtctgattcattaagtcagcaaaaaaaatattgagtctgtaccagttaacttatgctacttgacaaaccaccccagtattcagcggcttaaaagcaatatccatctatgcaggtcacagttctgtgggttggctatttggactgagctcagtggggcagtttgagctcagcgagacttacatgtgcctctgcgggcagctgggagttggctagtctgggagggcttcaaaaaaaactggtctcttagcaggttagacataggcatttgtgtggaagcagggcagggttctgagaaagtaattggaagtgtgcacagccccttggggactgtgtaacagacacaacatctcctccctctcatccaattgtcaaagctagtctcagtggagaatcaaggctgggaaaatagactccacctcacgatgggaagagctggagagtcacatggtaaagggtgtggagggtatgtgggcatctttgcaatttatcgctggtaccaaggacaggtgagatgctgagtactggggattgaaagcacaaagcctgccttcaaagagtcctaagacaaatgcaggagataataagggggcagactgttaagtttctgcttgatagtgccatggtagggaaatgtgacttctctggaattacaactgagtgacctgggattattgacacattacaacatcagcagccaaaggtatgtgctagagaatcctatttccctgttacatccttccacagtttcatgattacattctccttcatggcatgtgaccagccacatctggccatgttttcttagccaaccacatctttatcgcaaaagaatgacatttcaagcagtagcttcttagatttccattcagtcttggtccgtttttctggccttctgtgggtgtgctgtggggatgatgtctatgactttttcttaattatccagaaaattctggccaagcaccttttcttgcagaggggagaaggtgaagaggtttcaggagagaaaagtatatgtgtgggggcgtcagaacatggcattctgatgaatgtggtcttatgctgggaagaaacctccagggctgaaatcaccaggaactcaatatctgtttacaaaactggccttgaggattgaagctcagaacacaagactcttgccagttgttctaagaaagcttctgctctttcccagtcattcaaactgcaccaccttatcgacttcccctcacrgtgaatgctcaggatctccttggcaacgtgggtgaagatacctgctggctctcttgacagttctcgtctttggcttggccaataawccccctttakggaagtagaaagatggtggcaacagacagctcctcagctccacctgccttcccttcttcaggggagcttatgaccatcagggtggctgtgatgcttccctggatgtttggctcacagtgaagaagcatgaggacaaatacacagacaayaaaaacatttgatgtgcccatgacagctgggtttgcttcacgatttgtgtaggacacgtcttatatgtgcatgcactgttggcagcagactgcagagagtcttaagggttttccartatgacttgggaattgcaagctgatgataccatggtaccacaacctgcagtgtggcaagcctaccagcaccaggtcaagtgtgtgtctctgtttgatttcctctattcaaggggattgaaacaatgatttgagggcaagtcatttatttggaaggtgatctcaggaaaaactgttggagagcagggaaggaagccaataaaagatttgtcatcaagctggttacctctgcaggcaagctccatggggaaactggtagaacgtacacctcagggttatcccacccaaggagagagggagctggggtatttgtacacccgatacagtcagccttgtttaaaggaagatgcagagaggaatgtctgacctcataaacagagcccaccaatgttagtgagccaaggacgagagatgccgagtctctcagagcatgggaggaaaggtaagctttgggctacaaacgttgcttcactgtttggtggtgatgactatgtgagaaaaactagacacttgtcttaccatatgtgaaaagttgtaagaccaaatgtaacatcaaagggcagggtyttttcagaaytaagctagaggaaattgccatcctgggtcaggatgaaacgcccgttytaagtgagaatgtgctgctgactgtggtgcacagacagcacaaattccatgggtttgagagaaagatgtaaatgacagcaaggtagaatgcagacctgcagacgctttaaacagcctctcacgtgagagcagtatttattaaattattccacagatggctaagatctctcaagatactaggtttatcaaaagccaaataagcttggggaatgtcaggtccctggtttttttccccaccggaattaatggtaatggatcctttactttccactgtacattaagactctctaaaaaaaaaaaaaaaaaaaaaaaaaagccacacttcccaaasttatttgaccatgaaaccttttttttttttttttttttttttttgagatggagtctcactctgtcgcccaggctggagtgcagtggtggcacgatctcggytcactgcaacctccgcctcccaggttcaagcgattctcgtgccccagcctcccaagtagctgggattacaggcacacaccaccatgcccagctaatttttgtatttttagtaragacagggtttcaccatgttggccaggctgctctcaaactcctgacctcaagtgatctgcctgtctcagcctcccaaagtgctgggattacaggcgtgagccactgcgcccagccatgaaacctttttttactcccaaacacctttgaacagctctcagtaactggtattccccagcacacagtctggaaaacactacaccagatgcattttagaaggaacaaacagcttacgtaatatcacccgcaggaagtccatgcattttgaaaaatgtctccacaggatgtttttcttgccagtgttttctctaatccgaggggtcctccaagcctccccagccctgtgagtgcaggtcacacctacccagggacagactgccttggggtcacaatggctgattcttcagcacttctaactcagcttctctttctttctgcctttcagatgggcttctttcgccgaaggtacaaagaaattatcgaagctgagaagaaccggaaagagaatgaagacagttgggactgggtccagaaaaaccagtgagctgccacaccagtcacatgacctgatcactagcctgtcatccttggtctttgtatcttccatatttggaagaaaaaaatcttctccagatttttcggaggccccactgatgctgttctcttcttcattctatcaagcccaggtgccagyctgaggcagccacttcggccaggtcacacgaccggggccagcaccacttcctttaaaratgaactctgaactttggagagtgagctacagagccgagcaatatttatggatgcaacacgcatggtcaaccctcaggggaaaactgttacctaaagtatttttataaatataagccttttatactgattatgtcttttatatttgtatcgatgttttattatttctattaaatagttatataattcactcaagcactgatatctggcctaaaatcttggaagtacatgtccatgaatacaaattttaaaggatgaaaatcttaccgtactttggaacttgctgtttaaaaagacagatgaaataagttgaagaaacctcatgtaatgaatccaccaggctggcagtggtgcatataaactgtgggtgtggcaagaccccgaagacatttcacatctttatcgcctcgatcaagtgtggagtcacatgctaatgtgtgctaaagaactgtaagtgttttttcatatgtacttttcattggaagattcccaacaagaatttggatggaaaacctgatccctagcaagaagtctgctctgtatcacctttatatagcagacatgtcaccctgcttctacacagatgatggatgaaagcttggagcaatgccatgtggtcatctggtaaacctcagaatggcgtctcatcctggacatcctgcatcagagttcacacaccacaaggactaaatccttgtcccctaagcaaagaattgggtctgaatgctgtgagggattgcctttttgtggtaattttcattgagagatcttcatttcccctaccaccctggctgtcccagctagtggtgattgcagattccttcccagagaggacatttaaccgttttaaaaaaaatgtcttagattgggttcccaagaagcagtccctgaaacaaggatttgtgtgcaagtaacttattaaggaagtattcccaggggataccagtaagagagtgggggaagcaggacaaggaaggagacaaagccaggcaaatgtttgtcatttcagggagagctccatgaagtttagcctcagcctgatcaggggaactccggaggaaaagttaggcctcagaggtgtcccaacctgaatcaaggggctggctgcacccagaggagatgtaaacgttttattctcaattcctgctggcgtaatggctccagtagctcaggrcagtcctctaaaggacaaccacagatgcatcctcagccaggggagacacagggaaatgatgcaaaagaaatgatgcaaaggatctgagcagaacactgcccctccccaccccctgaatgtgtgagtgctgagttayggccttcagtatccaagctctctgtttgacagtagatatattgtcagatgcactgtgctgcttagttttgagtgcagtgtgattttctgaaagggcaatgagatgatggatgtagcatgctcagcrctgacctggcccatagtgatcactcaataactgttaacagctatggctgctattcctactgatggataaccatctaataagacagaaaacatggggctaagagcagggtctaacggagtcttaatggcttattacagcctgccaaagtgccagctacatacacatggcatccagtgcggatgaaacaatctataaaaccaagggtctttcttatagcaccttttttactggaagctaacacgttgggagtccgtgaacattgtcaaaaagacatcaaactcaacttctgggaagacagatttttaatacacatacttggctaatactcacaaacatatctaaagttttggcaaaattatgagggtgatgggtgggtactaacctggcatggagcaggtgtgtcttttggtttcttatgcagttgactctgctgcagggagattacagatgtaacctcatgcttctcttcctggtgaacatgggaatagaccaaaaaaatcaagggtcaatggcatgaactaagctgatcctggaaatcagggatgttgcatctaactgtgggatggaggcacagaggtagctacagggagcaggaygaggcaaagaaagcagctgtcactcagagttcgcttatgagytttatcaaaagcagcaagaaaagcagtcttgggtgggttttatcacttattaacagccatttatgaggcccctgctgtgtgtcaggcactgtgcaaggtgctggaggttccccagagaacacttcagggacattttgcctcagggtggcaaaatgcagtggcatgtggactttttgaatgggatgccatttgcagctttcctttgatggactcttgttcataatgccatgttttctttaatgaatcatttaggattcttaggtgatatttctggaacagcaccatcaacagctttggccacatgcacttagarcaactaacttgcctcctgccggggtgtaggtgcgttggtgacagtgtagaagggtgattcrcaggcccatgttctgcccaccagcaaagccccactggagaagggtagactcctgtgggcagtctcagagctsggacctatttgcttctgcttgattctgcgtgggtggacccacatgagcagctgtatacccaggaggtcactaagactttataaaggcaggttttaagaaaaccagccttggcatcaccaccagcagatactgaaagcctccccaggaacctgtctggggaaggatgatgcctctgctggtctgatcgtgctgagtagcaggtgggctacggggactggggagttaagcattttgtgcagtgatagagaagtcaagcatatcgttagcgctctctcaacttgggcagttcacaagctccttcccagctcagaagccctctctatgctctcaggggaagcagatggggtggatcagtacatctgtgttacccttccagaatattatttgaaaattctacagtatgttctactttctccccttcctgcttccatggtttcactgtggaatcctataagatattctcctgagcaktattatttcagtttccttcagcttttagttgaatcttcaatgtggttttaaccaactgttcagagaactgaaatggtttttaaatatgaaaaaggacctttgtaaaaatggagtaaaacagtgccccttttttaaaaaaagttttgcttatgcttaatttacataggactcaggagagtttggaacatcctccaagtgggccatagagctgtcacaaagaagaggccatgatgtttagaaacaaggggacactagcaggaggggcagggtccactggcttagtggcaactgacaggcatccattccgaataactcagcactgaggtttcctcaggcagttctttaggaaaactgtcagcatcatgggtactcagaggtatggtagaccttgtagaagatccactaggaagtcctccttcaccaaatcatgtagctactgcccttgagccaaaggcaatgaggtttaaaacaaaaacccaacagcactcctgggaacatcctgttttccatgcggaagcatagcagatccccagacgatccgtgtgctgtatgctacctgttgaaccctagcatggtggctttttaaaaggttatttatgacttttatttttgggtaaggcattatggccaggtgcatgcagttatgtctgggttacgtgtgaaacgtacatctggtgaactgtatacttggctcaaacttctcaaaatttagaggtgctggaaaggattgtcasttggagcctttagtagacaaaaggcagaaagtgagcatcatttcagaaatgctttagtatgcacacttttagctgatattttgatatatagartaataatatacacagtggagaatattcaaagagtggctgaagggagaatacagagccagtagggccaaaatgaaacttctaggatgtcttctgaattttcagcacatggggggaataagtgaacaaatttcccaacatcgtgcaatgctttatagcacaatgatctagatttcagactgtgttaaggttttttctttgttgatgttgttgttttaattctaatgtgcacggtgtgactggcagagtgagtttaaaagctttacgagtgattaattgcttggcaggcacccacgctatctgcatttccagaactttactgatgcatccatgtacatttccactgaggaattttggtgggtggggggaggttgtgctgcctcacaatgtcacgtgtattaaagtctaagcagtcacttytgattcacttgcmctgtttgggaaatgtcaggtttacaaaaacatacatgtttggaataaaaaatggctgcaaacaattcagaagttcaatctgtaatttacttgctaataagaactttttaaagtgttgaagctagggtttcaatgtaatacaacatgagcattaaagagaacatcaaggtccatctaattcacatgaacaacccacctgatgtggctgaactgtctgcagtccttggcctccacacaagaggtaccacctcctctctgcatcaccctgactcccctggcccagggctacacctaggttcttgatcttgagataaatgtgcccaaattaaatggtatggattccttattatcagtagacttctttcacatgtgcctgccagttactaagcatttttccagaagcattttgataacattcttacacatwtacaaatattgtattctcttaggttttcactctccttcatctgtctattaatagttatgttcttgttcatattccacatgctgttcatttatgtgtttttttttccctagacaagactgttaccagataggggttccaatccagacaccaagagcaagttcttggatcttgggctatcaagaattcgaggctagtccctaaactgaaagcaagtttattaagaaagtaaaggaataaaagaatggctattccatagacagaacaggaccagggctgctggttgcccatttttattgttacttcttgattatatgctaaacgaggggtggattatgcatgagttttcagggaaaggagtggacaattcccggaactgagggttcctcccctttctagaccatatacggtaacttcctgacgttgccatggcatctgcaaactgtcaagacaccggtgggagtgtcttttaacatgataatgcattataattagcacataatgagcagtgagggraaccagaagttactcttgtagccatgttggttttggtgggttttggctggcttctttataacagcctgttttaacaaggtttttatgacctgtatcttgtgccamcccsctgtctcatcctgtgacaggatgcctaacctcctgggaatgcagcgcagtagctctcagccttattttacccagcccctattcaagatggagttgctctggttcaaacgcctctgacaagaccaataaagatctatgtattttcttggtgtttttcaagagtaagcctttggctgtaccaatcaagtctactgggttttgctttctatttcgttactgcttttagatttattaaaatttcttctattgcctgatggttaaaattcatacacatagacaccacacagtataaaagagttatgaaaaaatatacaccaatgggttaagaatgattgtctttaggtaagtgagattgtcaggcttttgctttgttttattttgtttttatttgaatattcgttttctacagtgagcatgtattttgtaacaatgaaacatatgcagattacttgtaaataaaattatatctgggagactataaattgctaagccaaaagagatgccacattgtaggtctggaaagagatttgttgcagcaaagagcattgatgagcctgacacttatgacaatggtccagtgagtaatttcaagcattttaattccagtgcttcctggsttaacaaacctgccaccattactaatgctaattaaataggtttctctgaggttgcccaamctgttttcctaagccaggraatggactcgacaaactcaaaagaatcaaaagatacaaatttaagaggaagaraaatcactaattagtgaagkcygcttccyattcaatcaggagttttacagctcaccagattacctctcatccttaaagtctgtctggtcctcaggttactgtttagtaacagaattgatgtaagaattacttagagctcaggctgcactatcagaccgactggcagctatccatcagcaaagccacctgtccctaagakcatgkccgttcactctatgtatacatgcaactaaagtgtgtataatgagatattgccatccctgagctgaaatctaaggctgcctgctgccaaatctctgctttgcytcaaagtccaaattattttatattttattttaaatcagttttttaatcctaaaaattaaacctcaataaagggataactactatcctttgaagacaaccaattggtattttaaaaagttggcatttaaaaaagaatctccaggaaatgtttcttctagaagatgactgattaggaaaaaatgaaattatctccaattccacatctactctgaacccaccttatcaggagaatatttggctccatataatagaaaactccgaattaataaggccttaaacatgataaaagtgtgttcctctctcccaaaaaaagaagcagaagctctggtacagcagctccatgggcatcaggaatccagctcctgtctttctcagcaccctcaaggttgcctcatggtctgagatgactaccagggaactagctatcatgtccacattccaagccaaaaatagaagaggacaaartgacatatgccccctcccttttaactattcttcctagaagtkccatatamcgctggccagaaattaattatgtatgtagatayacccacccactaaggaggctggggaatgcattattaaggaataagaggagggtaagtgttaagagacaactaccagttgccacaccctccactgagaaaatattcagactatagctgccttgagctctaaacttgtacgcttcaaatcct

SEQ ID NO: 9874 - DNA, 12924 bp, Homo sapiens
ttgaatttaaaaaaaaaaagatttcttccaaaacttagaaaacaatgtaaatgtgaaaaataatgtcttcccaaacatagagaataaaatgctttcagacaggaattgcattggcttcagatgtcctagggtgaccaactttcccaggttgcctgagactgacaggtctcctaggatgtgrgtctttcagtgrcaaaacttggacaatccctggctaaccaagtggttgattrtcctttgtagggtagggccatgatttgtatgcaggtattgactctccttaatctccrccaccttttctctttttacaatttattatactgccttcacactgatcttcctttcctacctctcygatcacttcgaaacctagaaaattaagaagtagctactttcacttcttttctagtacttcaacagtgaagctaagctgaagagaatgtaacattctccttaaacgatgcttgaactagaatcacctctgacktagccctacctaatagaaagtggcctagaatgaaactgtctgacagaagtcattcaggaatatgagagtacgaggaaatttgtatcactctgtccccataaaacacagtggctgctgtggggagttcttagtaccttgccttagacaacataggccctttaaacgtgtgccgatattgtttattatgacaatgaagatgaaaatacttgaagacggagatgatgataatgatgtaatggatacataagaataaactgtgctgttggagttgacataggtataacattggcttataaaatgcaacatgagtgaattttgtcattagactccctggattcagatttccatgtcgccagtgtctgactgtgtgacaataagcacatttgataactaccaaatttcaccaactacttcatatgtaaaatagtgacataaatattattaattttttttgagacagagtttcgctcttgttgcccaggtcggagtgcaatggcgcgatctcggctcactgaaacctccgcctcccaggttcaagcaattctcctgcctcagccycttgagtagctggattacaggcatgtgccaccatgcccagctaattttgtatttttattagagatggggtttctccatgttagtcaggctggtctcaaactcccracctcaggtgatgcgcccrtcttggcctcccaaagtgctgggattacaggcgtgagccaccgcacccggccstattaattcttaaacttatyctcatgattcagcaaaatagcatggtgaatggcacataaatcaagcatcattgtgtattattagtaaatgtttggtgttctaaagtaagtaaacagaatgtgacctcaattcactccttccaggaaaaggttgccagtgtttatttggcagtgcactgcatcctgccagacaaaatggtctaagttttttctgtatgtagttttatatcactttcattttattctggcaattctatatcactttcattttattctggcaattcattattataaawaaatcctattgttaaacttaaattgataatgttctacaaaccaggtggtgcctgtaaacacagtctccatttaagatggacaaatactgtctccctstgaattcatcctctatgatgccttcagggctggctttctaaaactggggtatgtcacatactacttcctctctcagaaatctaaaatttctcccttatcgactacttaayaacaaaataattccttaccttagaatataataatctcaagtagtccyatcttttcttatttttatttttatttcattatgacagggtctggctctgtcrcccaggctgcagtgcagtggcacaatctcggctcactgcaacctccgcctcccaggctccagcgattctcctgcctcagcgtcccaagtagctgggattacaggccggctaatttttgtattttttgtagaaacgaggtctcactatgttaccaaggctggtttcaaactcctgggctcaagccatctgcccaccccagcctgccaaagtgctgggactacaggtgtgaaccacacaccaggccagttttattggaatttatcttctctttcctcttccctttccamtcgcactcctcaaaacctgcttacttttggagacaatamcacattcctgtggactaaaagcagagttattcatgagaataaaaattgtcccatataagggwagatatgcaggagaaagaagaacagtataaatggtaaatataaaggaatattgactaagcaataaaaatcacgggtgctagggtttcagatatcacactcatgtttttggttagtattttcattattttatccaagaccaaattaagtgtkctatgttactatataaaattgttttataactcyaatgattttctcatggtcccaaagaatattagtttattgttcattgttttatcactgatgctgaaataactgagaatgtatattacattttctacatcgtcataatctaatagcataatgattagcataaactgtggcctttaaatatttaatgaataaagtcacctttattataattattatagaattaattgaattatcttttattgccctaacccaatctggttattcttaaattattataatatttattcaatcttttcaaatacatttctggaaatttcttccattaaatagtaaaaaactccctcattattaacgactgaatactcacatactaaaacatgatttttcaaaattatatatttggaactctaaataataattatttttacctttgattggtagctcaataagtccccagaatagggctaaagattcatattcattatttaatcctcaaagaatctcggtgagtttactactgttatctccatttaaccaatggggatggactgaggcttgaagaatgtcttaaaaatggaaggtcacagacagggtcaagattaggccatatgtattataatgattcaaactaaatttcactgatttttcttgcctccagattttgatcaatagaaaatctaagctagattaaacataattactagagctgaattgataatttcagaggagatgaccagggatggacacggccaggagtaaatggcttttgatttgcagcaaatagaaatagactttctatttctggagaaagacactttcctgctgatgcaggcaggccctcttcttctggatactgtggcttttttggagcctacagtagcatgcaagtcagactaacatcaattgcagaatttcaagagaaactactgaccactgtttggacacctatggatagaaaatagtacatatctccaccttaagccaatgatggacatcctgaacaaggttttcatagtcagtagataccctctcctcacagtgaactgtgtcacagtgtcattccaggttcagcctccttcacacacaataaccacccaaaccaaggaacccgcagtgagaacaaagtcaagcaaaccaatgtcataactccagagaagggggtgaggacattacaagaagaaaagagaaacagaatcctcaggttcccttgcctttgctcttaacttagagatggtggaacaggggtgcacttttccatctcctgtgaactttaagaattttttgaaacttgcccttgtgtacttgggactgggatctccttcttcataccctgctttaggaaaattgatcagtaayagttacgtggatamataacattgataaataacagtacttacattaataagtgacagttctccaagaaaaaaaaaaacaaagcttttttcttcaacaatgaaagctcagtttatatttgagtgcctgtttttggtgattaagatcaccaaaargctgaaaggggtctgttatcttataaatttatctcaagaagctttgacgtcagatttatgattaagatgaaatgaccagaccagaaccrcttactatttgaaaacatattcaacacatagtattttttaaattagttaatatcacttcagttcagrtctttcaaagattctaatatttgaattaaattttaagaatcaactatcttgtctatattttcctcttccaaatcatctcgtattcaaaataaaaatccatattctttcagatctgtcttatatttcttagtttttgtgtacacttgccatattattttgtgttttgcttgaaagtatatagtagaraggtgaatagcaaattttttggagtcagatgatctaggtgttaatcctggcacttatgagacacacaatctacctactattatttttactcccatgcattgtttgcttatcaactacataaagataaaaatattaaagactcartgtgcttgtgaggacaaaattgtatcatctctgcagaggacctaacatagagcctgtcacatgtcaaagacycaaataatggtggctgtaacattccttcagtatgrgtaaattaatactaaagctagagattctgaaatggattatggattagacaaaagctctatttttttcttccagtttaaagagttaaagatgaatttatcagtagctaaaatttggttaacaaattattgaggctacaaggcatgagagagcaraacagactagatttgtggacgcacactcaaaaacactttttatttatgtctctgtttagataccagaggtacaatatgatctctgaaaacttaaagaacattgataaacataaatttatgactaaattcacaactattttgaatactttcactagattcatctaatcataatagttccaaaagccatgaattcgtgtaactgtctgtgcatacaaatgtaccaaaataaataagcataaaagaaaacggacagcaaccaagtgcagtggctcatgcctgtaatccctgcagtttgggaggtcaaggcaggaggatctcttgaggtcaggagtttgagaccagcctgggtaagaatgagacccccatcttttttagaaaagaaagtaaaagaaaacagaaaacagaatgctatggaagttttgggggaaaataacataggacacagatttttcttgtgtcctagaaattattttccagaaaactccagttgccatttatgcttgggtatcctttagaaatcatggctctgtctctctaacatctgatatttatttcaatttattcaatgtttagaaataataaatccaaatcttacagagcttaaatggccartctatagctatgatgaaatgaagacacaaccytacattttatatttttaaatccaattatcttgccattatataacagcaaaacaaatagctggtccagtgaattttggcaatgtgcttctcaaaccgatgaaaaactactaatacagacatttgattaaattgtttagtatttggactgtgatacattagtcaatgttcccatgaatatacagcctcaaaatactaggttgggcatttttcatctgaaatatcctcactataattagccctgtcagcttgtattatttcaagtatctttgctcrtgtatatctcaaggacacctaaatgtaccatgcaattaactaaattattgaggtatgtaataatttgtattacagctccattggatatatatgcatatccagaatatatacatatgtgtgtgtatatatatatatgtgtgtgtgtatttaracaagttttaagtgaaaatgatatcaaaatatttgaaggcattttgaaaatatttttcttctcaaccactggcttcagtttgagtcatcaatggaggaacatacatcagagaatgggattagtctggaaaacagagtatattgcctggaatacagaactccatcawatgggaattcctgctgcaaagttgtgtccaatcaagaattaagtccctaagtacacacactcctcatgttatctcctaacaacacagggattctttccattttcagttgtttattctgtgcaattactgccattcaatcacccaagcaggatgaatcacagcgttgtaactgagttcattattctgggcctcaccaaaaagcctgaactccagggaattatcttcctcttttttctcattgtctatcttgtggcttttctcggcaacatgctcatcatcattgccawaatctataacaacaccttgcatacgcccatgtatgttttccttctgacactggctgttgtggacatcatctgcacaacaagcatcataccgaagatgctggggaccatgctaacatcagaaaataccakttcwtatgcaggctgcatgtcccagctcttcttgttcacatggtctctgggagctgagatggttctcttyaccaccatggcctatgaccgctatgtggccatttgtttccctcttcattacagtactrttatgaaccaccatatgtgtgtagccttgctcagcatggtcatggctattgcagtcaccaattcctgggtgcacacagctcttatcatgaggttgactttctgtgggccaaacaccattgaccacttcttctgtgagatacccccattgctggctttgtcctgtagccctstaagaatcaaygaggtgatggtgtatgttgctgatattaccctggccataggggactttattcttacctgcatctcctatggttttatcattgttgctattctcygtatccgcacagtagaaggcaakaggaaggccttctcaacatgctcatctcatctcacagtggtgaccctttactattctcctgtaatctacacctatatccgccctgcttccagctatacatttgaaagagacaaggtggtagctgcactctatactcttgtgactcccacattaaacccgatggtgtacagcttccagaatagggagatgcaggcaggaattaggaaggtgtttgcatttctgaaacactagtagtttcaacatgcaacatcacttctgtactccagaaccatcttctagagcatctcagattttactgrtttttcatacttacctccactccaattttcccttccctcttattcctgccttcttcctagcagtctcattgtctccaaaattctgtactctttatgtgaagaatattcataaagcaatatgcacaataccctcacataaatatatgtcataatatatattccaacattttccaaaaatatgtacataacttcgaatacttatatatgcatatacacaaatatttacctataygtgcatgtgcacatcatacatgcaaatatcacaaaacattttgtgtattttgtgccatttatttgttggtatgtgaatgtgagctrgagagaagtagtgtgtgtgataaattttcccttgcttaataggctgggttcattcacttacagcattgtgataatgaggtatctactctggggttgaacctcattacgttatttagatttcattggagaaaaatcgtgctctactgaataaaattattgggcaaactctaaagtctccatgtgttcaggaaaaagtgacagaatattactccagtccttttaaaccagtgagtacacttatgcctcatgcaacattagtctgacattaggcaggcagtcaatagtgtgtatggcggttcaatgggtccatcaatgaaacaggcaccttcagtcatcttgttctgcccttcaatattgttttccctaggatcatgaatggcttttgtattactaggcgtctcatccataacccaagtagaatgaaggctaaggacagagatttcatgaggcaaatgaagcactgcctattatttttataaggataacccagtaagtataagctacatctcattggctatagctatattattacaccatttcaagttgtaagtaccaattggaagagtatattctaaaattaggcacttggcacccctgaaaaaatttggatgtaacatagatgggatgagaaatgggtgtctatactatggcagttgctatgagtatctactagcaaatgtatcataaatgcagatttgaagtcacaaactaaatcatgaaataaagttaggttgagagagtgagaatgccaaaactgaggctacataataaaaatatacaatatacaacacatcttataacaagttggaagaaatayatcatttgctgtgattagtaaagcatatttttacaatatatttccacaattatgaaaacatgttggaattttgtcttacaaatacatctgragcagttgtgtccatcatcagataaattgataaagaaaatgataaaacatttcatgttttacacgtataacattttgttttataattataacattttgttttatatatgtgacatatattagtaacatgttatataacatatataacacttatgttatatataacatattatatataactttactgtatatgtatatgtaatgtcatgttgttatatatatcataaactgttatatatataaccttrgatatatgttatataaccttggatatagaactgttatacatatatgttatatatatcataaactgttatatatatgtatatatgcaatgtttcattatatgttatatgtaacataactgtaatataagcaaatattaaaaatccctttctgcattatactttttttttacttaacaatataatctagagatagcttcataatggtcttacatacaaatgtgcactcacacatatatatacctatatgtacagatatacatatatccacatgtgcatacatgtattacacattccacaatatttgtaattctttgaacctttggaatttattgagactcatttttagggtgaaataaattatccatttttaagttgttttatatgtgctggtaaataatctccactctttttttgggagagtatagtatacagtattagtttaatgcatgcattttcaagtttattaaggtatttacatatttgatatttctgaaaatagaatactattggtttattttttagrctattttgttaggttcatataatttgttgatattgtgttctcattttatttattctttatgacatctttttgagatcaacttgcattcatttttttgtaattcaaaaataattgacataaaatttatgtattattgtttacagcctaacattttgaagtayagatgcattgtggagtgactacatttagttaattaacatatgatatgcattacctcacataattatcattttcatggtggaaacactgtatacccactctcttagtatttttaagagtacagtatatatggttttctacagagataggaaagccacaatgtcatacaggaaaaarcaaattttgtacaaagagaaataattacaatatactatatttctctcatgagttccttaaattatattttatggttgaaagaaaaattataacaacattagttggtataaaaaaactatacattgtgatgtaataaaaatgctatacayaagttagaatccttaaaaatcttaaagaaaacatcagaaaatcaataaatgaaaagcagagaaataaaagacagaagaaacaaacacaaaacaaattaaaaagtcgacaaattgtagcatattaatgattaccttaaaagtaaatgatgcaataatatatgcaaattgaaagacagagattggacactggataaaaatacataattgaactataaactgtctatgagaaactcacataaagtaacaaaacaagtaggttgaaagtaaaactacagaagaagtcatagcatgttatgtcaacaaaaaggagaagtatcaataacaacaaacatagaagggtgatcaatgcacaggctttacttcycaacagtttcaccagatagccataaatgggtattttattccatttacacaggttacaaataatataatgaaaatactgtcatttaaatcttacatatttgataacaatatcagaaaaatttccaacatagatatatctttatcatataataggttatgttgaccactttagcttattcccccagccttaaggtatagtttacacmcacacacacacacacacacacacayayacatatatttatagtatgcaatgtgatgcttttatataggtataaactgtgaagttatcaaacaaaatgaatttacatatccatcacctcacataattatcttttattgtgattacatttaagattcactctcttagcaatttccaagtgtaaatgaacaattaaaagaaaaaaattaaagaaaacacctacagctagattaaatacaggttgaaagccagatataaaccatatagacacacacaatatagatattggtagacataaatatggctatgggtacaagcatgagtatgaatatagttaagtgttatagatccaagtttacttaagataggaccattttatttatttattgagacagagtctcactctgtcacccaggcttgagtgcagtggcacgatctcagctcactgcaacccagcctctggggttcaagtgattctcctgcctcagcctcccaagtagctgggactacatgcaccaaccaccacatctggctaatttcttgtatttttagtagaggcagggtttcrctatgttagccaggctggtctcaaactcctgtcctcaggtaatccacctgcctctgcctcccaaagtgctgagattacargtgtgaggcaccgcgcccagcctaagacaggcctattttaaacatcttataccagtgtaattactactaacagttcctgatttattctgaaaaagtctacagggaataacacacactaggacctgttgggtggagggtggcgtagagagggagagtatcaggaaaaaaagctaaggcatgctggtcttaatacctaggtgatgggttgrtaggtgcagcaaaccaccatggcacatgtttacctacataacaaacctgcacatcctgtacatgtaccccrgaacttaaaaaaaaaaaaaaagtctactttggctgataaatgttaagttcccaatgtacacaaatagaaatatacatatacatataaatagatataactgaagttatatgtatatgtattttctataaatttatacgcctatgtaggtatrcattctatatatcaatagaaaattactttttctatgaattaaaagtggaacattgagtcattctattatattttaaattatggtttctataaacatgttcaatgacataaaacctttctgaggctccttttacctctgtgtttctcaggttgtcagtgatgaagttaaacatcagggtaataactctgtatagcatagagatgagcctgtctgtggctagatctgggcttgccttagacatgtgagtgttgactggagaaggagtaaatgtaggtaaatgtcaatatgccatagaacaaacagaccgtaaggaggtgggaagtgcatgtagagaagcactttgcactccactctacacactggatctttaggatagtggagatgatgtatatgtaaaagttaaaggcagccagaaaagcactgatccccaagataactgattccactaaaacaagcatgtttgccaggtgcatggactggcacaacagggcccccatyggtgagatatcacagtaatactggttaactcgatcaggcttgcagaaagacaggcagagggtagacactacgtggaggaggaggaaatttagaaacccagctgctcaggtcccataaaccagctggacagagccaatttgttcatgatcaggatgtaacaaagggagaaacatgtgaccacacaccagtcataagccgtaacagtgagaaagctttcttcccagcccaggccactaggaaatagggctgcaaagctcacctaacaaaagaaatgctgtgatcctcagtctagagaatcttaggcatcttaggtatagtagctgatgaacacaatatgtctaagatggacacatttgccaaaaaataatacatgagtagtgtgcaacttaatcacagtcccaatggccaagagaatgtctccacttcgcaccaagaacacctgacagataatggcaagggccacaaaaagaaggtagtgctcattggagaagtaagagagccctataaggataaactgagtcaccgtgaacaaattgtgaacacccatcctctctcttcacaagggtttttctgtggaggttgggggaggggaatgaaacaaacaaacatacattagtataaaaaaacaagaggcccagtgataagaagttcttggaaaacagctgatattgtgaggctgatgaatgatgttagccctattttaattagatgtttcaattattatgagtattgctggaaacctccaycatatttcttcaaatatttatcctcagttccctatcaaggggaaaccctctatataaatgaagagacgttcaaaactttaccttctcagtacaactgtctttcattgttgacccttcagcagtatttgggatttcataattcagtgaaagctgatggtgcatttctcaaacctacttgggtactttattctgcctgcattatctcaatgtttataattttgtgcactattccaatactaaataacttgaaggtaaaagctctgtgtattattccttgatatagaaattttagtaamtattaagaattaaaagacacataggaaaaggtagataaaataatgaagtgaagaataaatggtgtgttatatgctctgacaaattttccttattggaaagaaataaatatgggaatgtttttataacttcaacctaaaatcattaaaatacttccatagcatatattttaattaaatttgtactgtaaaatatagctaaacctagatgacagtatctaaatgtcattcaaataagaaacaatttacatacatatacaactccttctc

SEQ ID NO: 9875 - DNA, 14248 bp, Homo sapiens
aagtgccttccaggtagagggtcccagggaataacctatagtgggactgttactaatatgcaaaaggaatagcaaggaagtcatggcgatgagtagaataaacaacgagttcaagagtaataggaaacaagatcaaggaaatggaacaaggatcctggccattggcgggttttgagcagaggggtaacatgatacaacttttctttttcttttaacttttattttaggttcaggggtacatgtgcaggtttgttatacaggtaaactcatatcacggagtttggtgtacaaattatttcatcaccccagtgcatgatgtaactttaactgatacattctagctgctgtgttcaggatagactaacatagcaattcagtctatgttcaataagatgcaggggtaggaacaaggaaaccaattaggaggctgttggaataatccagatgataggtggtggtggctcagaccgggctggccacagtggcagtagtgagaaatagccagattatttcattaaaataactgggttttcatccatgatgactccctcaggtgtcagctatgacttttgtgttcttctagcctactgagcctgcttctgtcatgacatttatcacactagttgatttactctgttttcccaggctaaacaataaacttcttgaggactaggatactttggctttgtctctgtatcatactccttagcacagggctggtacaactcattgaataaatgttatttacatgaaagaatgaattaataaattaatggtgagtaatgattaatgatttgtagttactttgtgtttgaaataacggtgttcttattggacagagagctgtgaaatacctaattcttgcacgttaccacctttctccccaagatgcccaagggagacatagggtcagaggacaaagaaaggcaaagccgtactttgttgttattgtgggccttgctctctaaccgcaatacagaactccagtgagttaggttggcccacatcaaggactcaaagttcttttctattaaaggtagaattaagtagccttgatgcaaaacaaattattagttgagtcacatgaaattgatagtttgactgtttttgacctacagatatggcagatacatatggttcagtctaatcaaaagccttacctgagtctgtgatctcctggctccatatctaccaggactttagagaaagtgggggaasggggcattctcccattacaagcttatttccccttctaattagtgtcctgaaatctgactaatcccaaccagtagtagagtgggggagatagatgatagaatcccaatttgaactaggttaagtagtaaataaataaataggaaattacagctacagttcagagaaaacaacttcagcaaggacagtaatgtgtctgggcatcaagaaccatccagctcaaagttaccagctagtttctctgtctctcatctatgcttttctttgaaatttgctttattatttttttttctcactgaacaatgtggcaggaaatgtggccacagacaaaattagagttttaaatctcagaattttagctgcttgagagagtctggctcaaattactaggtaccaaatccaaaaatcctaggaaaggaactcattgggccaaatgtccatccctgaaccagttaactgcagccagtcatggggaggcataagaacttgccagctccatcatgggctgaatgtgtttctagaaaatagtagggcatgttgggctgacagtctcatacataaccactatagggtaaagaagcattgggggcaaagcttcctcaaaaggccagcacttagtcttgaaccaaataaaagcaattctgaaacaatgaattcttattctgcattgtcattggacttactcaacactttgttgtcggctatcagaacatttctgatacttcagaaacccacaggaataattaaagtcataacatggattttcataaaggaaatccaaaagaaaaaagtaacctctactttgtraagttgtattctgattagtaaagccactagcctgtatggcaccattgcgcagattccaaaaagtttcccttgaatgtaagctggattttagctcctattcaccctttcagtcagttgccactgcacagatgtatatggtggtctaagtgttagctgtttgaaataagcggctctgggaattgttaaattattttttttaaatcaagcatcaagaactgtgaagagtctgagatgttaccctacttacaagctaactagttaatttgcaacaatttcatgaatgctggtagaagacacaagactcctggtcagagacaaaggacagtttgttaaagcaatagaagtagccagagtagcatcatttgcatcacttctctgagccccacatgctgaaggctaggtgaagcctgcacatgcattgtgttgctttacaggagaggaacctgatcagagtaaacagacaacctacagaatgggagaaaaattttgcaatcaatccatctgacaaaggtctaatacccagaatctacaaggaacttaagcaaatttgcaagaaaaaaaatcaaacaaccccatcaaaaagtgggcaaaggatatgaacagatacttctcaaaagaagacatttatgtggccaataaacatgaaaaaaagctcatcatcactggtcattagagaaatgcaaatcaaaaccacaatgagataccatctcacaccagttagaatggggatcattaaaaagtcaggaaacaacagatgctggagaggatgtggagaaataggaacacttttacactgttggtgggagtgtaaattagttcaaccattgtggaagacagtgcggcaattcctcaaggatccagaaccagaaataccatttgacccagcaatcccattactgggtatatacccaaaggattataaatcattctrctataaagacatatgtgcacgtatgtttattgcagcactatttacaataacaaagacttggaagtaacccaaatgtccatcaatgatagactggataaagaaaatgtggcacacatacaccatggaatactatgcagccataaaaaaggatgagttcatgtactttgcatggacatggataaagctggaaaccatcattctcagtaaactaacaggaatagaaaaccaaacaccgcatgttctcactcataaatgggagctgaagaatgagaacacatggacacagggaggggaacatcacacaccagggcctgttgggggttgggggagtaggggagggctagcattaggagaaatacctaatatagatgacagggtgatkggtgtagcaaaaccaccttggcacgtgtatacctatgtaacaaacctgcacattctgcacatgtatcccagaacttaaagtattttaaaaaaaaaaagattctaggcttttataaggggactgttagcaaatctattcagcctttgccccagagggagattttgtctttctaatcctggacaatgaacaaacaaatctatcacctgccccagagggaggcattacctctgtcttccaaaggctgtttgctgtggaaacatctttgaaaagagcttcagaagcaaagttgctaatgtttctgctcagaagacgtgagacctgtagagccctttttggcaccagggacccgttttgtggaagacagtttttccatggaccgttgggaatagggggatggttctgggatgaaactgttccacctcagattatcaggcaggcgttagatgctcataaggggcgtgctgcctagatccctcgcatgcgcagttcacaatagggtttgcactcctatgaggatctaatgccactgctgatctgacgggaggcagagctcaggcggtaatgcttgctctcatcagccactcacctcctgctgtgcggccggattcctgacaacccatggcctggtacaggtccatagcccagggactggggaccctctgctgtagagaattgtttccaacaacaagggaagggaagtggaatggcaaggatctaacatttgtgcccttagatcgggggtcagcaaactttttttgtaaaggtaccagatagtaaatgttttaggtattacaactactcacctctgccattgtagagtaaaaaagcagtcaaggacagtatgtaaatgaaagaatatggttgtgttccagtgatactttttaaaaataggcagcaggccatatttggcttgtgggttatagtttgcaacctctgccctacatgtattgtgtttagacttattaaatcttccctttttcttaaaccctcattttcacagcccaaatctagatcactttataattatgttttatctttttttgcatctaataaaatcattgttgtctataaaatatgaagtcaagaacgccatttgcaatgttgagcatcttagaatataagcagccacagatctcatatgtatttctggaatataggtatctggtctgatgtacaaaatattgaactaaagtctaaatatatgttaatattaatataacactggattaaatgtattatatgtggaagtagtcgaagtatttatggaacccactcggtttattgaacaaaatatcacctatgtattttatctagatgctggagaagtttggcgtaatatgacttgtataaacttaggaaacaaggttaaaaaagtaatcaaacattttctttttctttgtgktttttttttttttttttttgagacagagccttgcttcatcacccagacttgaggacagtggcactatctcaggtcactgcaacctccacttcctgggttcaagtagtcctcccacctcagcctcccaagtatctggaattacaggtgcatgccaccacgcccagctaatttttccatttttagtagagatggggtttcaccatgttggccaggctggcctcagactcctgacctcaagtgatccacccatcttggcctcccaaagtgctgggattacaggcatgagccaccacacctggctatgttttcatttactacctttctgtagttaaacaagtatatattattaccacgaagtgtcatttatgatcctgtttattgtgaaagagtgcatagacctctgggaattatcacagataacctttggaggttgtaagggagggcctttttagacggtgaattcattagagaatgctttttaccttgaacttggttgaatgtggaaagaatgagtggagagaattatactgtttttctttctttattcatcccttaacatattttttgataattataataaagctgtagaattttgagacaaagttgaaaacacaaaataaatgtttggaccatgcatcctaggattagactgagagaaggaatcagtgagtctgccaaggcttgatggctcttaaatgactaaaggcatacttctaaccaccttgtatgatatctacagtactgattcctggccgctgtgaaccagacctttgttctgttctgctctagtcccactcctctacccttgcctttctccaactttcaaatagtcttcccttttacattacagtttcagctttctttccccgatattatatgtaggccaactttttatgaatttccacagagataaagctggctacatcaacatttatttaatgatttgataacaaatatgtttgtggaacaatgtagaataaaagtaagacctgtcactgtctctaatatgcttatcattaaggaaataaacatgtaacactgaaaaatataattagccagataagagcttatatttaaggttgattatcatagccttagtagcatgggaatttatggcaaaaaagaaaacttttgctgagtataaatctataaatataaaatatatagctctggagtcatcccagtacagccttggtgccatgtgcatgtcggagagtcccagcccaccttgctctctagtacttgtagcctttttctttcgagatgcctgagaaagtgcacgtggagcggaggagctggaaacttgcctttcaggcagatattgcccaactcatgtctctcgtcatcaataccttctattctaacaaggagattttcyttcaggggttgatctaatgtttctgatgcattggacaagatttcctgtaagagcctgacaaacccttccaagttggacaatggtaaagagctggaagttaacatcatccccaacccatggtaatggttcccaaattaggagatcagccttggtcatgtcaatgcctgtgtctaccaaagtcagggtgtattccctggtactaaaggatttatggaggctcttcaggctagtgtagatatctccatgattgggcagtttggtgctgcctttttttctgcctaccttgtggcagagaaagtagttgtgatcacaaagcacaacaatgatgaagagtatgcctgggagtctctgctgggggttccttcactgtatgtgctgaccatggagagcccattggcaggggtaccaaagtgaccctccaccttaaagaagaccagacagagtacttagaagagaggaaggtcaaagaagtagtgaagagcacttacagttcatagcctatcccattaccctttctttggagaaggaaagagaggagaaaatcagtgatgataggcagaggaagagaaaggtgagaaagaagaggaagataggccaggcacaatggctcatgcctgtaatcccaggactttgggaggctgaggtggcagatcgattgaactcaggagtttgagaccagcctagccaacatggtgaaaccccaactctttaaaagatacaaaaaattaggcggtcatggtggtgygcaccttaggtcccagctacttgtggggctgaagtgggaggatccaccaggaggtggaggttgcagtgagctcatatcacaccaccgcactccagcctggacgacagagtgttacaccatctcaaaacaaacaaaaaaaggcagatagagatgatgagaaaaagtccaagattgaagaagatgtgggtgggttcagatgaagaggaggacaatggtaaggataagaaaaagaaaaccaacaagatcaaggagaaatcattgattgggaagaactaaacaagatcaagaacatttggatcagaaactctgatgacattcacccaggaggagtatagagaattctacaagagcttcaccagtgactaggaagaccatttggcagtcaagcacttctctgtagaaggttggttggaattcagagcattgctgttcatcccttgtttggctccctttgacttctttgagaatgagaagaaaaaaagaacaacaaactctgtgtccatcatgtgttcatcatggacagccatgatgatataagagtatctcaactttaatccttggtgtggttgacttgggatctgcccctgaacatctctcgagaaatgctccaacagagcagaatcttaacagtcattcacagaaacattgttaagaagtgccttgagctgttctctgaggtggcagaagacaaggagaattgcaagaaattcaatgaggccttatctaaaaatctaaagcttgggccagttgtggtatctcacctctgtaatctcagcactttgggaggccaaggcaggaggattgctggaagccaggagtttgataccagcctgggctgcaaagcaagacaccatcacaacaaaaaataaaaaaaattaacccagcatggtggtacacacctgtagtccaagctacctgaggcaagaggatcacttgagcccacgagttccaggctgcagtgagctatgattgcaccactgcactccagcctggatgacagagtgaaacccctatctataaaaaaaaaataaataaaattttagaatttcaaaaattaaaatctaaagcttggaatccacaaagactccactagccagtgacgcatgtcctagctgctgcagtatcacacttcccagtctggagatgagatgacatctgtgtcaaaatatgtctcctgcatgaaagaggcacagaaatccatctatagcatcactggtgagagcaaagagcaggtggccagctctgtgtttgtggagcaagtgcagaagtggggctttgaattagtatatacagccaagcccactgatgagtactgcgtgcagcagctcaaggagtttgatgggaaaagcctggtctcagttaccaaggagagtctgcagctgcctgagtgagctgagatcgcaccactgcactccagcctggcgacagagcgagactctgtctcaaaaaaaaagaaaagaaagaaaggaaacagaagagttttgaaaatagtttttattcaaggaaaagaacctaaccttagaagtgaaagtgctttgaaaacttaaaatactagattgttatcatcatcagaaggcttaaatagaatgaataggccagtagccctattattttatataaccaaaattttaaatttagctaattgtttattatattttacaaataaactatcccataaatttttatgattattattttattattattattttttttttgagacagggtcttgctctgtcacccaggcgggagtgcagtgacctaatcatggctcactgcagcctcaacttcctgagctcaggcaatcctcccacctcagcctcctgagtagctgggactacaggcgcaatgcaccacacccagctaattttttacattttctctagagacaggatctcaccatgttgcccaggctggttctcaaactcctgggctcaagtgatcctcctacctcggcctctcgaagtgctgagattagaggtgatgatttttttttttttttgagacggagttttgctcttgttgcccaggctggagtgcaatggcgcgatctcagcccacagcaacctccgcctcccaggttcaagccattctcctgcctcagcctccagagtagctggaattacaggcatgcgccaccatacccggttaattttgtatttttagtagagacagggtttctccatgttgatcaggctggtctcagactccggacctcaggtgatccacccacctcggcctcccaaagtgttggaattacaggcgtgagccaccgcgcctggccagaggtgatgattattttaaattgcccacattttttgttgcacttttagagaaagaatactatgttttgatgatgcttagaaggcatgatgtagcattttgtatatatgatatttaactcttggatttttgtggaactttaaatcattactataattgctacgtttgtaatgtcatcaggtgtacacggcatagtgaaaatgtttaataggttgatatatactctcagaactataatagakaatctagttgggagacaacacttgtcaggaaaaaatcttaatcaagcctgtttaattacaaattgattttttttttaatgcttgcccatgtcaggtcaagcctagtatgcaatactgatattttgaatggaaagaaagctatcacatggttttagaatggacagtgtttcattatttaatatgctgcctatgatttcaatgaaaatgagattgagggaagaatttaattaagagtctaatgttcaatagaagggtaaaaggtgatttaccaagaaaatattcggagggggaaataaggaaatatttgttttaccaaataattgaattatattgtaggtctacaaaaaataaaacaatatgggactggtttaacaggacaatcaaggcccagaaatatctcctagtacataaataattagaatttttgcatttaaaatcattgagaaaagactattcattagctcatgtagggacaattagttcagtatctggagaaaattaaatatggagtcaatatatcaaaatcaattccatatgaattaaaatttgaaaccatcaaaggtctggaagaaaatataagtgaatagttaacttgatctcaaagtagagatcattaaggcaaaggaagaagccaccttatcctgggggccatggtcttcagtttacagtaaaagaaaataaaaacaaaaaaacagttcaaagagtcaggattggaaatgaaggtccagacgttcattttggtagttggctaaaacacccaagaaaatcaattgacaaactgttaaaaccaataagaaagttagcaagatggccaaatatagaggatctagggaaaaaaactaacaaaaaagtttataaatccctgccccccagcaaaaaaaaaaaaaatgagtatgtttgtaatattaatatatgcttggaggttacagaaaaatttcttttttttttcttttcttttytttttttttttttttgagacggagtctcgctctgtcgcccaggctggagtgcagtggcgcgatctcggctcactgcaagctccgcctcctgggttcacgccattctcctgcctcagcctcccaagtagctgggactacaggcgcccgccaccatgcctggctaattttttctattttgtttagtagagacggagtttcaccgtgttagcgaggatggtctggatctcctgacctcgtgatctccccgtctcggcctcccaaagtgctgggattacaggcgtgagccaccgcgcccagccgcttacagaaaaattttcatacagttttgagggcatttacttctttgtatcatttctgactaatatctatgtgtgtgatatcctactaatgtttgttattgtagttcatataatactgtaggggaaccaagaattaaatgtcataaatgtttgcatattttctaaaagaataattatattcactaactcatctttttttctttttgccgtgtgtaataggtcagtactcctgcatttgtaccaacgaaaactcacgtgctgcttcatcgaatgagtggaaaaggactagctgcccattatttctttccaagacagccttgcatttttggtgataagatggtctctatacaaataacactgaataacactactgatcgaaagatagaaaatatccacataggggaaaaaaaacttcctataggcatgaaaatgcatgtttttaatccaataggtaaatattaattctcatttaaaaccttaactatatttgatcactaaatatgttcatttwaaaagtaaagtagaatactttttagtaaaatagtaaagtagaatatgattgtattgacarttagcatattcagtttatatttgctttttcttgttaaactgaatttatcatataagataaatacatttctttgctcttagtgaatcaggtcccagtaatagtaataccagtagtgatggaaggctaggtctgcagagtcaagattgccatcatgttttacttacctgtgtcacctttccccatctctcctcctggtcagcttcattccctgcataattttaagtggtttattgtgtattaaaagcaagaaaatcgctctgcatttctgaatacaatacttctcgtatctcgagatcctttcctgtttcccttcacttttcaatttatgggaaagtgaagggagtgaagactgagaggatatagaccaagcttgaccaacctggctcaggccagctttgaatgcagcctaacacaaattcataaagtttcttaaaacattatgagatttttttgcgattattttttctttagctcatcagctatcattagggttagtgtattttatgtgtggcccaagacaattcttcttccaatgtggcccagggaagccaaaagattgcacacccccgatgtagactagtctgcttatcttcctctccatgtatagaatatacagtagcctagaggatatcactggtatttatccacatccaatttttacatgttttcaatctgttgccaccatttaaaaatgaagatgcttttacattttaaaaaatgagaaatctcacttttcttggagcagagcgtaaaatatggcagtactggccctttatccccacatgcagcaaccaatgagtgggttgctgagcagcggctgcccccagctttggctcgcactttccaggttgcttctgtgcccaccgcatcctgttgtctctccaacaaagtgtcagtggccatttttcatcccctttgcattttttaagtattttgctaaaaatataccctttaaacattaaatgtaacaattgtgtgtcttactttgaaatttgaaatagtgtaatatttagaatgtctatctctttctttttggtttttgtaagtggagataaccctaaggtttagttgagagaagcttcaggcaaaacctcaattaaaagtaataaaaggtttatgtcattgtatcttccaaatgttataaccagaatgctccagagagctcctttttataatacttaagataaacaatgccttttgaccaggatcaagtaaaattaggtaattgtaccttctttactcattgtttcacataactcttccatttttctttatctgagctctttggcattgctgaattttctcctctggttttcatgaatctttcggtaaagaaagtcattttgtgtgtgtgttatatttttacacaaaggaataaaataatttttgataaagcctggtaaagttttataagcaactagagcaaagaaagtggagttaaagtaagctgatttcaaaatccacttaatttttaaaaatattttgataattaagacactatttaaagaacacaaagtatcctaatttttattatataatgtgtgacattaatatattgccaaggaattattgtgttatttttgttgcttgtaattcaaccttttttacctagttaaaaaaaattagtttaggaagtgtcaagcagctgatacatgaattgtctgaaggttgagaatgttatccaaaggttaaagcagtagaacagtattaatttttctttgagctggcataatgagttgatgagttgacctttagttggcctatgtagaatagaagaaataaatataataaatttcatagtatgactttaacagagaaataaaatatgaatgtttaccattgcctcagtattggttgtaggcttttctttgtcattcttagacaaatttttgtgactgtatgtttcattcatttggttggcatttattgaatgccttcaagatacagagttcttttgtctgcagtatgtacttgtatgtaacaccacctggatgacactattatcaatagattgtagggttaaggaatataatatgtctaaattagtcctccaaaaacattttaagaatgcaacagaaaacaaatactgtattttagtgttttagtaaaataagggaggtaagctatttgttttatttatttttaagaacgtatacacattaaggagtccgcagttttcttatttgccaccaatctggttttgtctgtaatgtgcaatgacttttttttctggatttcactctgtgtttggcatgaaactgtattccttacaagaatattaggaataatattccattttccccaaagagacccagtatataagagggttttttttaagacacaaagaataggttaagctctctttactatattcagtggctttatgttagtggttgacaaatttgagttcagctaagattttaccagttactgtacaactgttacatcaaagtaaatggcatcctatatgatttcaygtgttgatattaatgttgtggcgtaacagagccagtgtttttcagccacttctacatagccatctcaaatatataggagcaaatctagaaatggtgtccaaacagagacacctaattgggtaagctttcccagtttagtcggctccaagtattataaaaatccattatttgaatgagtttatgctgatcattttgctcctgaagcatccatataataaaacatgccattgatcatggactgtcccccagaattagtatggcactaagctcacagttaattatcttaagactgaagacagtatcaaacagtgtcaaagagtgctatcaacaaggcatcttgagagctgtcactttgtcaaatgacatgcaaagatacatgatgaagggagatctaaatcatgaaagccatcaagttttggagatgacggaatttgctactaatgtgtcagataaaaacaagaccaaaccccaaaatagttatggcacagaaggcattaagaattcactcaagaatagcctggagcagcgtgtgactgacaaagctctaaactgttgac

SEQ ID NO: 9876 - DNA, 303523 bp, Homo sapiens
  misc_feature (13926)..(13926): n is a, c, g, or t
  misc_feature (53837)..(53856): n is a, c, g, or t
  misc_feature (58721)..(58740): n is a, c, g, or t
  misc_feature (67602)..(67621): n is a, c, g, or t
  misc_feature (69455)..(69474): n is a, c, g, or t
  misc_feature (83163)..(83184): n is a, c, g, or t
  misc_feature (85321)..(85321): n is a, c, g, or t
  misc_feature (93726)..(93820): n is a, c, g, or t
  misc_feature (98158)..(98766): n is a, c, g, or t
  misc_feature (104245)..(104264): n is a, c, g, or t
  misc_feature (107799)..(108159): n is a, c, g, or t
  misc_feature (124435)..(124906): n is a, c, g, or t
  misc_feature (128932)..(129052): n is a, c, g, or t
  misc_feature (136134)..(136551): n is a, c, g, or t
  misc_feature (147042)..(147061): n is a, c, g, or t
  misc_feature (147651)..(147799): n is a, c, g, or t
  misc_feature (150916)..(151328): n is a, c, g, or t
tcttttttaccacatggtgtcgctgcaaattttccaaacttttatgttctgtcacttcttgaacactttgctgcttagaaatttcttctgtcagacaccctaatcatctctgtcaagttcaaagtttcacacatctctatggcaggggcaaaatgccactggtctctttgctaaagcatagtaagagtgattttgctccagtttccaataaattcctgatatggtttggctctgtgtctccacccaaatctcatcttgaattataataatccccatgtgttgtgggagggacccagtgggaggtaattgaatcatgggggcaggtttttcctgtgctgttgtggtgatagtgaataaatctcaagagatctgatggttttataaaggggagtttccctgcaggagctttcttttgtctgccaccacgtaagatgtccttttgctcttccttcgtcttctgccatgaatgacgcctcctgagctatgaggaattgtgagttcattaaacatctttactttataaattgcccagtctcaggtatgtctttattagcagcatgagaacagactaatatagttcctcatctccatctgagaccacttcaccctggacttcattgtccacatcactatcggcattttggtcaaaaccattcaacaaatctctaggaagttccaaactttcccatatcttcctgtcttcttctgagccctccaaactgctccaacctctgcctgttacctagtttcaaagtcacttccacattttcagtttgtctttatagcagtaccccactctactggtaccaatttactgtattattttgttttcacactgctacaaagatactaccctagattgggtaatttgtaaagaaaagagatttaattgactcacagttctgcatggctggggaggcctcagggaacttacaatcatggtggaggggaaagaaggcacctgcttcacaaggtggcaggagagagagagaatgaaggggtaagagccccttataaaaccatcagatctcatgagaactcactcactgtcatgagaacagcatgggggaaaccacctccatgatccagtgacctcctaccagatccctcccaagacacttggagattgtggggtttatgggktttaaaatttcagatgagatttgggtggggacacagagccaaaccatattgatacctatttacatatatataataataataagaaaatttacttttatttctggattattaattttttctttaaatcagaagagctgataaaatattatgaaatgatttccartatctatcattatgtttcttaatgttcaaagattcttttatcatataacaaaacgtattggattattttgtttttcatttagcatttgtttagtattgagatagtttattgttcttttttgtatttaataaaatcagtcctacaaaatgaatttggaagtgctttgtctttttctttgctaagtttaataatagtttaaaataacagaaatagtaaactccttataggcccaatagaactatattagtgtagtccttttttggtggtagacttttggcaacgtttccaattctcttctatagttatttagtttattcaggtttcctgcaactttttgaatcaawwttttttttttttttttttttttttttgagacagagtctcgcttcttcgcccaggctggagtgcaatgcaccatctcagctcactgcatcctctgcctcccgggtttgagcaattctcctgcctcagcctccccagtagctgggattacaggcatgtaccactacaccaggctaatttttgtatttttagtagagatggggtttcaccatgttgaccaggctggtctcgaactcctgacctcaagtgatccgcctgccttggcctcccaaagtgctgggattacaggtgtcagccactgtgcccggccttgaatcaatttttataacatattctagataataatgagaaaatgttaacattcagtatctataaagtatgcctacaaatcaataaaagatccacttaaaactaagcaagtgacaaatgtgcataattaatagaagaaaaattcaaatagccgtttgatgtgtgctttaaatctgttatatttagggtaaccatatatgcctatttccctggcagagtcctggtttacatgtatttgtccagtaaaattatgactagtatcactttttgtctcgaaaacttcctatttggggctgggcgctgtggcttacgtctgtaatcccagcactttgggaggccgaggcgagtggatcgcttgaggtcagaagttcgagaccagcctgactaacatggtgaaactccatctctactaaaaatataaaattagctgggcatagtagcgcatgcctgtaatcccagctactcgggaggctgaggcaggagaatcacttgatcccaggagacagaggtttcagtgagctgagatcrcgccattattctccagcctgggcaacaagagcaaaactcatctcaaaaaacaaacgaacaaacaaacaaaaaaagaaaacttcctatttggacaatacattttaatgtctctttacttagaataaatgagatgcaagtttaaatgatagtagagattttattattattattaccaatcagattagcaaacattaaaaagatttatgatgtacattgctggaaagggtgtgttgagatggaagaatattggtgaaagtgttggtattctctttttatgttagaaatttggcaatatctattaaaattttaattgcacatatcatctgttctagctattggacttttggaatcttaactaatgggaatagtggtggcgtggtgcaaagacatgcattgacaaagttgttataatagtccaaaactggaaacaatttacatgtgtatcaataggctattgattaaataaataaagatgcacctatgaaatgaaatactatgtagatctttaaaacagtgagatgcagtaagatgcagaatggtattatggttttaactggtatttgcagaaacatgccatatatcatttatttttctatgcttagagaaaaaagcttgaatatatatacacacttaacacctatatcatgagggttagatgaacagaaatggaaacagaaaatttgataaaggttttgttaagtgttagggggaaaatagtttttggaaaaaaaaaaacagcttatttggcagtaataccagacactacgtatactggcaggaaacagaaaaatctggtttggtttggcaacaggtgtcaaagagtaatcttttagttttattaatgtttcttccagttggaagtgtgactttttttcctctgtcagaaaacttcatggctatataaaagatttttcagttctggagatatgggaaagctggaycacagcccatggagttattactttttatctttctgtaagaatatacagtgttagaattctaaggcagtaagggcctcaagtcccttcttgtcaatgctctcatttttttattttttttttagtgataaaaataaagttttacctrtttcatccaggaatatatgctttgtatcttatacgtaatattccagagaaaaagaaagttacctatacctcttttttgaagaatagatattcttaatatccacaccattcaaagacaatgtaaaaacaaaacaaacaaaaccccaaaaaacaaacccccaaaacccaaaaccccaatattgtaggtcagtctcctacctgagtctgtatgaaaaaataaaaatattacaaaataaaatcaagcagttaattaaaaataacagactcaatgataaagaactcttcaagtccatcagaaaaactactcagtgtaaaagtggataaataggttcatgtgcaattcccaggaaataaaatgcaaatggagtaacaatcacataaaatattctcaagttcattatggccatgagaatgaaaattaattacaatacaaataatattcatttgtatcatattgatgacaattaaacatttttagaaagctaaacgtttgtgagaatgtgaagaaagaagattatccactgctaaaagtatgctggaaaaaaatttaggatatctggtaaaagtgtacatgctctaaaaccaagaaattctgtaatcaggtatgtgtccgagattttccaggctatgtgtatatcaatgttctcattttacaaataaagtaatcaaagcctagctctttttactattaatatatataaaactacttagaacttttaatatatattaaaagttaactattttaacttaaaagtatttattttaacttaaaataaatttttttatattaaaagttaactactttaactatttatatatataaaactacttagaagttttaatatatataaaactacttatatcctggtatatattaaggattatataataatatatagttatctatgatcatcctcatcctcatcatcaatagtcagttgtaggtgaaattctattaattaatactgacaaataacacattttaggtgctcatcattggctctccggaggagtattctaacagctgaattaaaaacctgccaatatttgaccagacgatcaagtttggaggacgtcccttcctctcccacccagagccacgctcttgcgtgcttccacagtgacagtgtgaccttttgaaatttggagatcatactctcatccttgaaaacgccccaccgccttccctggggcggccggcctccaggttcgcgttctacctggtagaatcccttgacagtttcagtacctggccgccagggctttgggtgttaatgccttccttggacgggaggcactggggagaagagagggaaggcgctgaaacccacctgagaaggcgggctgggggaaggcaccccgggaaagaggttttctcgggtgccagcacccggagagagctactctggggccaggcaagcatcccgcctaggctccctagtgcatattagtgagtaacacgactggcgcgcgaggtggtccattttatttttggtagctagacgccaataggacgcaccacttcagctccaaacgggaactggtggccccaagatgttttcttttctttttcatttttttgagacagggtctcgctctgtcgcccaggctggaatgcagtggagagatctcaactcatcgctaccccctccttctgggttcgagtgatcctcccacctcagcctcagtagctgggaccacagacacgcgccaccacgccggctaatttttatattttttgcagagaaagggtctcgctatgttgcctaggctggtctcgaactcctggcctcaagtgatccacccgcctcggcctcccaaagtgctggaattactggcgtgagccaccgcgcccggtctgcccccaagactttcattgaaaagatggaatggtcgcttctgtgcggatcctccaaaccatcgttgggagaggcctccttaaagtctaggagaaaagttgtttgggaccgatatgaaagtaaggcaaagccggatggaagagagtagccgaaacaagcaagaaaaggaaaagcgatcgtgatgggtttaggaaaggtgatctggcgtgctaaatggcatttccggagaaatctgaaaactattgctttactgaagtatagcaaagagctgtccgggctctggaaactccttaacggatcaaaacggatgcaatgggtatccttctccaaagacacacctcaaacgggccgggagccgggcagttagccacccgctgcctccccttccgcagtccggctcgcagccgctcagctacctctaaagcccggagcargaaagtccgcgcaggcctggatggcccgggtggtaatctagcaggcctgcacactgcgcatgcgcagggggtggactgccaggtcggctcagggagccgtgacgagtccggaagcgcctgcgcgcgctcctccgtacgagaactagttttgttccgtgccctctggactggaaccttttggagagaacccccggcaggaccaaccccgcacccgccagcaccgcggcaatgtccagcaatagttttccttacaatgagcagtccggaggaggggaggcgacggagctgggtcaggaggcgacctcaaccatttccccctcgggggccttcggcctctttagcagcgatttgaagaagtgaggagaaaggtttgggttgcggggatgggagggaggagctgcggactcggaggagtgggcgccagggtgggcttcctggagaggagcggggtcgccctgaggtctgagcagggcagggcggtaacgtgtcccgcgggtgggtaggtggggttggttggcggtggtgggagttgtgggagtttggggcgaatgtgtgtaggggtctctagtagttttcaaactttagtgaaaaggaaaccacttggtgagcttagatcccacccstgaagacactgattgaattggacttgggctgggctcaggagtctgaattttgagcatcgtcttctagtttatttaccgttcgccggatcagactttaatacattccctgattagggtgaaaggagtgttttggtgaaggtgagagtgcgagtgttgcttgtgggaagttattttgtgaccccggagtgtaggagcagagaggtggatttaggctgtttgaatggacaaactggtttacaccagtattaatgttcttggattatgtcctttgcactacagacaaaaacaccaatccaaaataagcatatgaatagaaaatattttaaaagagtgttactgtgaacaaatccaaaacttttacagattaataatgtgaattttaaaaacgaatgttaaacaaggtacacttagttttgtaaaaagtatcaccgagaaatggaaagaaatcccaagttgtttgttttggggggtgggttggtggtagtggttacatttaccagaattatcatttttacatttctcttattttaaatctttcattactaagcaatagggtcacataatagtctgtcactaaattcatgctaaattaaggtagaatagctgtgctagtagctttgcagatctgttagagggtataattaaaatttaaattaaacgttactaacaatattgggtagtctagaaagtgctactacttcaaattgggattacattttggctgtattgaggatcaaaatcatatatatagcatgtaagatacaatcttttcctttttcccaaggttagaaaagtttaaaagtaaggtaactgatttcatttttcattatatgcatttgatgatccattgttctagaacaagtacggagcttgttgcctctactattagcaaaatgtttagactgaattaacctgtatatcggcatcaatctgtttygcaaattaatttacttttatggtttgtgaacatctacgatgttttctcttasatttttgtcagatttggggccaggcactgcggctcacgcctgtaatcccagcactttgggagggtgagktgggcggatcgcttgaggccaggagttcgagaccagcctggccaacatggtgaaaccccgtctctactamaaatacaaaaattagccgggcgtggtggctcgtgcctgtaatcccagctactcgggaggctgaggcaggagaatcgcttgaacccgggaggcggaagctgcagtgagccgagatcgcgccacagcactcaaacgtgggcgacagagtgagactccgtctcaaaaaaagaaaaaaaagaaaaagatttttgtcaaatttggacctgatttggaaaaaaaaaacaaaaaaaaacttacggctttgactctgtgaccagtgctcttgaggtgacctaacaggttggatttaaaataaaagtagctaattgattagaggtgatatgtaatatatgcaaataaccatggttgaattgtgttccccgaaagatatttattgagtatttgtgcacaccactttacatttattatctcattcagttttcctaaacaaccctgcaggttattaccaggtacttctctgctcccactttacacgtgaggaaattggagcaaggttgttaacttggaaaaggccacaaaggtagaacattgcactgcctgaatttgaactcaggggctctaatattagagcccattctctcaaaagtttagatgtgctacttactacttgatgaaatgtatggtatttttattagtgagtgcatacaactcacaaaaagtttaaaactttaaatagtagctccaagtagtaccaccagagaagcttccagggattagaaacatttggctattgacctgcagtctaatggaattgtacagaaacaaggagacccctgtkctggaagtggtcattaaatctctcttgagtccacattttctcatttataaaaccgtaatattacttgccttttaaaaaatcraatgacaaagtttatataaaaaacttaaagcttaccctattcctcacctctggtttttaatggtttactctgatgaaatagtttcargtttacaaaaaagttgcaacaatgacacagagagctacccttttgcagatttaccaattaaaaaaaaaatgctacattgcttgcttactctctctgccactcactctccccatgcatattcaggcacatrtacgtattcatgttattatgtcttctgaaccattggagactcagttgtacacatcatgttcttttacaatgaaaatcttaatgtgtaatttttaagaacaaagatattctcttacgcaactacagtgttgatgtattcaggaaattaatctaattttatcctttgttccaataaagtgttttttttcccaagcatttttttcctcaagtacagtttccagtccaagataatatatttaatttagttgccatgtctctttaatcttctttaatctgggatagktccttagccttttttgtctttcatgaatttgacatatctaaggattgcaaagcctattattttattttatgttaatcagtttttgggtttgctggtgtttcctcatgtttagattcaggttatgtatccttggctgggatactaccataggtgatgcatgcttcttgaactattacatttggaggcataggttgtccatcttcatgrtgttaattttcctagtcacagggttgtccagtttctctgtggtgtcatttctgttttttttttttttttttttcaaattatctgtggggagacactgagaccatgcagatgtcttgctcttttttaaatggaccacttctacatttaacaaccattgatcaatctcctgaacctgtcttttccacaatggctgcaaaatggtaatgtttcagctgcaactccctctgctgttctgctctttggcttcttggcctaragctctgtgttcactgatccttcactaaccatctcaatgatgcctaggtacttcctagtcatagtattatcggcaatttttgttttctgaatttaatcttatttatcaatattatttatcttctcctctcttcaaacagaagcagaattagatggctttatgaaagtagatcctatacctaatttattggctaaaaagkcctgtgtattagattattggcttcaagattttcaatttctttatttaaaatgtaaagaacttatttttgtactcttattttttattttttgagacatgtcttactctgttgcctaggctggagtgcagtggtgtgatcatggctcactgcagcctcaaccayctgggctcaagtgatccttcccacctcaggcttccgagtagctgggactacaggtgcatgctaccatgcccagctaatttttgtatttattgtagagatggggtcttgccatgttgcccaggctagtcttgaactcctaggctcaagcaatccgcctgcctcatcctcccaaggtgctggaattggaggcgtgyaccactgtgcttggccccttccttctttttaaaatattctcaacttttattttctgtttttttctaagttgtttttcttcatttaaaaaaaaacttcttttaaccaatttgggtatgtgtgcctataattaaaaataattttaataattctgttactggattaaacatttaattaggaattaatttctagaaacagacaagactaattaatttttcttaattacaatagtaaagctactaaatttgtaaatctcttttcctttgagagcatcttggtgtattagaaggaagactgaggctsggaatggtggccccytgcctgtaatcttagcattttgggaggcccaggcaggaggattgcttgaacccaggagttccagaccagcctgggcaacatagtgagaccttgtctctataaatgaaaatgggaagaaaaaacaaaaaacactgggcccagagtyagaagacctggatttaagttgatgttttccatttgtagtagtgcttccttgttcaagttgctgatctcttcaaacctcagtttcctcatttctagacgggatgtgataatacttgcctcttttgtgaggatctcatgagatggtgtacttcaaagtgatttctaaactaggatattaactaacsctatttgggaaagttggtgaagacttcactgaggtagtgacactttagatcttaaagcctgaggtttttgccagggggaggaaagatggattctttaggcagagtatgtagaaaccagaagatttgcaaaagaaaaagcatgttcaaatgagatggatatttagacatcacaattatgaatagtaggtagtaaagtatgggaatggatgaaatcacccagggaagacttttcttgttagacgagaaggcagtttggacaaaacccaggggacamcaggatataaagtatgaatggaagaactagaaaaagagactgagctcagaagggtgggaaaacacaggaaggtttaaaaaagaagatgctaacaggaaaattaaaagaaggaaatgttcagctatgtcaggagttgtagagtaagggcaaatagaatgaaggctgaaaagaggcccttgggtttaacaactgaaaggtgactttagcagccagtaacttagcaatgcagtacctcctgcacacgttgaaaggtagcatttttactctgtttaaatcggggtgggcttttcatttgtttagattcaaagagctaatttagatccaagcaaagtactgcatgctttcctgtagtcagtaatacaacccagtgtatttggattgcatcawtaaagcctgacttattttttaacttaaatcttattcattgtcaactttacaatatcaaacatgaaaattctattacattcattcttaacctttaatatcagtgattctcaggagagtccagtaggaagattacatgtgtctgtggtttgtacgcaattatagcaactctgactttatctccactactttttgtatctttctgaaaggcatatagaaatgcagctgagtgagattcatttacttagagggatgttattgaatatactttcttaaaaatacaattttattaatagtaacgcattatatttgacmtacctcaaagagtcattgtgtctcactatgggttctaaacttgtttgtgtttaagtccattttttattaatacttaattttatctagtgtctgtaccatatttttgggtgtttttttttttcatttaacattttttcatggtctagttgtttagagcttgctctactttctttttgcttatcctagtatttctcatttaaactttatctcattgtgtattttcagtttatgtagttgctcagtgaatatttcttaaatatttatatagataaatcgttcacacattctgctcatattaaagactrtgatttgtgtgaaggtgcctagcaaagtgtttggctcataattttgcttaataaaatattttcagatccttttactcaattcagtgatttagattccattaacatttgctctctcattagccaatgttgttaaaaaatgaagcatgactgattcygtggaccctatacagaaggaaaccctcatctggtatctccattgtattgtagtacagcatcaccctgaagctaattttgtgtagttcacttgggtctttgctgtggttaggattaactgactcggaattgtcatgtaggtatggaatgaactttacaatcaggatttttagtctttatcccagtcttcaaaggcatctttacctcccagtcttggattattccatatgtatggttcattcctctgtgttttcaccataaaaatgcataacaattatarkgtctttatcttgtttttaagaaactcagactttatttggagagattaggctaatgtgaactaaccgtcagtaattcaagtatacaattagtgttaaattgtgtaattcaacttttcagtgtgrcatacctattgaaaattatttgttataagcctttgtttgtgtaaacagtgatttactgaagaaaatggaaatgctggaattttgaaatgttaaggacattttagtttgagacgttgaagtgttggtgccctgagtcataagcatgacatgaagaggcacgggctccttcctcattgtgaattcctttctcttgtgctcaggagttcagggttgctgctatgaaaatatgcttcagwcatgattttgtyagcatactgttatacatctgatcatctttagttatgaagatttaaatctcttgygttctaataattccaggtttgataactgatctgtcwtgtttattatgtttagctaattgaaatttatggtcattagatctggtactagagctgttaacatatttgcttgctacatatgtaaactggatcctactttttttttttttttttacaaggggtacattaagttattaggaaattttagtattttattgatttttcactaaatttcagcatttgttccaaggtgactaaaaataaaagaagaaactgtatactagcatctgcagtgcattcctagcagctgaactagttgtttttgtcttcataaaaataagatcgtaagttttacaaagggccaactattcaaattaaggattgtcatttcagtggtgcagtagggttccatttatgatttaattcttgaaatatatttcaaattaaataagattttactacattgaatagaaatttgatgaaatactgcctgtaaacagagtsttactttccaacagattataaaaccttttatcttattttgctttgcttgcatatctccttgaaggagagttggttctgacttctacattttgtcttaataaatattcaagaaaatattctttcttgacagtaggatatgttatttttaaaatcactgatctggtaaaatttgaggagaaaaatctgaaaattaaatttcaagccttaccattaaatcataagatgtgagattttatgttatttaaaaaaaatttagtatttggagcaacattaccagagctgaatgattaaagcacatgaaaaaggcagacagatggttggttgaaatgttcttttttgctgcatgaaaagttataaatgctcatagaatgacaaatgtattacagtgaaataatttgacagtattkcacttgtgtatataaatgaactactgacaaaaacaaattgcctgcagtccaaattcaaaatttaaaatgaagagcttaaagtagaataatcaagaaggaaatgattttcctctatttcatattattatgaataacgttggttcgtgtatttagagaaggcttatttagcctatcagctggaaagacttaatagatctacaaaagtgaacagtttatagccaatatctgtttattgatggactgattatttatattgctgataggaancagcctaattagaagtccactgtctttaattcagctgagtgagttggcatggtagctggacaaatgagagaagaatgaataaggccctgtctcagtttgttttatgctgctataacaaaaaacctgagactgggtaatttctaaakaatataattttatttctcacatttttggaggccaggaagtccaagattgagtcacaggcaggtttagtttcctggtgagggctgctctttgcttctaagatggtcygttgttgccrcatcctctggaggggagtaatgctgtgtccttactgggcagaaggtggaagggcaagagaatggaagactgtgaagcctcttttgcaagggccttaatctcattcatgaarggaggagccctcatgactaaatcttaaaggccccacctcttaatgctatcatattggccattaagtttgaacatctgaattttggagaggacacattgaaaccatagtagggtggttccaaaatcataggttggcagagctaggcatcacccaactttattcttggaatgggttttctgcaagtttttaaagcctaggttgagaatgtggtcaagaaggatgtgggggaaattaattagtaaaatatgagggcagagagataaggggcagagtggaaggcggagacctgattgtgtagggccttgtaaartcattgttaaggtctttgattttactctgagtgagaagggatgccatttggagagttttgagcagaggggtgaaatgattgtttaccctttaaagggacattttgcctcttgaactaggagtggactgcagatttgaggcaaggaccagcaaggagactattacagtaattcaggcaagagaaggtgatccgattggtggtagtggagagaagtgggtgagttatggatatatttgaaaggtagagccaatgagatttgctgatagtttggatgtgatatgtgtgtgggagaaaagatatcaagggtggatacaaagttttttgcctacacagctcgaagtttggaatagctgtcaactaaaatgaagaatattgtgcaaagaggaattttttttttaaagggggaaagggaccaagagcttgtgcatgttaagtttgagatgcgattaggcatccatgtggagatactaaataggcagttggatatcagagtgtggagcttagaggaggagtcaggctagaagtataaatttgggagtcatcaggtatcatgggattggatgagacactgaggaagtgagtgtagaaaaaggtcagagtcagtcagtcctgggacattcctggagtaattgtgtcaaataatacaaataggtcaagtaagatgattactgagaagggagttttggatttgtcactgggtggactttggtgaccktgacaagcagtttaggtgcactggtggggctgaaagcctcatgagtgggctcaagagagaaggaagaagaagaattgtggttagtatttttttttttttttgagacagagtcttgctctgtcgcccaggctggagtgcagtggcgtgatctcgactcactgcaagctccgcctcccgggttcacgccattctcctgcctcagcctcccgagtagctgggactacaggcgccctccaccacgcccagctaatttkttttgtatttttagtwgagacggggtttcaccgtgttagccgggatggtctccatctcctgacctcatgatctgcccacctcggcctcccaaaatgctgggatttacaggcgtgggccaccgcgcctggccattagtatatttttaagtatagaagagcagagaaatggagcagcacttggagaggaatgttatgtcaaggaatttttccttaaggtaggagaaactgtattatcttgtttgctgatggaaccaactgatgtagaggagagaaaatagatgatgcattagagagaaggaaaattgctggagaattgctgatatcccctttttcttctagaaaacttacagatacaggttagctgaaaaataacaaccctaatttcaatatccagaagaaatcggttaatgtagtatatatcttttagccttttttcttttgcatatatatttatatgtatgtatgtgtatatcatgtgtttttagagcaaagctatatgcttttataatatgacattataatttgcttgtttcatttaccaatgcatggagcctgctcatttcttaaaatgatagtccttttaggacaaattgtagttaaattactatctattagctattaggaaagtaaacaactaaggtatacaaatgaggttatgtagctagctccactagaggatttaaatagtatcttatgtagaatggaccttattaattactacctacataaatagaataaccttgcaaaagaatgaatactaatgatgttagatagtagcactgatgaggactttccacacatacctgtgtataccaggcagacagaatagcrtatacctrggtttagagctgtaatgttcaatatagtagcaactagccaaatgtagctatttaaatttaatttaattaaatttaatttctccaccactctagtcacatttcatgtatgtgatgtagctagcagttactataatggataatgcagataagtgattatttctattatcacagaacattctattggatactgctggtttagaggcaaggatttatggcttacatagggaacaggaaacaattcagtgtggcgagagcacatagttaggaggaaatgagggactgactggtgaaagatggttaggaggtaatcagtctgtattatgaagagttttgcataccatgctcagaaattaggattttatcatgaaggtttgcacagtaaggagtgctaaagtataggagcaacataaaatgatttattttttaaaagatcaccttggctacaccagtgtttttggattggacaagtatgtgaatgatgctagaattctgtgatactggaaacacagatggatagagtaagtttggagtgaggagggtaagtgttgaggtccgttttggatctgctgaatttgaattgatagttaggcattcgttgagcagttagatagatagataaggtattcaggacagctacctgggctggtgatgtagatttgggagtcattaattgatgacattgtagttggagccattgagtggaaagtgtgtgtgcggcatgtgaagagaaggccagtgaggaatcttagtaaagtctacattgaagagagtaggagaattggaacttacttasaaaactaagaagggagaattcagtttggggaaaccatgaaagttgattgtacaagtttttgaattgtgtttaaggtataagraaagggcgaaacttaattcctacttccgtaggaggaagacagccgataaatggtttattgtgtggtttgttgagacagtgtggtatgacggttagacacacccactctggaactattcctgggtgtcaaaatgtggcacagagttaataaatggtacttggacagattattttacaactctctgcccttggttttcttatgtgtaaaatggggatgaggatgataatgtacctacactcattgactagttgtgaggattaaaagatttaacatatgtaaatagtgcctggtacataataaacatagtaattatgattaccattataacaccattaaagtcatttaaagttttgttttcatttttcttttttggttttaagagacacaatctctttctgtgccccaggctggggtgcagtggccctatcatggcttactcctgggctctagtgatccttctgcctcagcctcctgagtagctgggactgcagacatgtatcaccatgcctagctatttttttttttttttttttggtagagacaagtcttactatgttgtccacgctggtcttgaactcctgggctcaagccgtcctcctgccttggcctcccaaagtgctaggagtacaggcatgagccaccatgcctggcctgttttatttttaatatgatgtactttttaagctattataattttagaattattgttaattttaayattaaccattgctttatgtttttaattttcaaattttcatcaaacttcagtttttctgaattatatttcacaagtgtttgaaacaactaaatatrtttacttttaatggcaaaaactgcagttacttttgcaccagcttaatacaaagtacctttaatgtgcaccacataaaaataaatgaaattaataagccctgattcttctgtgtgattatcaaggatttgggaacaatgattatagtacaaaggagtaaaaagtgtatttgttttaaacttttttttttttcaattttcagtcttcttttgtatcctatggctttgaagctgttcttgaagaagcagcctatttctcatttttcctaaaagaaggcaggcttatgtatgttttgctttaacagaaataaaaagaggaggggctaaatggtcagcagtgccagctgctggtgtggaatcaagcaaaatggtaaggcagtttggtgataaggcagttgttggtgaccttggtggtggtgacagcagtgtcaagggatgttgagtgtggaaatcgatggcagtccattggtggatgggtgagaagtgagtaaaagaagatcacttctccgaagaactttggctttcaggtagaggacgaaggatggttattgcagggagacatggagtctaacgagcttttttttcttttagagtagtttctcttttatttttaattatggtaaaatacacctgaataactttatcatcctaaccattttttcccctatttgacaaggtatcaagcaacytaaccattgttaagtgtgcagttcagtggcattaaatatagtcatattgttaggcaatcgttaccaccatccctctccagaactctttttatatgcaccactgaaactctgcacccattaaataaatccctattttctcctctctcctattcctacatacacacagagtcccatctattttgatactttgtatattacttaaataattttggatgatagtgactgcaratgatttttttcttagcattcttagtattgtaaaacggtttttcattcatgtagcaaaactataaaaaaagtttcaatatagtttggtcaataggatatgtttatgtttcaaaaatgtaaaactacacatggaaataagttagtcagtcttttaaaaataaattataatgggataattaactatagatgagaactgttttttttttttttttttttttgaggcagagttttggtcttgttgcccaggctggagtgcagtggcacgatctyggctcactgcaatctctgcttcctaggttcaagcgattctcctgcctcagcttcttgagtggctgggattacaggyatgcaccrccatgcccggctaattttgtgcttttagtagagatasggttttgccrtrttggtcaggatggtctcgagctgctgacctcaggtgatccacctgccttggcctcccraagtgctggaattacaggcgcgagccactgcgcccggccgagaattgtttttaagtgatagcatactttaaaataatcacataaaacttaagtgatttgcacttttagattctattcctgtcaagtacaaatttgtaggactttttttctgtttctggttctacatagccttcatcaggaaacttggtgggaccatgtgactttaaaaaattgtggtaaaaaacacataacrttaaatttactatcttaaccatttttgagtgtacaattcagtagtgttaactatattcacattgttgtgctacagatgtctagaactgtttcatctrcaatactgccctgtgactttttaaaaactaatttttttattgagatttccaagtgcatcagggacaaaggcagacattgcatattggtttcctgaattccctttacagaatgctgatccaaactcatcagatggaaaacttgccttctgtggccttggaaagttgttgttgttgtttttttaaagaatttaaaaattaatctagctttgagttggcatatcttattaacacagttgtagaaaacttatatttcstctactatagtttatgaatttcttggagaaaaatctaatactaatactcaaacttgatgcacaaacggattctttggcatgtttgtgtgtatgcccatctgttactgtggcaccatgcctattattactgtggcatgccaatagcagtgagccatgtgagccaacaaagatgaattgtttggacggaatacactattctgtaatactaattaattttgagctgatgaatctacatgagataatgttaaccaaatacagtcaaagtaatgtcagtgaaaataaaatttattttgacttatacagaagtgtatcacagatgttttagactaccattgagaataattagaatcagtgtttactatgattctagtgatcagttttcttttcatgaaaattttgagtttaaaagaaaagttcttcttgtgattatagattaagtagggagggggatgacactccaggttatggattttataccttttataaggtattactttatagttcttgaaatatattctttttttttttttttttgagacagagtctcaccctgtcgcccaggctggagtgcagtggcacgatctyggctcactgcagcctcaacctcctggtctgatcctcccacttcagcctcctgagtagctgggcccacaggtgtacaccaccatgcctggctaatatatatatatatatatatatatttatatatatatatttaagtcatatatatatatttaagtcatatatatatatatttaagtcctatatatatttaagtcctatatatatatayacacctatatatacatatataggacttaatatataatatatataaattttatataatatgttaaaaaatatatatttttcttttgtagagattaggtctccctatgttgcccaggctgttcttgaactcctgggctgaagcgatcytcctgcctccgcatcccaaagtcttgggattgcaggcatgagtcacagtgcccggccattgaaatatattcttaatatagtcagctttatagcagaaattgacagcgtagtatggtgaataggaagaaygttgaatttcaaaacaagattgaaatttaattccttgctttgccatccctggttttatgatgatatacataaaaggcatgtgattttagaatttctcacatgctatgtaatcttatgttacctttatatattctgagacttggtttactcatctattaaatgggaacaataatagctacacacgcttcatagagactttgtgatactaaaataagacagtgttataarcttcagaaaataawaccactaccacgtggctaaataagttaataatatgttataaacacgacatgttagcggtgagttagtcaatgatgtggaaaggatataacttccaatcccatatctcatamctcccattcatstgtaactacaaagaacaagttcttatgtatcctttcagaaattttttaaaaaaattaaacgatcatatatatactattctctatgtatcttgctttccacctggtatattttaaaagatctttccatatgttgatatgtctttccatatcaacatatgataccattttaatcttttaaaccagcaatcgccaaaccagcagtacccagggacctgtttcatggaagacagtttttccatggaagggggtgggggttggcttggggatgagactattccacctcagatcaggcattagattctcataaggagcgtgcagcctagatccctcgcatgcacagtttacaagagggtttgcactcctctgataatctaatgccgctactgatctgacaggaggcggagctcaggcagtaatactcctcatctgccacttgcctgctgtgtggcatcctggtttctaacaagccacagatgggtaatgttctgtggcctgggggttgaggacccctgttttaaaccactgtgtaatagttcctcataattaattagtccccccccccctttttttttttttttttttttttttttgagacggagtctcgctctgtcgcccaggctggagtgcagtggcgggatctcggctcactgcaagctccgcctcccgggttcacgccattctcctgcctcagcctcccaagtagctgggactacaggcgcccgccactacgcccggctaattttttgtatttttagtagagacggggtttcaccgttttagccgggatggtctcgatctcctgacctcgtgatccgcccgcctcggcctcccaaagaattagtccccttttggaggggcatttgattgatttcacttttcatcacataaaaacaatatttcaacataagtttttgcatacctgtgtgaatttatctatttgtaggaaaaaagttttacaggaaatctcatagagccactgacatagtttagtttatatatggtgatgcataaaatttgtaacaggcaaaaagttccttttcactgtttaaaaacactgtaaaccaaaaatgccactttgtatagaagattaagattgggggagtctcagaagcaataaaaggaaacattaacaaatatactactgaatagtcacattctagaagacattcctaatctcctgagcaaaggtaaaacatacttcctgctgcctaccaagaggccaagtagctgagggcattgataaagatcatgaagatgtcctgtgatgtctgtatgacatcatggcttttaatacgcatatgaatgatatgaagacatggaagatatatgcttggtttttaacttttattgggatcatggatccttttgagactttacagtgaaagggttcttctgtgtctttctaagaaacaagtttagtatatagcctgctttcatttgttttttcaactaatgtttattgtgtatctgttatggaccggtaaggaatgtaacctgcttcagcctacctttagaggcccttcatagatcttcttttggattctttatagccaagcttgttcttgctctgttatcttgtatgatttctttggttgtctccttgtacttcgagacctcagatcacttatccgtggaggtcttttgtgatcacccagtyttactttattgcattccttattttaattgtttstgtactacttatctgatctttctttatgtttttgttcctccctgctttcttccttctctgccttgctctctccctctttacttccctcccttctcctttttttcctgtcattccccttaaactccctcccaccaattccttgtttgttaaaatttaggtcctagaatattcagggacttcaatacttagagcagcttctggcatataatggatgttgaataaataaatgtgctaggcccagtgataagtgctttatgattttattaagtcttcatgacaacctatttgaaatagacatsagcttttagttctgttgatttttctctattgtagttttgtttcatagaggctttgtgatactaaaataagatacaagcttcagaaaataataccaggtagctaaataagttaataatatactataaatgcaaaacatgttagtctgttttattaaattcttcttgtatctttattattttattacttgtactttgagttcaatttgctgttttttttttcctagcattctgagatggaaacttagatcattgatttttaatctttctgattttgtattgtaattagaaatataaatttgcttctttttttttttttagggacagggtcttgctctgtcactcatgttgaagtgaaatggtgcgatcttggctcactgccgcctcagcttcccagactcaagtggtcctcctaccwcagcctcctgagtagctgggactaaaggtgcatgccaccatgcctgactaattttttgktttttttgtggtgaaagggtcttgccgtgttgcccaggctggtcttgaactcctgggctcaagcaatcctcccacctcagcctcttgagtaactagkactgtaggtgtatgccaccaagtccaactaatttttggattttttgtggagatagtgtctttgttatgttgyctaggctggtcttgaactgctgagctcaagtgatcctcctgccttggtctaccaaaatgctgggattacaggcatgagtcacctcccccagcctaaatttgcttctaaatattgctttagctgcatcccacaagttatgaaatgttgcactttgtcaaatcacaaagtatgttgcaggctggcatggtggctcacacttgcaatcctagcatttttggagactgaggtgggaggattgcttgagttcaaaagttcaagatcagcctggacaacatagggagaccctatctctacaaaaaataaaaaaacattagccaggcaaggtagcacatgcctgtagccccagctacttgggaggctgaggtgggaggatctcatgagcttaggagtttgaggctgcagtgagctgtgatcatactactgcactccagcctgggcaatagagcaagaccctatctcaaaaaaaaaaaattaccattatgtgagcactttttagtttttattttattttttaagtattggtttctatttagattccacatacyctgattcttatacctttcaaatttgttgaaaccttatatagtctattttggtaaatgtcctatgtacaattgaaaagaatgtttattctgcagttgttggatatattgttctatgcttgtaagtttaagttgtttaattatgttgttcgaattttttacacctttattgaatttttcgtttcctggttctgccagttactgagaggtgtgttaaaattgccaatcatggccgggggcagtggctcatgcctgttatccagtactttgggaggccgaggtgggtggatcacgaggtcaggagatcgagaccatcttagccaacatggtgaaaactgtccctactaaaatacaaaaaattagctgggtgtggtggcgcgtgcctataatcccagctacttgggaggctgaggcagggaaattgcttgaacccgggaggcggaggttgcagtgagctgagattgcgccactgcactccaacctggtgacagagcaagactgtcccccaaaaaaaaaaattgcctatcatgattatggatgtgtgtttttcttccatgagtctgtcagcatttgctttacacatggaaactgtaaatttagaatctgtataaattgcatataaatgtaaaattattttccttttgaaatgataccctatgtccaggcagcagatcttcagcttttatttgtttgaaaaccactttatttcacctttagtgaaataaagaatatttttaatatcctgggtatggaattctatgttggcattcttttctctttcagccctttaaatatgtcattccgatatcttttggcctttataatgtctgttgaaatgttattccttttaaggtagggaccagcaaaccacccatctgtttatgtacataaagttttattagaacacaaccatgcccatttgtttttgtattatctatagatgctttcattgtgcaatagcagagttgactagttacatcagagatggtatggctggtaaaacttaaaatatttactttctggccctttacgtttgttgactcctgtctcaaggtaattttctggatgcctttttttttaaaaaaagatagggtctcacccaggctgagtgcagtggtgtaatcatagctcactgcagccttgaactcctgggctcaaacaatcctcttgcstcagccttctgagtagctaggattataggtgcacactatcatgcccagctaattttttaaaaatattttttgtagagactgggcctcactatgttgtgcccaggctggtcttgaactcctggccktaagcaatcctcttgcattggcctcccaaagtgcttgattataggcatgattcaccatgctcagcctctggatgcttttaagatttttctcattgtttcttgttttcagcagtttgactatgctstacctggtgtagttttatgtttgtcctttttttctaagatttttaaatatgtgggtttatgtttttcataggttcagaacaattcttaaccattatctcttcaaatactgcttttgtttcatactctcttttctctttggaactctaattagaggtatgttagaaattttacctttatctcatatgcctctgatgctctgttctattttttccattcttttatttctctgtgcttcaatttgtatattttctcttgacctgccttcaagttcgataatcctttttttctcccatttccagtctgccattaaacctatctaatgagttcttaatttcatatactatacttttcagttctgaatgtccatttggttgttttgtatggattctactaattgttgatttctgtgttgtttcatctgttttgtccatctcttctacattttcctgaccatgttaattgtaattattttaaaatccctgtgtgataactctggtatctgagtcactcatggatctgctcctggttttttttttttttttttcctttttttcttttttgggcgggggtaatttcatcctgtttttagtatgtctcgtaagttttgatcagatgctaggtatttaggataaaaatgattgatgaagctttgggwgatagcttcttccatacagggctgggtttttgtttttgtttttttttccagccaagcaaatagaatgtaagcagatcattctgatcttgtcaaagctcagttttagactttttaaggtcttgtttatggaactttttcttatactcctcgggcatcttccttagcactctgtgtggctcttcagtaatcttaatggaaagtccagggcattcaccaaagcctctcttctgaggacagacttgacagctgctgttttttgttgtgtttcctggagtcttgccttaggaattgcagccaacattttgcacacagatttttgtgtaccttgtctctggttccctcctctgtaattttgtccttcaagtctcagtcaytgtggcagccctggaattcaacatttgtctcctcaagttattaagactgtgacttctccttgggttctgttctcccacatggcaatttgggaaatgtactgagggaaaaagctggtgtgaatgaggagctctttttttcccttgagagagataggttcttactctgtcacccaggccacagtgcagtggcatcatcatggttcattgcagtcttaccctcttgtgctcaagattctcccaccgtgtctctgagcagctgggattacaggcgcatgtcaccacacctggctactttttgtatttttagtaaagatggagtctcaccatgttgcccaggctggtctcaaactcctgaggtcaagctatccactagcctcggcctcccaaactgctgggattatattaataggtgtgagccactgtcctggcctaggggctcactttttgtgcttctcttctttcaaggatcatggccccttaagagtacttgtgtgtgtgtatatgtatatgcatacatatatgtgtgtatatgtawgtatttcagcttttatagttattttctatggcaggtttagttttttgtaagctacagtgtcatggacagatatggaagtccctacagtatattctgaatgtagcagccagaatgatcctgttaaatagatcatgactctcctgtgttcaaaacctgcagttctttatttattcagagttaacaccaaaaacttttagagttatttgacctgcttatcctccctgtccccctttgctccccatgatatctgcataactaactctcttatttgaaaatctttgttcagatgtcacttttaaaatttactcaaactgtgctattaaaattgcctccttctttcctttctgtatccttttcctctgtttttttcccccatatcaccttacgacttaaaaatgtcttatttattatgtttgttgtttcttttacttaatagaatgaaatccctatgagggcaagggtttttcctatcacttttgttcattgctgtgtcacagatgcgaatggagaaccagatgagaatagagcttcagaatctaaaggaggagggaatttcaagatggaagagtaatggtcatatgtatcagatgtcaacagaaagagccaaactttgtaaaataattgaagaggtttattctgagccacatatgagtgaccatgacctcaagagatcctgagaacctgtgcccaaggtggttgggttacaacttgattttatatttttaaggagcgtaagacatcagttagtacatgtgaggtatacattggctcagttgggaaaggcatgacagcttgaagcagggggcttacaggttacaggtggatttaaagattttctgattggcaattacttgaaagagttaagttgttattgaaaaacctgggatcaagagaaaggtgtggctgggttaggataaagggctgtagaaaccaagattcttatgaagtctcttaggtggctgcctttagagacaatrgatggcaaatgtttcctattcaaatctttaaaagtgctggactctcagttaatctctttagaattgttagagcctggaaggggaaactctgtagagatcctttacagatgcagattttcttccacaaaaggctgctttgcagggccggttcaaaaatatggcaaagaagcatattttggggtaaaatattttgattgccttctttatatgtcatgtgacgttatgctatagtcaggttggaaagtaagccacgttacgtagggttaaattaaaatccatctgatgagaatttatggtttgtagggcaggactcctcaggccccttaggaatttgggcaagagagaraaaagtcagagtttagtcctcacaagtacagaggaataatctgaaactattcatgagattttaccttggatttttaaattaagacgttgtttgttaccctgtgtgagagacattttaaattaaaggtaaatgagattaccaagagttgaggaagggtctgtaggcttttttctttttaatcttgtgaacagtataggaggaatattcatatttatttggataatttatgattctgacttttagaaagtttgtttgttttttgttttttgagatggagtttcactcttgttgcccaggctggagtgcaatggtgccatctcggctcactgcaacctccacctcccagattcaagcaattatcctgcctcagcctcctgaatagctgggattacaggcatgtgccaccatgccaggctaattttgtatttttagtagagatggggtttcttcgtgttggtcaggctggtctcaaactcccgacctcaggtgatcctctcgcctcagcctcccaaagtgctgggattacaggcttgagccactgtgccctgcctagaaagttaatagatgggtgagcaggtaaagacactagcaatggagttttttgtttctattcactgttgcatttattaagtggaggctttgtgccaaaagttttycccctatattacctcatgacttaaaaatttcttacttattatgtttgttgtttcttttacttaatagaatgaaatccctatgagggcaagggtttttctgtcatttttgttcattgctrtgtcacaaatgcgaatggagamccagatgagaatagagctacagaatcaaaaggaggagggaatttcaagatgaaagagtagtggtcatgggtatcagatgtcaacagaaagagccaaagttctgagcactctgcaagggaagcttagatcctaagtgaactgaaaatgttcctaagccttaatgttttgcacaaaaacattattattatgagggccactccctttggctacatagcactgggaaatggtaagttctgactctgtttccagcgttttttctgcatatccattcatatttgcagcgcaccacttggatagtagcatcttttattggagtggttctctatgcctaaagaggtgcctgtgttttggaattttttggtagggctccataaaggtccarccttcmcttcgttgaatatttttatacatccttttttgggcatgtatctctgattggaaattgctattccttatcacttttccagtccatgatttcctggatgtaagttttaggtgttgctttctatggtatataaattttggtgtaccataattttgaggaaaaagaaggtaactttgtagtgtggggctctcaaatggtaaaagtcctttcttttttctttttaaaatttccagtccaatattgatggatacttctacaaaatacaataaaaaataaattactagaaaaataaaatgggccaggcgtggtggctcatttctgtaatcatagcactttgggaggccgaggttggtggatcacctgaggtcaggagttcgagaccagcctggccaacatgatgaaaccccatctctacttaaaatacaaaattagctgggtgtggtgatgcactcctgtaatcccagctactcaggaggctgaggcaggagaatcacttgaatccaggaggcggaggttgcgtgagcsgagatcacactactgcattccagcctgggtgacagagtgagactctgtctcaaaagaaagaacaaacaaacaaaaacataataaaattaaagaaaaataaaatgaaaaaggcacacaaaataaaatacaagccccactttttaaattagactcaataaacataaaattacattgtcaaattgttccgtcacggttctcaatgtgcttattctgaattttggtacctatctcctcatgggttggtaacaaaaatttgtgaattagtcatgattcttggaccagactttctcagatcatactttaagtagcactgatatagtgtacagtactacatagtcttaattttccccttaatttatgttgtctttagaaggagtagaaggttttaatgagttatggattatagattgattaaaaagagaggtaatttacactacataatagccctaacacatccctagttcttatatataactggtaaactttatttttcagttatagttactagttcattctggggctaaaataagaatgactttcctggtaatagtaagatttgccttaaatgttcagttatatattcttctctgtcctttgaaacttaaaactggcctattttgaacatgaaaggaaaagttataccatttaacaccacaagatgtcacttatgtaaaaataaagttggtatcctaatactcaaagctagaaagctacaggtaactaggtaaatgaagacacaggtaaattaaaaatgaatatatttgaaacaactattgttttcagcaaagagttgaggaaaatattgctaattcagcattattttgactcaaatattgatatttarcaaaatagtatctaagatttatgcagtaatacatgttaactgatcatatttgaatctacgtaatgaagaaggtagacctaaaagaacttaataaaagttaatgtattttgagggtaaagtaggtgttatggtattaactttcctaaatctttactgttttggtgacaggcaaagargaatttgggaagaaacatgtaatttatatcagaattttaaatagatccttatgacatacgtgagaagctgcatattacatcaggttgaaacagtgcctaggatttttcttgtctcttccctgaacctcagaattattagtttctcttcctatattaatgcagtatttgttgttgaagactagcttttctgttaaccatgaagagcaaaacctttayctttaatattgagattctgttttcttgtttttagtttcagagagcaggtgcttgttctgggcactctgggaatttgggctttagatgagcaaaccaagtttccattagtttacgagtaagactatgcctggaattagaggttgggctgttctaaaaattgacacttcattcctcttcattgctcacttctctctccagataaaactggtagaggagaataatgggacactttggggaacagaaaaggggaacaagcaggagaaaattgttttcttttttggcatgtgtgtatgtgtgaccacatttcctttctatttagttcctatcgaattctttttttttcttacctaacttcagtaagatttttttaaggtttcttttagggtttaggtttttcattataaaagtatacatagtcattaagtaaataggaaaatacagcaaaaagtagaagaacaaaatacagttacatatatagttccattaatttctctcccttttctgttacctgtgaaatctgaaagagcctgaaaagttttatgcagggatcctaaattccttaaggtgaacatttatagtatgtgtagtagttgtatgttctcagagacagtttttatttattactacctctactgtttaaatattttcaagctgtatttttaattaggaagaagtaggtgttttaattatttaattgtattttgtcttctctactggtcaccattgcatttaattttatgagctgtttggaaagtaaggctcatttttttcataataaatttcattgcatttattccttttgaaaaaaatgtgcttagcttttacttatttttttcttgcaatgacagtttgtaacatttaacccttgtattagtttgctagagctgccataacaaaatgccacagactgggtggcttaatcagcagaaattaattttttcacaattaatgcctgggagtacaagatcaaggtgttggcgggtttggtttctgctgaggcctttctctctggcctgcagatggccaccttcttgctgcagttatttaacattgcccatgatattacttctaattcttatgaaaatgatatattttaagctatctaatataaaaatcaaagtatggattttttttcttctcttttgtaataggaatgaagatctaaagcaaatgttagagagcaacaaagattctgctaaactggatgctatgaagcggattgttggggtaggtaaaatactcatttacttcaattttggaaaaatggacaagcagtgatcatattattatatatatatataaaaataygttaaataccaagtctaatattctgtttgcccttaatattaacttagaatttcctgtccaaaaatgttaaagaaaaaagtacattaytgaagtgtcaaaaatcaagaaacttaggttttaattttatcttttctctgttttaatttccctgtatctaatttcaaggtatttctactatgagaatgaggtagttagtcattttgaagacaaaataagatgatatacaagctattttgacttcctacacagagggatactaaagaatgattttttttgtcctttcacagcctaaatgttctgagcatactttcatctgttttttaaattctcttactaccaatagaaacactttattcastttagaagcctagaacttctaataaatattattaaatataagagcattcaccagtgttcagctgtaaagcaaaacataaacaattgattaataagttatgaggattctattgccagagaattaaagatataatatagttccttaattatttttaatgttttaattttaattttttatttttccagggttctagttgtatataccatctttagtaaaatagttttgcaatttatgttgcactctctgtacgtactcatttgattttccacattcacagagaaaaaacttgcttaattccactgactatctgatgctcaggagttttgcttttgtttcactggaatcaaattcataaaactgatttttcttattaacactatcctttttatcaccaccattgctgattctattttccacttaattttatataataaggtcaaaattgaatacatttgcataattgcttaaataaactactgtaataaggcgatgacacaactaaaacaatactgttttccagcaggcagtgccatcgtatgagagcttcagatctcttttcctttcttgatatattaaagtccaaataacaggtatcagcatgctctgttaaaaagtgaggtggtatgaaaatcaaatatattaaagtcaagtwctaattgtatctgtaggacatctgtaagtgacttgatccttgctttcatgtttatgtcatttggcagtatrggggcaattttgaggattccattgtaaatttttgatttgttaatgttatgctctatacataggagtatttatgggcaggcagttcttgctttgcatggcttttatacatatgaatttcagttactacagtttagttaagtgacaccaatcccctaacaatatggttcaaatttcatttaccatggtgtattaattgtgtacttggataatgtacaaacttgactgctagctcttcattctacaaataacttgtaaattacaaacatgtatcatgatccatgatcaatcatgtcacttctttcaaaatctgtcagtgattggtcactgtgcatctgttactcagtttatgcacagacaacaaagcatgtagttgtgttgcctctttgtctcccagtaagaaacacatgtgacattttacagaaatgaataattgaaagaggcatttgcccaacaaagtgaaaatacagcaaagaaatgaaaagtgataacatgtaatgaaaatcaggtagaatataaatgaagttatacagaagtagctggctgtggaactactgacattacacgtttttaagagactgaatttatagctggaggaacttggtaaggtgagattttcaaccaacataaatgatgaaagtgattttgttgaagagcatgaagctgtctcagaggaagtgatgctgtcagaagacctcacattcattaaaggaactctaggagatagttgagaacattgaaaatgcaaagggtaaaatgttggaagctgatccagacttagaaaggagcatgataatttactgaggaatacgaaagattcttcctcagtatcatgagttaaacactgataagagaacaagttctgttcaaaccactcttgataagttcattttctttgcctttttttttgtttttttagagacagggtcttgctctgttgtccaggctggagtacagttgtgcagttgtaacacattgcagctttgaactcctgagcccaagcgatcctcccacctcagccttctgagtagcagggactacagatgtgtaccactatgcccagctaatttttttatttttattttttgtagagacagggtcttgctatattgcccaggctggtgtagaactcttggttttacttgatcttcccacctcagcctttcaaagtgctgggattataggtgtgagccaatgtgcctggccaagttaattttcaatttttccaacgttttaagttatagtatactaaatattgatttttattattttttcactttcctataaatttataactgacagtaaaagagttattaatgctttgacagaaattttaaatagtatccagggatttagtgaaataaattaccttaatgggatgtaagagccatagtttaaagaaataaataagggcagtccctactttgcatggtagtgcaggtctatgccctgcaggaatgcaagcagaaaccatggaaagaaattttaataagccaactggaaaaattacaattgatctatgatgctwaaaatttttgtcaaaacaggaraattagctgagtcaggtggtatactgttttgagttaatgactgtaataaatagttttgtataaatctttccagacggactgtttatcccttgttctttccctttcttccttcaataacaatgctttggttctatgtatgctttaaaggattcaacttggggctgttgcttgcatcttttaaaaaattattgggttggaaattgtttaaaagaccaagatttttctgcagtattagtgtgcatcaggatgaattcctgrttatcaggcctgaggttttactggtgatgtgacacctatagaactttagtgggttttctatcagctttgctccaatgtagtctctggaatacaaaataagggtcagttaactttctgtatctccatttattcttgactgttgattcttaagagttactgttgggtctgaaaccctttgaaaccttttctctctgtttttgttacctgtgaattaactagcagttttctgtaaattcaaaattctgaacttttatctcatctttattgctttgaagaatgaccagtggaaattaaaaattaaacataatttcatcctttttcaaaaaactgggtttaaaaattatgtgaatttttggatctagattattattcaatacagtcatgcatcacttagagtcatgcatcgctgaatgacagggatgctttctgagaaatgcatccttaggcagtttgttggtgtgaacctcatagagtacttacacaacctagtatacttacacaagcttactacacacttaggctatatggcatagtctattcttcctaggctataaatctgtacagcatgttactgtactgaatactgtaggcagttgtaacacaatggtaagtatttgtgtatctaaacgtatctaaacatagaaagttacagtaaagatacagtattataatcttacaataagattatatatgtggtccctccttgaccaaaacrtggcacgactgtaatttaaaaataacacaaaattcagtcattgtaatataccacattaacagaaggaaagggaaaaatccctcacaatcatctcaatttattcggagaaagatttgacaaaatttaatacactttgatgataaaagtactcaacaaactaggaataggaggaaactacctcaacctatctgttaaagagcaggtgtggaaaacccaaaactagcatcacactcagtagtgaaagactgaaatcttttactccaaggtcagaaacaaggatgcttgcttttaccacttctgtgcaacacagtattggaaattttagccagaacaatcatgcaagaaaaagaaataaaagacatccaaatggaaaaggaagaagtaaaattatttttattcacatcatcttatatgtagaaaaccctaaagattccacaaaaaactgttagaaccaatacgcaagtttaccaaagttgcaggatagaaaagcaacacaccaaaatgacttgcatttctacacattaacaatgaacaatttgaaaataaaattaaacaaatattcatttataatagcatcaaaaagaataaaatattcaggaataagcttaaccaaggagatgaaagacttgtacactgaaacattactgagaaaaattaaagaagacacaaataaatggaaagacatctatgtttctgggttggaagactaatattgttaagatgtcaaaatgatctgtatattcaatgcaattcctatcaaaatgccaatgatgtgcatggcaaaaatagaaaaaaattcatcctaaaatttatatagaatcccatgagtccctgaatagccaaaacaaccttgaaaaagagcaaaattggctgggcacagtggctcacgcttgtaatcccagcactttgggaagctgaggcaggaggatcatttgagcccaggagttttagaccagcctagactacatggcaagaccttgtctccacaaaactaataataagaaaaaaattactacctgtgcctgtggtcccagctgcttgggaggctgaggttgtggtatcgcttggagtgagctgtgttcatgccactgcactccagcctgggcaacagagcgagaccccatctcaaaaccctgtctcaaaaaaaaaaaaaagaacaaaattgaatgtctcatacttcctgatttcaaaacctatgacaaagcatagtagtgaagacattgtggtactggaataaagacggacaacgtatagaccaatggaacacaatagggagctcagaaatcaaccctgacgtaaatggtcaaatgatttttggtaatggtgccagatcaatcaattgggaaaggacagtcttttcaacaaataatgttggggaaactggattatatatatatgcaagaaaatggtgttggatttctttctgtatcacaccataaataaaaataaaccaaaatggatcaaagacctaaatgtaagagctaaaactataaaactcttagaagaaagcatagagaaaaagcttcatgacattggatttggcataggattcttagatacaacactaaaacaagaacagtaaaaaaaaagtagattatttggattttatcaaaattaaaacttgtgtgcatcataggactctgtcaacaaagtgaaaaggcaacccatagaatacaagaaaatatttgcaaatcatatatctgataaaggattgatatccagaatatataaagaactcccacaactcaaccattaaaaacctaccaaatggctgggtgtggtggctcacgcctgtaatcccagcactttgggaggtcgaggtgggcggattacttgaggtcaggagtttgagacaagcctggccaacacggtggtctctactaaaaagacaaatctcgtctctactaaaaatacaaaaattagccaggtgtggtggtgggtgcctgtaatcccagctgctcgggaggctgaggcaggagaattgcttgaacccaggaggcagaggttgcagcgagccaagatcaygccactgcactccagcttgggtggcagagtgagaccgcgtctcaaaaaacaacaacaaccggtggctcatgcctgtaatcccagcactttgggaggccgaggtgggcagatcacgtgaggtcaggagttcgagaccagcctggtcaacacagtgaaacctcgtctcttctaaaaatacaaaaattagccaggcgtggtggcgggcgcctgtaatcccagctacttgagagactgaggaaggagaattgcttgaacccgaaaggcagagattgcagtgagccgaggtcgtgccattgcactgcagcctgggtgacaagagtgaaactctgtctcaaaaacaaaacaaaacaacaacaacaaaaaccgaccaaatgaaaaaatgggtagaagactggaatagacatttctccagagaagatatatagatggcaaataattacagagaaagatgtgcagcatcactaattattaggaaaatggaaatcaaaaccatagtaagatcactttacaccattaggatggttattatcaagaaaacaaaattgtaagtgttggtgagggtagagaaataagaactcttatgcattgctggtgggaatgtaaaatggtacagttactgtggaaaacagtatggtggttccttaaaaaactaaaaatggaattatcacataatccaccattctccttttgggtatatacagacaacagttgaaaggagatacttgaacagatatttctacatcagtgttcgtagcagcattatttatagaagccaataggtggaaacaacccatgtgctcatcagtggatgaataaacgaatgtggtacatctgtgcaatggaatgttattcagctttaagaaggaatggaattctgatgcatgctacaacatggatgaaccttacttaagtcattatgctgagtcaaataagccagacacacacacacaaaaaattgtatgattccacttttatcaggtacctagaataatcaaactcatagagacaaaaagtggaatggtggttgccagcagctagggggaaagcgagaaattgggagcttgtctttcaaaaatcattttggacatttattttaaatattatgaaccctattaaaaatagttgtgtaggcatgagcgctgtcccactcattatgctttcacttttttttttaaacttacattcctcctcattctttttttattttctattttttatttttgagatggagtctygctccgtggcccaggctggagtgcagtggtgtgatctcagctcactgcaacctccgccttctgggttcaagcaattcttctgcctcagcctcccaagtagctgggattacaggcatgtgtcaccatgccccgctaatttttgtacttttagtcgagacgggggtttcatcatgctagtcttgaactcctgacctctggtgatctgacctctggtgatctgccctcctcggcctcccaaagtgatggaaatacaggcatgagccaccacgcccggcccctcctcattctttagagttttggtttattttcaggtgatgggggcatttcatttaggaagagaatgtagatggcattctttcaaagtccttgcctgtcggaacaggtttctwtttttttttccatgggaaaatagattacttaagaatagtattgttgggttgcaatgttttcttttccttagatttttgtagatttcattcttgattttgtctggctttagctgtacagagcagaaatgtgatgtgatgacaatgagattgcttttttaaaaaacatttaatttttatttcttttaattttattattaatttttttttgttttttgtttttttgagatggagtcttgctctgttgcccaggctggagtgcaatggcacaatctcagttcactgcaacctctgcctcccgggtccaagtgatcctcctgcctcagcctcctgaatagctgggattacaggcgcccaccaccacacccagccaatttatttgtatttttagtagagttggggtttcaccattttggccaggctggtctccaactcctaccgtcaagtaatccgcccaccttggcctcccaaagtgctgggattacaggcgtgagccactgcacccggccatatatatgtatttttaattttagtgggcacatagtaggtgtatgtattttgggggtacatgagatgttttaatacaggtgtgcatgtgaaataagcacatcatggggaatgggatatccatctccttatacctttttccttctgagttacaaacaattcaattacactctttaagttattttaaaatgtacaattacattattgttgattgtggtcaccctattttcctgtcaaatagaaggtcttattcattcattctgttatgtttgtacccattaaccactccacctcccctgtatcccccacttcccttctcagcctctggtaaccatccttctactctctatgtccataagttcagttgttttgatttttagaccccacaagtaagtgagaacatgaaatgtttgtctttctttctttcttttttttttttttgagatggagtcttgctctgtcaccagtctggagtgcagtggcacgatctcagctcactgcaagctccacctcctgggttcacaccattctcctgcctcagcctcccaagtagctgggactacaggcacctgccatcatgcctggctaatttttttgtatttttttgtatttttaatagagatggggtttcaccgtgttagycaggatggtctcgatctcctgatctcatgatccgtccgccttggcctctcaaagtgctgggattacaggcatgagccaccgtgcccggccagatgtttgtctttctgtgcctggtttatttcacttaacaagatcttcatttccacccatgttgttgcaaatgactggatcccattgttttttatgactgaatagtactccattgtgtatttgccccacattttctttatccatttgtctgttggtggacacttaggttgcttccaaatcttagcttttggcaacagtgctgcagcgagcattggagtgcggatgtctctttgcactcctgattttctttcttttgggttgtacccagcagtgggattgctgggtcatgtggtagctcaattactagtttctttttgaggaacctctaaactgttttccatagtggttgtactaatttatattcccaccaacagtgtgcaggggttcccttttctccacatcctcaccagcatttgttgttgcctgtctttcttttgrgtataagccattttaactggggtgagatgataactcattatagtttagatttgcatttctttgatgatcagtgatgttcagcatcttttaatatgcctgtttgccaattgcatgtcttcttttgagtaacgtcttttcaaatcttttgccccctttttatcatttgatcaaatcttgcccatttttagattattagactttttcctatagaattgtttgagttcctgatatattctggttttaaatctcttgtgagatggatagtttgcaaatattttctcccattctatgagttgtctcttcactttgttgatcgtgtcctttgctgtgtagaagctttttaacttgatgtgatccgatttgtctgtttgtgctttggttgcctgtgcttgtggggtattactcaagaaatctttgcccagaccaatgtcctggagattttccccaatgttttgttgtagtagtttcatggttggaggtcttagatttaagtctttaatccattttgattttatatttgtatatgctgagagataggkatctaattttgttttcctgcatatggatatccagttttcctagcaccatttattagagactgtcttttcctcagtgtatgctcttcgcatctttctcagttctctgtaggtgtgtggatttgtttctgggttctctattctgttccattcctctgtgtgtctgtttttatgccagtacatgctgtttggttactatagctttgtagtataatttgaagtcaggtaatgtgattcctccagttttgttctttttgcttaatataactttggctattctggatcttttgtggttccatataaattttaggatttctttttctatttctatgaagaatgtctttggtattttgataggcattgcattgaatctgtagattgttttgggtagtagggacattttaacaatattgagccttccaggccatgaacacagaatatttttccattttttggtgtccttttcaatttccttcttcagtgttttatagttttcactatagagatagttcacttctttggttaagttwattcctgggtatttaattttgtgtgtggctagtgtaaatgggattacttttaaaatttctttttcaccttgttcactgttggcatatagaaatgctcctgattttggtatgttgattttgtatcctgcaactttacttaatttgtttatcagttctaatagttttgtggtggagtctttaggttttccccaatataagattgtatcatctgcaaacaaggatactttaatttcttcctttccagttggagaccctttatgtctttctcttgtctgattgctctagctaggacttccagtggtatgttgaataacagagatgacagtgggcaaccttgtcgtgttccagagcttataggaaagactttcagttttttcccattcagwatgatactagctgtgaggtttgtcatatatagtttttattatgttgatgtatgttccttctattcccagttttttgagggtttttatcatgaaaggatgttggattttatcaaacggttcttcagcatcaattgaaatgatcatatggtttttattgcccattttgttgacatgatgtatcacattgattgatttgtgtatgttgaagcatccttgcatcccagggataaatcccacttggtcatgatgagtgatctttctgatgtattgttgaactcagctttctagcattttgttgaggatttttgcatcaatattcattagagatattggggtgtcattttctttttccttgatgtgtctttgtctggttttggtatcagggtaatactggccttgtagaatgagtttggaagtattccctgctctgtttttcagaacagtttgagtaggattgatattaattcttctttaaatgtttggtagaatttagcagttaagctatcgggtcctgggcttttcttcagtgggagactttttattacagctttcatcttgtgatttgatattggggtctgttcaagttttggatttcttcctgattcaatcttgataggttgtatgtatctaggaatttgtccatttcttctagattttccaatttattggcatatatgggtgctcatagtagccactaatgatcctttgaatttctgtagcatcagttgtaatatcttctttttcatttctgattttatttatttggatttttctcttttttttcttagtctggctgatggtttgtcaattttgtttaacttttcaaaaaaagctttttgtttcattgatcttttgtattttttcatttcaatttcatttatttcttctctggtctctattatttcttttcttctactaattttgtgttttgttcactcctgcttttctagttccttaagatgcatcgttagattgtgcttttgaagtttttcttcttttttgatgtagacacttatagctatgaaattccctcttagatttttcagtttctttcttaattacttcattgacccactggtcattcaggagcatattgtttaatttccatgtgtttgtatagtttccaaaattccttttgttattaatttctagttttattctattgtgatyagagaagatgcaattatttcaattttttgaacgcttttaagacttgttttgtgacctaacatatggtccatccttgagaaagatttatgtgttgaggaaaagaatgtatattttgcagctcttggataaaaggttctgtaaatatgtattagattcatttttgtctatagtgcagattaagtgtggtgtttcttgattttctgttggaagatctgtctgatgctgaaagtggaatgttgaagtctcctagctgttattgcatttgggcctgtctctctctttagctctaataatatttgctttatatatctgggtgctccagtgtagggtacatatatatttaaaattgttatatcctcttgctgaattgactcctttatcatatagtgaccttctttgtctcttcttatagtttttgtcttgaagtcttattttgtttggtattgtatagcaactcctgctcttttttcatttccattgggatggaatgtcattttccatacctttgttttcagctgatatatgtttttatgggtacagtgtgtttttttgtgggcaacagatcaatgggttttgttttttcatccattcggccactctgtttttctgattggcgagtttagtccatttatgttaaatgttattattgataagtaaggacttactcctgctattttgttatttgttttctagttattttatggttttctcttccttctttctttccttcctgtcttctagtgaagggattttctctggtaatatgatttagttttttgttttttactttttctatatatcttgtatgtttttggtttgaggttaccatgaggcttgcaaatactatcttataatccattattttaacctgatagkaatttaacactatttgcataaacaaacaagcaaaaagaaaactaataaaaactccgtgctttaacttcgtctcctcactttttaaccttttgttgtttctgtttatatcttattgtaccatgtcctgaaaacttgtagttaccatttttgattggttcatcatttagtttttctactcaggataagaatagtttatacatcacagctacagttttataatattctatgtttttctgtgtacttactattaccagttagttttgtaccttcaggtgattatttattgctcattaatgtcattttctttctgattgaagtactycctttagcatttcttgtaggacaggtctggcattgatgaaatccctcagcttttgtttgggaaagtttatttcttcatgtttgaaggatattttcactggatatactattctgaggtgaaagttacttttcttcagcacttttaaatatgttaggaaaccttacctgtttccactgaaaagtctactgccaccatattggagctccgttgtatgttatttgttctttttctcttgctgcttttaggatcctttctctatccttgacctttgggagtctgattattaaatgtctcgaggtaggcttctttagcttaaatctgcttgatgttctataaccttcttgtacttgaatgttgatatctttctctaggtttgggaagttctctgatattatccctttgaataaactttctaccgccatcgatttctctaccttccctttaaggacaataactcttaaatttgcccttttgaggctgttttctagatcttttaggcatgcttcattcttctttattcttttttctttggtctcctctgaccgtgtatttccaaagagcctgtcttcaagctcatgaattctttcttctgcttgatcaattctgctgataagagactctgatgcattcttcagtatatcaactgcattttttaactctagaatttctgattgattctttttaactgtttcaatctctttgttaaatttatctgatagaattctttttttttttttttgaggtggagtcttgctctgtcgcccaggctggagtgcagtggcatgatctgcaagctccgcctcccgggttcatgccattctcctgcctcaccctcccaagtagttgggactacaggtgcccaccaccatgcccggctaattttttatattttttagtagagatggggtttcactgtgttagctaggatggtctcgatctcctgacttcatgatccgtctacctcagcctcccaaagtgctgggattacaggcgtgagccaccgcgcctggcctatctgatagaattcttaattccttctctgatcttgaatttctttgagttttctcaagacagctattttgaattctgtatctgaaaggtcacatatttctctttttccagaattggtgcttggtgccttatttagtttgattggtgaggtcgtattttcctggatggtcttgatgtttgtagatgttcatcagtttttgggcattggagmgttaggtatttattgtagtcatcactgcctgggcttgtttatgcttatctttcttgggaaggctttctagtattcataggaacttgggccccaagcccaataatgctgtggtttttgcagcctcatagaggttggtgcaagtagatgttctttggtgtctgggcattgaagagttaggtatttattgtagtcttcactgccttggcatatttttggccatccttcttgggaagtctttccagatatttgaaagaacgtgggtgttgtgatctaagctatattggctttagggggcaccccaagctcagtaacactgtggttcttgcagactcatagaggtactgcctagatggtcttagaacagatctaggagaattatctggattaccgggcagagactcttgttctctttccttactttcttccaaacatacagagtctctctcttctctgttttgagccagataaagctgagaatggtgacacaagcacccgtgtggccactggtactatgtgctgggtcagacctgaagccagcacaggactgggtcttgcacaaggcctgctgtaaccgcttcttggctattgccatgtttgctcaaggccctggggctctacagtcagcaggtagcaaagccaaccaggcctgtgtccttcccttaagggtggcgagctcccccaggccccggatgggtcaagaagttctgtctaggagccctgggagtcagggactagagtcagaaaccttagaagtctacctagtgttctgttgtattgcagccgagctggcactcaaaccacaaggtgcaatgcttcccactyttcctcccctttctgaaggcagaggagcctcaacctgtagccaccaccaccccaggccacaaagagtactgccagagtacccccatagtcccttaacgcccaaggtctcttaagtcagcattcatgaaaagctatcgggggaactctggcagtacttttcatgaatgctgcttggcctgggactcacccttcaggacagtgggctcccttctggcccaggacatgtccagaaatgctgtccaagagccaagtcctagaattgaagacgctaagagcccacttggtgctctaccctgctgtggctgtactggtacctagggggcaaggcagagccccttttactttcccccctgctgttctcaagcaggagttttgccccatagccaccacagctgggaatgtgctgagtctcacctgaagccaacaagtctcagtggttcaccaaggccctcaatgtagtacctggatattgctgctggttattcagggcccaagggctcttcagttagcagattatgaatgctgccaagcctcagacctttccttcaaggcagcaagttcccttctggacgagggtgtgtctaggaatgtcgtctgggagtagttaggtcctggaatgggggcctcatgactctgaccggtgccctatcctgctgtggctgagctggtatccaagatgcaagacaaagtcctccccactcttccctctcctctcctcaagtggaagggaggggtctcttttggagccaccagctgtgcaacctggggttaggagagataatgtcagcactcccttggctgccccaggtggtatctcagtatgttgcgtgctccctccattgtctctaggcctagttcagccgtaggacttgccaaagagttgcagttcttatggcctagactgtctttcaagtttacttggagacacacagtgctgtagccctcggtggcgaggttttccagggactcaagtttggacctctgggattcctttctggctagggctggtttaaatgctccccctgtgggtgggcatcagctgagttcggtccggttttcctttctgctctaacaggacagcacagagttcagtgcctcacaattgcagtgttctcccttccccagtgcccagagataccctccataccatgcactgctgctggaagaggagtcaccactctgaggaaaagggtggcattggtgattcaggactgttacttttaatctcttctgtgcttctttcagtgatatgaagttcaaaccaagtcctgtgagtgctsccctgatttttggttcttatgaaggtgtttttttctgtgtagatagttgttaacttttttgtcctyggggggacgattggtggagctttctattgcaccatcttgctctgcctctgagattgctttttctctttctcttttagagaatctgtttcaactgtctggatatgtagatgtttttaatattttgaggaaaaagaaaatattcaagatacggtctgtgttttttctttactgatttgttatgttactaatgaaccctttgattctaaaattttaaatctgttttacttagagaatgtttgtctgctatttattttctcccttttctgtcagtctgccagttctctcttagccttcctattatgtgtgtattatattttttggatccatcctctgtytgcctctgtcwtctcccctgtcaaattgacctctctaacctttcctgtcatttttaggattttttttgagctggcattgaagtcagtttagaatttttgacattatcctttcttctctcattatattttaaaatttggtaattatatctttatctgaaaattttctttgctattccaaagtcattcttttttaaaaaaatgccacatcccctcaaatctcactaagaatatgagttagatatatttcccatggtttttctcttttatatccaactttttccccatataatttattcatacttctccagtgggtccatttcttttgaactgtggaatgtttttatatgccctgttatttttttcytccttaagtcatcctcagaaagcattagagttatttatctttatttttccagaatttctgtttgaaattggttctgttgtaggctctaaattcataagatcaataatttcaggctccattgtgggttgaagagagtagtattcgtattaataaattaagtattagaagaccaaatgtctatttagaatagagtgggacaaacagatagctgagggtaaggagcctgagagcactcttccctctgtctttaattggtacgtcttcattaagttcttcactgtttttctgttttttcctttatttttcttttttgggtttaagtattctttgggaataggtactaagattctttgggaataggtactatatattctgctgtttggtatgttgtcctcagggtacttccctgaagattattagaaagaccaatatattggagccaagggcctgtctgatagttaagtagtaggtaaaattaggtccacttttgattaagtagtaagttcatccacttatttcttaggttgtaactagattggtagatgcttgtttcctaaaatgttatcttatgtgaaccatacccctgcagaaatttgttgaaatttctgttatgtggatagtactttatctaaaatagaaaatatcctggattgatgcaatagcagaatggtgataacagaagaaagagccagaagttgaagacagatcattagaaattattcagtttgtggccggacacggtggctcatgcctgtaatcccagcacttcaggaggctgaggattgcttgagccaaggagttccgagaccagcctgggcaacaaagtgagaccctgtctctacagaaataccaaaaaatcagccaggtatggtggagggtgcctgtggtcccagctacacagaaggctgaggcagaaagcccactcgagcccaagaggttgaggctgcagtgagccaacatggcaccattgccgtctagcctgtgccacacagcaagactctgtctcaaaaaaaaaaaaaaaaaaaaagaaaaagaaaaaaatcattctgaagaayagagattgaaaagaacagagccttggagttttgttggttcattctaaaggtctaacgtatgcatcattagaacagcagaaggagaggagaaagagattggagtaggaaaaaatatttgaagaaataatggtagaaaacttcccaaatttgatgaaagatacaatttttatttttatttttattttttgagacggagtctcactcttgtcgcccaggctggagtgcattgtgcaatctcggcttactgcaacctctgcccctggggttcaagcttctcctgcttcagtctcctgagtagctgggattacaggtgcccccsctccccagccccaccatgcccagctagtttttgtatttttaatagagatggggtttcaccatgttggtcaggctggtctcgaactcctgatctcaggtgatccgccctcctcagcctcccaaagtgctgggattacagacatgagccaccgtgcccagccaagatacaaatttatagatgaaagaagctcagcaaatgccagttaggataaactaaaagaaaaccacgcataaacacagtaatcaaatggttgaaaaccaaaaataaagtcttgaaagtagcgggaaaaaatggtacatagaggggaacaataatttgaataaatgcagatttctcatcagaaatcatggcagccagaagagagtggaacaatatgtttcaagtactgaaagaagagaactgttaacccagaactctatatccattgaaaatatccttcaagaacgaagatgaaataaagactaagagtatccatttctaacatgtttactttaatgaaatgttaatagacgttgtgtaggctgaagggaaatgataccagatgkatatttaggcggaccaatcaaaatggtaaatacgtataaaggactaattttattcttaagttatcccactatctgagaggtttttaatatgggtggctaaacataaaagctagtggggaggtggaaataaaagagtctatatggttgcaatgtttctgcatttttcttttctttttttttttttttttttttttgagacagagtctcgctctgttgcccaggctggagtgtagtggtgtgatctcggctcactgcaacctctgcctcctgggttcaagtgattcttctgcctcagcctcctgagtagctgggactactacaggtgcacgccaccacacctggctaatttttgtatttttagtagagatggggtttcaccatattggccaggctggtcttgaactcctgaccttgtgatctgcctgcctcagcctcccaaagtgctgggattacaggcgtgagccactgtgccctgcctgtttctgcatttttcttgatctggtacagtgttaactgtaagtagactgtgtaaggtttgctgtttctgtatttatatatttatatgtctgtttatctacctatgtatctgataatccgataagttaaagatatgctgtttgagcacaaaggagattcatttaaaccgctattgctatagattatgcctatgatgcatttttaygaggaaccagtaaattatataaaaagatataggcagaaagttaatataaaaatatgaaatactaaaaattttctaaggaaaagagaaaagaggaagtaggagaacagaaaatacagggaataaacaggaaacggatactaaaatggtagacctgaatctaaccatgttaataattctattacatgtaagtggtctgacattaccaataaaaagagatcttcatattggatgaaaatgtgaagatacaactgtgctctttgtaagaaacctacttttaatataaagacataagttataaggaaggaaaaatgcataccatacaaacactaaccaaaaaaagttcagatgaatctatttatatcagagagagtaaacttttgaacaaatagtatggttaggataaagaacataacaataagagtcattttcccaaaaagacataataatcttacatgtgtctaacaacagagcttcaaaaacggagtaaaaaaaaaaacctgttagaactgacaggaaagattgacaaattcacaattatagagacgtcagtgcttttttcttaaaaatcaatagaatagggagatagaaaaccaataaggaaatttaagactagaataatatcaacttatatgacctaactgacatttatagagcagtctactcaacagtagcgaaatatacattctttttattattattatctatattattatctatattatctatatattataattattatctatattagcaagatagactacattctgggccataaaacacaatcttaacaaacttaaaagaattaaaattatgcaagtgtgttatctgaccatatagaattaaactaaacacagtcattggaagagatcaaaattttttttaaatatttgaaaattatacatcaaacttatacatttagaaatgatgacatgatccatgagtcaaagtcaaagtaaaagtcacaagggaaattaggatgaaattgaaaaaccacatatcaaagtttggaggatttaggtaaaacagtacttacaagggaaatttatagtaataaaagcttatgtttgaaaagaagtatttccaatcagtgctctgagcagctaccttaacatagcagaaatagaagagcaaattaaactcaaattaaaactaaagaaagaaataataannnnnnnnnnnnnnnnnnnnaaataataaggtagagtagaaatcaatgaaattgagtagagaaaaccagtagagtaaaatcagtgaaatgaaaaactagtccttggaaaagatagataaaattgataaayctgtagacagagtgaccaagaaaaaacaggacaaattatcaatatcagaaatgcaagaccctgttgacatttaagggataattagggaatattttaggcatcattagccccataaatttgactactttgttgaaatgagcaaaatccttcaaagataagctatgatgtttactcaagaagaactagattatctgaatagtcctatatctaataaagtaattgaatttttcattaaaaaaatttctacagggaacgttcagttctacataagctcttccagaatatagaatatgagaaaatacctctgaattcaatttctgagttcagtgctatcctggtctgaaaactagacaaagacattatgaaaaaattaaattatgtccatctccctcatgaacatagaggattggatggagagtaaatcagtcaaatttcccaaaatacagtgctgttaggctatacccattgtaagtaaaaacattgatgttggggctgaggccaccaaaggttgaaggatgaaaaaaaataaaagtcaaatgtgtgaagttagagaacaggtatcagaaactgatgatcactcttttaatcagatgcctgcaaccagtgaatgttctttggggcactctggaattccatctctaccttgggtagaagctatctaagagcttagcagagggcatgattagaacctaggagagtttagagctacaaatgaccttatgttatctcctcaacttttgcccagctgctccctaaacatgactctcactttttacctgaaaacttgtcttcctttctcaccttttatctagagagtcaccttcaaagggcagaatcgctggtactgcagctttttcaaatatcaggaacttcaaycaaataaaatgaaaaaggacatattctcctatgctttccacctatgaaccttacttttccctcagggcccaaatgtggctcccctcaattcctatgctccttgttctgggtaaaagagtacaaggggaccaggaacagggtttttacctaaagcagaagggagagagggtgggagaagtatgttatttgagtggataaggargaatactgagaaggactgcccgctttcaaactgaggttcaaggagtctwagagcttctttgctggtttcttcctttcttcatgttgggaaaagggcttgtggggtgtctgtataaactggccataaaaatatgggacaataagttgtggaagccacaagaggcctctgaggaggaaagtctcctaattgccatcatgttcccatgctcagagggagacccgctttcttatctgtaaacactgtgttcaaggagaaagacactcctttgaaacactggaatgtgaacaggcgtgcaggctcctagttaagcccgctcctactagctgctctctgataagttaaagataggctgtttgagcacaaaggagattcatttaaaccactatcgctgtagattacgcctattacgcattgcctccctttcactgtttcgccctgaacgtctgcttctcagatctaagtgattgtactcaataaatagtgtggagaccagagctctgagccttttgcagcctccaaaagtacaactggccccctggctccccacctttactcttaacttgtctcttctcaatcctttgttgccaccggactttgggtaccctatgggtggttttgaggctggtccccaacactccacaatttctactttgttttttttttgagacagagtcttgctctgtcaccacgctggagtgcaggggtgcgatcttggctcactataaccttcgcctcctgggttcaagcgattctcgtgcctcagcctcctgagtagctgggattacaggcacgtaccaccacacccagctaatttttgtatttttagtagagacaggatttcagcatgttggccaggatggtctcgatctccagaccttgtgatccacgctcctcggcctcccaaagtgctgggatgacaggcgtgagccaccgcacctggccacaatttctacttttaggattgtactatgtcttgtcrctcagtctacttctctgtctgtatgccctcctgtagtgatctcatccctttccaaatgcatattgctaaccagtgctgtctcctgtattctgtagcctttattcccatatattcagctggcttctcagcatatctgaaaccaaactctggattgctcatctccccaaatacctgcttcttccctagtctttctcatcatagtaaatggcaattccatttctccagttagtcatttgtagtccttcttcttttttttttcttttgagttggagtctcaaactctgtcacacaggctggagtgcagtggcgtgatctcggctcactgcaatccccggctcccaggttcaagtgattctcctgcctcagcctcccaagtaactgggattacaggcatctgccaccatgcctggctaattttgtgtttgtgtgtgtatgtgtgtgtttttagtagagacagggtttcagcatgttggccgggctggtcacaaactcctggcctcaagtaatctgccagccttggcctcccaaagtgccgggattacaggcagtagttcttcttaattcatgtccctyctttcttatatcatatataatctattttcagaataaatcccaaatctagcccattctcactgtgctcactatctttcctctgcataattgctgtagccttctgttttccatggtatcatatcttctggtctatttttcacattgcagccagaaagatccttttaaaatatgagtcattgctaaatatttaatgatgtctttcctctgctcacaactctccattggtctcctgcttcactcatagtaaaagccaactcattttacagtggtttatacatttctgaccttatctctcaccattcttcccctcacttactccagtctggctctcctggcctcctattcctggcacatgccatgcctaaaccattgtttccctagctagtcacatgggtcccttcctctcttcctttgcatccctgccaaaaggaaggccttttctgaccaccttatctaaaagagcaactcccacctccacctcagcacttctcatcccccgatactactttatttttctccacagtagtctattgccacctcactattattgtttattgacccttgccccattagaaggtaagcagcacatgggcaaggactttgtattggttatggttggatccctaaggcctaggatggtccctgctagaaagtatcttctcagcaaatatttgttgagtgaatttgattgtggtgtttttttccttccccatatttgaataacgttctgcggaataaagttagatagtcatggagtaggataccataggacaggatgtctgactttaggtaatcattgaatgaatgaatgaatgaatgaatgaatgaatggcaggggtcctacagaacatttaatccctctcttttcttatttcaaagatgagaaaatggagagaggtgtacaaatcatagaaagatgtcttagcttcagtattttgtaaaccctccatagtgctcagcaggtttcacaaaatactcaaaagaatgtcacaggtaaggaaatagaatataaaaagactagcttgtattcaagaatattttaaggctatcatatagaaagttcttataagaaattggtaacggggattctaatgcttcaagtatcacatatttatataacatttgttgtaaattaataaagctaatatctttttaaaggcagtttattagatatggtatgtaattcataaggaatcccttttccccaaattaccctatagtttgaactttattttgtggttaccaaagtctggacttttaaaagatataaagttataatctgagaatgagaaagacaaaatgggaatacagatagatataaaactaaaataaatagaaatgtaaaatagtgcacaggaaattctaaatgataagtgtagattaaaatattctagaggaggctgcacatggtggcacgtgcctgtaatcccagcagtttgggaggccgaggggggtggatcacttgaggtcaggagttcaaggccagcctggtcaacatggcgaaacctcgtctctactaaaaatacaaaaattagccagtggtggcatcaggtgcctgtaatcccagctactcgggagactgaagcaggagaatcgctcgaaccygggaggcggaggttgcagtgagccaagattgtgccactgcgttccaggctgggcgacagagtgagatactgtcttaaaaaaaaaaattctgaaagaaattaggattgggtgacacagtggcccaggtgttaggagatggctgtagcaagggagaaggagtaaaatttgatgatgctttagatagaaggggagaacttagaaagctggggccatgatctgagcagaggcatagtggggcagccagagaatattctagtagtgagtaaggtcattttaatagaaccttaggtcagagagtttaagaacagatgttagtgcacattgtgagaatatttgaatgttacataaaatcatttggactccagacagtcagaagcttttgaaatcttttacgggggctgacatgtgcaaagtagtgttttaagcatattaaactgtcagtgatatacattatggataggaagaggagactgaaaagttctctgtgaggtgatactgacccatgctaggataatagcannnnnnnnnnnnnnnnnnnnttagttactcttctgtgagaagagaccagggtaattttgtggtttttggtatctaggagaactgtggaaataggaaattctatcatgaatgtcattttatcatgaatgccattttgtcatgaaagatgagtttggctttagacatagcaagtttgggatgagagcaatctaatgatgtctagttagagatgtggaactcaggctggatttgggctacagttagtcctaacggtgaatgaaatcttaggagtttcagagattgtagaacagtgtaggctgaaaagatggtggtgcgcagaactttagtgggcagaggaagaatgtttagtgaaggcaactttgaaaagcaatggttgcagaagtagggtaacctatgaaaagaaagcaaaggktcacataattagttggttcaaagtaacattcatccctctctcaattcccccattgcaaatgcagtacatctttaatgtcagatcctggaaaatagaaaatagcaaaaatatttttaaatatttttaaaaagtttttacccagcctgggcaacatagtggtaccctgtctctacaaaaaaattcgaaaattagccaggcatgatgacatacgcctgtagcctcagctgaagctgaggtgggggatcacttaaacctgggaggtcgaagctgccgtgagctatgattgagccactggactctagcctgggagacagagtaggatctgtctaaaaaaaaaaaaaattacttataacccagttagccagagaaaactagtaaaatatttaaatatatatcttaagttactaaatatttcttgtttattgtgtctatgtatttgtgtatttatattgctgtacaagatagtgtttattatttgctgtaaatagttgaggtaagatgattcaaaaagagttcagcggttaattacgtagcttatttgttgacctaatcttctaaatatttaatatatatagaatttcccatattgtctgttttgtttattcttcagatgattgcaaaagggaaaaatgcatctgaactgtttcctgctgttgtgaagaatgtggccagtaaaaatattgaggtactgttttgatctataatttttatgattccttttgttttcatgggaccgtacactttttatgtagtataatgcaacataagatacttaagtatcactagatttttgttatgattaaaatgtccttaattttaaatgtaggtaagatcaaataaaaagtaggcacaatcctagctttggatttttggtagaaaatatgaaaagcaaaacmgattgattcccctgagtgaatgatggtaagttgtcgagttttcacctgttcctagaggcccgtttagtttaaattttgttccagggacttaattttaagatagcatatgtccagtgaaaaagacctatttgggtatatccagaccttgatgatttggggctttttgggatttctaggactgagcccaagaatatttcccaagtttctcagactactcatgacatgtactaagcactcagtacatatatgtggatttattgaatgaacacgtcccagtaaaatactgttttctgtaagctacactaatatagtctagtattaaggttacattctcctctccaccctggttaattgataaattaattgaaaaagcctggttaattgataaatttttctcagtttaaagctttaaagcctttccctcaccataaaattaaagatgtgttactgctactatttgtttgccattttattggcagatgatgaagctcattaacaaataacagaaacattctaatccagggaacatggttatggtgacagagaaagtgcacaagcattcttrcacgggcaagtgtgagagcgtaaggaggatgggtgtgtgatttcagagggttcgctaattttgtagttatgattttattttccatgcatagtatggtcattttttggtagtgaagttttttctattttgcgtgatgattttaaatgttcaaagtattcttgccagcaaaaccaaccagagaaaaagaaaacatttttgagctaatgttctttaaatattacttaactaaatgtgattgatagtgttggtgagagaggaatttttaatctcccaatcatgattttgattttttttttttttttttttttgagacagagtctcacttcgtcactcaggctggagtgcagtggtgtgatcttggctcactacagcctcgacctcctgggctcaagcgatcctcccgcctcagccccacaagtagctgggactacaggygcttacaaccatgcttggctagttttttatatttttttttttgtagagacagggtttcgccatgtggcccaggctggtcttgaactcctgagctcaagcaatctacctgcctcagcctcccaaagtgctaggattacaggcgtgaccaaccgtgcctggcttttttttttttttttttttctgagacagggttcctctctatctcccaggctggagtgcagtggcatgatcgtggcttactgtagccttgacctcttgggtttaggtgatcctccttcctcagcctcctgagtggctgggactacaggtgcatgccrccatgtccagctaattttcatattttgaacagagacagggcttcaccatgttgcccaggctggtttcgaactcccaggctcaagcaatctgccaaccttggcctcccaaagtgctgggattataggcatgagccatcgtgcctgggctgattctggaatgttttatttttccccttaatttagtattttttgcttatttttaaaagtactcctattaggcataactctttgggttttcctgatgaattgacctttttattataaaaaaatcctttatttttgttaatatgttttgtcttaaagcatatttgatttgttattagtattgccactccaaccttctcatttctttttattatcatttttattcatttgctttcagcttgtctgtttatatctagtgtgcacctgttgttgacagcgtatagttgcagccttccctacatcccgtgtgtcaatctctgccttttaattggagtgtctattttgctaacacttaatataattattgatctgcttagatttgagtctactattattctttttcttttctctttgtctcttttatttttgtcttctattcttcctattccttttttgggttaactagaaacattttaaaatttcattttagtttttttccaacttgcatttcttggcatatatgacagtggtcccatatgattataatactgtatttttactgtactttttctatgtttagatacacaaatacttaccattgtgtgatagttatctacagtattgagtacagtaacatgctgtacagatttgtagcctaggagcaataggctatatcagtagtccccaacgtttttggcaccagggaccagtactgtggaagacaatttttctctggacccrgggtgggtaggatggcttcaggatgattcaaaagcattacatttatggtgcactttatttctattattattacattgtaatatatgatgaaataattatataactcaccataatgtagaatcagtgggagccctgagcttgttttcttacaactagatggtcccatctggggtgtgatgggagacagtgacagatcatcaggcrttagattctcataaggagcacgcagcctagatccctcttgtgtgcagtttacaatagggtttgtgctcctatgagaatctaatgctgctgttgatcttacagtaggcagagctcaggaggtaatgcgagcaatgaagagcagctgtaaatacagatgaagcttcacttgcttgcccactgctcactgcctgctgtgtggcctggttccaacccctgggctatgtcatatatcctaggtgtgtagacccctggtctgtatcatatatcctaggtgtgtagtagtctataccatgtaggtttgtgtaagttgcactctgtggtgtttgcacaacaatgaaattgtccaacgacgcatttctcagaacattgttaagcaatgcatcactggattatagcattttaaggataggtactttaaacctactttttttttggagacrgggtctcgctgtgttgcccaggttggagtgcagtggcacgatcttggctcactacaacctctgcctgccgggttcaggtgattctcctgcctcagcctcccgagcagctgggattacaggcttgtgtcaccatgcccatctaatttatttttcgtatttttagtagagccggggttttgtcatgttgcccaggctggtgtggaactcctgagctcaagtaatctgcccaccttggcctcccaaagtgctgggattatgggtgtgagccaccatgttcagcctaaacctacttttaaaaaaagatttaatattttaaagtatgcttcttgctttttttgggggggaactgtagtggcatgaacacaacacactgtagccttcacttcctgggctcaagtgatcctcctgactcagccttctgagtagctgggaccacaggtgcgtgccactactcctggctatttaaaaaatattttgtagagacgaggtctccatgttgcccaggctggtgttgaactcttgggctcaggtgatcctcctgccttggcctcccaaagtgctgggattatagatgtgagccactgtgcccagctcttaatttttttcattagataggaagtgcattctgtatttcagatagatgaatttttctatcaaaatgaaatagttcttataaactcaattagactaagttggataagccaaaatcaaaacagttgtattcttgtggccagtttatgaattagattaaattagtactgkatttaaatgacttgataaaccatactttctttgtagatttcttgagtaaaatcaattttacttatgattaatttagtagatatttattaaacactatgtgcttgttatatataattctgaattgataattttyaactactctccctttgacaccttatggccatgatatctgagcttctaatttgatatgtttattagttttatggcctgtggtataagaaagtccaaatatctggaaaaaataaacatttaacttagaaaaattatgaggcataggtgaagcttgtcttagtattatcaggaatagagtctcttagtagcaataggaataattgctaacattaaaaaaacctgtctgascaaggttattagtgccttgcatagatctactccgttttatcctcacaaataaccctgtggggctgtttctgtcattacttgtattttatatatgaggacaagatggcagaaaggttaaattagctgatcaaggtcacacagccagtgtgtagcagtcagaatccaaagctaggttgcttgacttcagaacccatcttagcccattcagcgccatctttcctgtttgatgattcctccctctgttttgtctcttaatatttttgactccttatcaacatctggcattagccatcctttgggaggtacctagtattggcatatttttttyttttatgttttagttatgggtagaaatgacgaagtccttagaaattggtggtaaagtagctagttccctgaggacttctagttcttgttgtaaacagaaaattccataccaattattgttccttcagaactgttttactattcaaatagttatcagtaggagaacttttccatttgctcatattttccctttacaattagattctggtagctgcctaatgttctgttacaaaaatgtcaatataaacataattattggtctatttgttttggatttctttcgttctttaaataccttgtttattttatttttttgaaacatggttaagcctttaatgttttgggaaaactgacataagtttcttaaaacttatgttcagaaattgaatgtttcactcctctcaagtgcaaaatttcatttttacaagtacatgctgctttagacacacaggtgagctgtacgtcatctaccattaaatgtcaaatgataccaaaagtgacctagtaagcaatcagtggttatagtacaaaaataatcaaaggtttagtcaataactcatgaagtttgatgtactagtattgataagctaattaaacagatctgtctgtgttcttccagcctactggggctctgctatgattagctttacagcaaggagtgttataacattgaatgaaagtaaccgatcagagaatgatgtagtcacggagctttaactactcccatttctggtcacagaatggtttcagggaaggtaggctttctttgcacacctgcagcctgtcagtgcataggcctcttgtggtcaatattgattgattcttataacagaagtagaacaaatttagtgtttcgcaaccttctgtgatttaatattgttatgctttttgccataacagtcacagaaatccttctccaatagtgagtaattattgcaatgcctgctagctcagctgtggttctgaatgtttcagtgttgccaatataaactctgtgatatattctagagttcataatccagttttaaaagctggctgtacttggtgaataaaggtattgctgagaaataaattgtaaggggataagggagaactggacccattctttctcaaaactttccagagaactgtagagtgagatctgaatataattagtaaagagaaagaatattttaaaagaatattttaaaaaaccaaaccagctgtgttggtgtgcacctagagtcctaattaccagggaggctgaggcaggagtctctcttgagcccaggagtttgaggccagcctgggcaacagagcgagaccctatctctctttaaacatacacccacacctccacccccactcactgacacacacacacccctccccacacacccacatacaccaaaaaaacaaccagactaacaagttaaagactttggaggcagtctttccaaaacctgttgttttcttcatagtatgttggtgtctttctagactttgctgttcaatgaattatacccactggtgtgagaagttagatcctagatgtagcactctaatgggaaatgtcttaatttttttcagtctacagttggtctggaatgtgatccagctgataaatattgagcttttactayatgccaagcaatgtaataagtccttgcaatatacagatgaataagaaatggttgttgtactaaatagcctcaagttcacttccaggcagatgggataaattacttagttaaatacatattatgtgttgatttgatatattgaaactgttgttaatcaactgctgatatattgatatatatttgatatattgactgctgttaatcagtcaaccacgtgttaattgctttctaccattgctgtattcttaggaastttaaatctagttgaggaaaaagtcatctatcctcaaatagttagagaagcgcttctaaaactgatctaagaatttgaaaaacttatatttacacttaaatataatctgaaacattaagtatagtttgaatcatttggtttccatcttatacmtatatttgtattcttgtgtaacatcacttggttccaagtgatcatttaaaggaacagtgtttcacaaatatgtgtattttgggtttgaaaaattctgaaggttgagaagcactaatttaaaccaagaaagtgtaaagagtctaatcgtgaatatagatggaaagtacattgataatagagatggggttctatggaatgaagtcattactaccttttactacagttgtaaatttcttgttggatttttaataataatactgcaatgatgtcattttcaaatgagaagatgtgcaattggggttaaaaaacagtgatttaaagcattcttcttttataaatgtatatattataaataaaatataatttttttcctaggttttcagatgctcttaggggaagagttgtctcctcttttgttaggggtaccttaatagaaatatctgcggactgccatcataggccacaacatgtagtagttaggaacatgcccgtttgcatcctgattctgcacttgctagctctgtgactttgggcaagttatataaacctctgagccttactttccttatctttgagagggagataattgtacctaggatagatatgagaattaaacgagtaatataatgtagatgtagggccttacacatttaaattctagctggaaagttatagcagattgaggtgaagaacaaaagctgtcgcaggcagttttcctttcatattctgtatttcctaattaattttaatactagccagaatgacaagggtacttttagaaaagaaaggctgggctgggcgtggtggctcacgcctgtaatcccagcactttgggaggccggggtgggcggatcacctgaggtcaggagttcaagaccagcctgaacaatatgatgaaaccccgttctctactaaaaatagaaaaattagctgggcgtggtggcatgcgcctgtaatcccagctactctggaggttgagacaggacaatcgcttgaacccaggaggcggaggttgcggtgagctgagatcatgccattgcactccagcctgggcaacaagagcaaaacgccgtctcaaaaaaaaaaaaagaaaaaagaaaaacaaaggctgaggaacttctccagatgaaagaagaccaaggagacatgaaaacttaaatatgatgcatgatcccagatcagaaaaaatactataaatataggatgttattgagaatttctaaatatggattatttattagataataaatnnnnnnnnnnnnnnnnnnnntgtagtgttagcaattgagaaacatagatgaaggcggccgggtgtggtggctcacgccagtaatcctagcactttgggaggccgaggtgggtggatcacttgacgtcaggagttcatgactagtctggccagcatggcaaaaccctgtctctactaaaaatacaaaaattagctgggcgtggtggtgtgcacctgtggtcccaacttttcgggaggctgaggcaggaaaatcatttgaacccaggaggcagaggctgcagtgagccgagattgtgccactgcactccagcctgggagacagaacaagactctgtctaaaaaagaaagaaagaaagaataaaacataaatgaagcctatatgaggcttcagtgaactagtcttggaacttttcagtaggttgtattgaaggatgatatctgaaataagacaatttattgcttactatagcaagggacaactgtgctttttaggcacagcttctctgggcatagagattgctgatattattgtggattattgggaagggcagtcttcagggattgatggactttcagggtcctaagtgggttgatrtcatctgtagatgcrtggtcatgtgggtgagactgctcttgattgattggcactcagaggtgggtgtatgggagtgcagttgttcctgactggctaactttcacaagcaagaggctgagcaagaaaacttgttcattcaggtgcctttttattgttctgtagaacaggtttaaaacagttctggtggctacatgttgccaaggctttagaaaaacctgtctctccgaggaatgtgggaacttaaaaacattaccaatttgaaatctttttataattaaagaatttaaagtattagaagaatcacagcactattattttgttttgagggccatctggaaagatgagattcacccctatcgtgaaatatctttattgttttatctgaccccaaagtaattaatattcctttaaagataatatagaaggatgtaaagagtgaaagtcactggttaataccatcacacagagatagttactattaacattttattgtatagatttctcaattttgtgcttacttgacttgaatcttagttcttctatttaatagatacggtactttagtcaagttacttaccctgtctgtgtttcattttcttatctgtaaartaagaataaatacttgtttattgagttgtgaggataaaatgagttaatttatgtaagacatttagaacagtgtctgacatgtagttaatgcwacctataaggatttgctattattaccatattatgtccattctaagacatatgtttgctattttaaagtttctgcagttgggatttaacttaacaactggtggtgattacgatgggtagtgttttctgtttgtttgttgttgttctttcctttgtggtccataatataatggtatgttttacaattggtggtctatttagattgcataaaatacagtatgtgggcatctattttttttttatacagaagtgagatcatacaatgcatactcttttacacctttaaaaaattttaggccaggctatggtggctcacacctataatcccagcactttgggaggccgaggcgggcagatcacctgaggtcaggtgttcaagaccagcctggccaacttggtgaaaccccatctctactaagaatacaaaagttagctgggcgtggtggtgcgtgcctgtaatcccagctacttgggaagctgaggcaggagaatcgcttgaacctgggtggcggaggttgcagtaagtcgcgagatcgccccactgcactccagccttggtgnnnnnnnnnnnnnnnnnnnntcttaaaacaaaaacaaacaaacaaaaaacctttttcaaggacatattttcttttctttcttttctttttttcagatggtgtcttgctttgtcacccaggctggggtgcagtggtgcgatcttggcttgctgcaacctctgcctcccgggttccagcaattctcttgcctcagccttcccagtagctgggattacaggcatgggccaatacacctggctaatttttttgtatttttagtagagatggagtttcaccatgttggccatactggtctccaactccggacctcaggtgatccgctcgtctcagcckcccaaagtgctgggattacaggtgtgagccaccgtgcctggccacaaggatatattttcaatgtcatacagatttatttaattttgtatagtggctgaatagtatagtgttatatggaggaactgtcatttgtttactgtttatctactaggactctttattgtttaatttttgctcttgtggaagattttaataagtggaacttggggaagtggaacttggtgaagcgggataacttgggataacctgagtggagattgagataaagagtgcaagttatatttggggactatttctgtttgactaggaaaggaggtttcgaacagattataaactgtattgagtactaggttaagagctttagattttgtttttaaggttttgtggagccattcaacattgaagagtaattggaaaaaggttttttcatttcatttataactctacccgtatagtatagadggattgatatcaacttaaaatggttgtgtttaacatatttatcaaygatgaagatgtacaaagtttgtttgctcattaagttttcatttgtacttatgaattgagaaatagtttggattataaaattatcatctcaaattatcttaacagggtgccaagatgtgttgaatctaaattgttgacaatttctgtagataaatggaagattttgcctttcatttaaaataattttaaaaaaattccrtgaggacagttgrattttgatttggtcagcagtacatttggaaaaggtgtatggttttaatcaagaattagtcatatctgtggaagtacctcatctggagcaagttcttatctagtttgttctgtttagactttatttgtagtttgtagtgtcacgctgaaaaaaattggagtgagtttaggaaggagcaaacaggatggtrgaggaactaaagctgttatgtttcacgagaaattagggtacaaggaaggaaggtcatgacagttgtctctaaagtagtccagattggttagtatgactggaaatatgatccagtatagtactgtttttatatttccagcaccaattccagctatctccaactttttcccctcatttcttgtgttctttgagtatataactttttttttaattttaaawttttwaaatttttgagacagagtctctttccagttgcccaggctggagtgcagtggcacaatcctgcctcactgcagcttcgacctcccaggctcaggtgactctcccatctcagcctcccaggtagctgggactacaggtgcatgccactgtgcctggctaattttttttttttttgttttactagaaatgggatttcaccatgttgcccaggctggtcctgaactcctgaactcaggcaatctgcctgcctcagcctcccaaagtgctgggattacaggcgtgagccactgtgcctggctgagtacataacttttaggtatatactgtgytggtatcttagaagggtaatcaggaatgtgaagatatttgagaaggtagatacaggctataaatagtgctagaaggaagcaatggataaatttcaactcaaattctagtttttgtttatttctttttctgttcataattttgttgtaaacttagtgattaaattacctttaaaacttgttttcaaggctgggcataatggctcatgcctgtaacccctgtgctttgggaggctgaggtgggaggaccagttaagcccaggagtttgagaccagcctgggtaggcaacataggaagaccccgtctctataaaatcctaaaaaaaagccgggtgtggtggtgcatacctgtagttccagccactggagaggctgaggtgggaggatggcatgaggccaggaggttgaggctgcagtgagccgtgattgtgctattgcactgcaccctgtgcgacaaagcaagactgtgtctcagaaaaaaaatcgaaaaccaaaaaaaactgtttccagaacacacatccaatcttcttgaatttttattacgttaaattggtattcatagtcacacattattcttactggactgaaaatatcatgtaatgcrtgttgaaatgtgagtattaccataaaaatcagagttagggctctggactcttttaacagatgaggaaacaagttcccataacatatagttagtggcctgggcccaaattctttctcttattattttttaaagaggtagggtctctctgtgttgcccaggatagcctctaactcctgggctcaagtgatcctcctgcctcagcctcctgtgtagctgggactacaagcatgtacgccatgcctggcttctttcttttatttttatccctcattttgaaaatatttttacaatttagttaatattcttatatgagatctgctcagggattttttattcccttcaagaggaagggacactttgataggctattgctattgkgaactggactattaaaatgcttactttaaaagcttttcctgttgtacttattatcccacaaaatattatttktattttacaatctaacatgtgaccagattcagttatttacttgagaagaattgagcatggattttggtatagcaaatactgagttttaaattttcactctggytatgaataaatgattttttttttaacagatcaagaagttggtatatgtttacctggttcgatatgctgaagaacagcaggatcttgymctcctgtccataagcacttttcagcgagctctgaaggtaaataatggagtgagtaggcaaatagctacaaggtttctgcagagttgaaagtgtgtcagttaaagaagtggagcgataatccactaaatagcacagtagtgtcttgaaagagttaaaagcctcctatagtgcctactcagtacacttagaaaataatttatacaaccaactgaaaccttgctgtatatgttacagcttctgtatgtttgtttatattcaatataattattttcatgcttcaaagagctgtttatcattatactagttgttgaaagtacgcaaaaggggttataagacatttttaaacatgaaattgatgacctgcagcattttattattatgaaagtataaaaacccagcatatttagtaataaatgaccaactagaattataactattacttttctttaaaacattattaaagaagtaaacatttatgtctgtctttttttcccattcctatatactaattgttcattttaaattaagtagctttcttttgctattgtcatattacaccctttaagcacctattaactgtgtctgaaagatatgtttaaaatattgtaaagttgaaattttggtgaatatttttgcactatttttaggacccaaaccaactaattcgtgcaagcgctttgagagttctgtcaagtattagagtgccaattattgtacctatcatgatgcttgctattaaggaagcttctgctgacttatcaccatatgttaggaagaatgcagcccatgcaatacaaaaattatacaggtaggtgcattgttaacaatataccaaagatctctgatgttacatggaatgttatagaccacagaggcttgttttattcgctcttttaggtaggctgctcttayactaagtaaatccagtgactgtatgatggtatttccccctgctgcaaatgttccttacacatctttaatttcgttttggctatagagaccctatgcaggtttttatttgtgaggctgttagagcctgtgataatttatagattttataacttaagaataatcagaatttgaattctcatttatatagtctatctcatgtacacatatgcttgtattattagaaaattgagatttttttttcctgtttagggtagaatcttaagtgtctgatcctctcaactcasttatatgtgttttcctttcttccatctttgttcctgctsctcccttcgttgtctaattcttttccagagctattttattaagtaattttaaaaagtgtagtgatttgaaatatagtgtgctataccatatctgtgtgatattttagaaatgttatgcaatattatacaatgccctgatctctgtggaaaatttactgtccaaatagaattgtctayaacaatttggtattattttcagctatcatttattcctcaagctttttgagactctcttctgtttctggtgttgtattcacagtattgtgctatgtgtatttagatgtatgaaaacagtagaggatgtggcacttaattatgaatagcatatcatgtatttgaggaagaagatcaaagacataccaaataattaaaggcaatctataatgaataagatattagcacttgatatatatgtatatacaaaggtacactagcaatgtctttgataggacagggaccagagatgatcatattttgttaccggaaagtaaagatgtaatgagatgggattggtagtgaaatactgctttgagaaggaagacttaagctgaaatttgaaagaattaaaaagtttgtccagataattataatgtttagtaataaatgtgtatgtttgtagaaagtgaaacytcatattcctatgttaactgccagacaaggttttatcatgcttctcactcaccttttctccttagaaacttatgggataagatccatgctcactctaacggyttaaaagtccttctatcattgggcaccagtatattccagcctcaatgcttgcctctccttgccttgagcttatagtctgttagtattctatctcaaatgttttaagcttattactacctcttatttttcytagttttagttggcagattttataatgcatgtctctatcagtgaactagtatgatataaaattcttatttggaaattctccatatttgtttttggsaagtatgtatgcatagtaaaataatgactgctatctagttatttttttcctcccagttgaaaagagtttgtggtttatctacttacagtcgctttcttgaagttttccaactcttttagaagtgaacttgttctttcagtactatcttaactaaaccattgatatctggtttagttaatatgaacaatattagagggaaagatgaggacacattcatgagaaaaaccatcccattttatttgtttttctttatttctaacttataattcttgctctcctttccctctttaaaaatttctcaacatccttgaattggtgagcatcatgtaaagctagaattaaagggaaaaattaatatgttatttttgtattttttagccttgatccagagcagaaggaaatgttaattgaagtaattgaaaaacttctgaaagataaaagcacagtaagtaatgtctttttacgtctttgacataaaaatgtactttatttacatagtatcatttaccattatatattttatatagttgtatttattgatttcaaaatgstataaatattaatggcacacaggactatttttaaagaacaaaaattttcatgtaatgagaaagactgcatttggagttttagatcgttatgtgtttcttcatcagaatctgaaaaaaggcaagttgagaaaaaaatctttaacctgtggctaagtggttaacatggtaagatcaaggaatagaggtgacctatgggggatgtgagttrctagtgtactagtatcttagatggggcttttgtacccactttatatttctcaaaactactgaggaaaaggattccagctcatcttaggatgctatcatcagggagtatgtactatctatgcatggcagctatctaatacagtaggcagtagccctgtgtagctgtaactattggtttatggcttagcatttgatctatcctggataatgttcaataaacatttgattagaatgtgtattctgctgttgttgagtggagtgttctatagatatctgttttttagtgttgttcaaatcttctactttgctgatcttatgcctacttgttctattcattattgaaaacagggtattgaagtctctttaattctgttagtgtttgcttcatctatttaggagattggatgtttggtgcatgtatgtttataatttttttaatcttccttttgtcattgtaaaatgttcctctttatctctagtaacatttttttgttttaatgtctgttttgcctgttataaatactactattctagcttttttatggttgctgtttccattatatatctttttccatccttttactttcagcctgtttatatttttgcatctattgtatgtctccatagacagcatatagttggctcttgtctttttatccagtttgccaatgtgtgcctttaattggaatgtttaatccattcacacttattgttgttattaatatagttggattttaagctgtcattttacttgcttttatatgtttcatgccttttttgttccttatttctcctttattgctttttcttagattargtgaatatgttctagtgaacattttaattcttttcatggtttttttactatatatttttgaaaatattgtcttatacatggagattatacttgtagtttcattcctagaccatttagtaaatttctgttagtctgtagtgtaccagaaatcattattgcatttcttctatgcatagttggtataacgtaggaggtaactaaatatagattgattataaatgaagatagagaaaagaaatttgattcctttttgtcttctgtatgacaggcatgctatctgccagatatgaagtcaatattattaatattatggttaacttgattttaataatttaaaaaaatacttagtgcttttctattataagtgcaagagattggctaagtaccatggagagtagtaagatctacaagaagcagatctgtcattttaatgagttttaccatcatttctgctacattatagactaagagaaattctttggatggcctgggaatgaactctctctgtataatatgtgcatgtcttcccagacaggatacagcatatcataggtaaaaacaatagcgtttgaatcagatagaactggcttaatgtctgagcrtctgccacatagtatatgtaccaattctttatgagttttaggctccagatttgtagggtttataatatctaatttatamatttgctgtttgtgtcgagagaaagaactattgtatataaaaccctyagcacagtgcctaacaccacatgggatgtgattaaaaatyccaaataagaaataagtactcaaaaagatgtaaagatacaatatctgtgtaaaattggaatgtctgtttccaaaatacaccagaaagtaaaaaatattgaatacttgttcatcacaggtatttaatatttgttgaatgactgttgaattaatttgttacattcttggtgatagtaattaagtgtgtagtatcgtttttaatgtctccctcacccccctgcagtggtttcatgctcagtgttcataggtagattctttgggggctttggtggcctaccctttgtgaggcactcatttttcctaaagtgttatatactatatgtttattttttttaattaagaatacatatttctttttctgtctatagtaaaaaacaaagtttttactgacacctgtaattctggtggtatagcacagagttccttccagcctccttcctttttatatttgaaactgcctattcaacattaagaaatgtggctctggccasgcaccattgttcatgcctgtaatcctagcactttgggaggccaaggtggatggattgcttgagyccaggagttcgagaccatcctgggcaacatggtgaaaccttgtctctacaaaaaaaaaaaaagaaacaaacaaacaaacaaaaaaacaagaaacagggctcctatttccacaatctgtttacatttttgctgagtctcagaatgcagagaaactattgcttcagaattgctagcactgtacctctgtggggtatacagtagcatggggcctaataattagagttaaatatttaattagagttaaatattagtttagagttgtttttgtctttaatcttttttttaatgtatggtaaatcaaaattgcttcaactatttatatctttgaactcgttgtgttggtatgtaagaaagctattgattttttttgagtgataaattttatattctgcttttttactgaattcttctattgtttgagttaattttctcattcatcctccttgggtttttttttgcatgacaaagagtctttacttttaaatgattatcagtacaccaagtagtaacatgtaacaagttcttgaattctgtcctctttgattaagtaactaaaactggcccaaacaattatactagtgttcattgttctaaccactagcaggaatggactaccagatattgcagaaaaaggccaagacttcacccctcttctgcctaaactgcttccagatggttctcttctcctgggtctcctctactttaatgctgcagctgccttgggatcgcagggcagcagcctccttggccttgaactctttctccctctgcaggcaatattgttcaatttcaccttgaactgctgctttggcctgcttctccctccggttctttcactgcaggtctcagacacccttttcagcaacctgcagcagctactggatccsctgagactgactggccatgacagcaccaactctgaggcagaagcaagcagcctaaatctctctctctttttttttttagagaatgaatcatatctgcaaatagagatgttttacttcctctttttcagttcctagaactctaatttctcttgcctaattatattgtttagtgccatcactacagttgtgttcaatagtagtggagatggtgggcattcttgccttgtttcagtctaaaggaaatgcttacattgtgtttgcattaaraaagatgctggccctgaagattttatctttgaaatatagtacttttgcaaggtacttcaggattacttgatatgggtcaattgttttgccttggtactcagtgagtcctttcaaaatgtasattcagaatttttattatctctggcaaagtgtttttttttaagattataattttaaatattaattctgttattttttttctttttcagggattcctattttatgcacattggatcttctttgcctgttttacattccaatcattgtgtctctaaacctcttctttctttatctcatttttattcttttggttctttttctacctttctttaataccccttttaaaattttcattcagtaattttattcgaagggcaccttgcaatttagtcttcacrtctgattatttttgctctcttgatttctttcctgttgtcaatcaatcctgatttcttttgttaatttataactttaaaaaatttataatttatatttatatttcctatcttcaaatgcttctcttgagggtatttaattcattttgaagtgtcgtgttgtttccttttgcttcatcatttatatttctttgtcggtaatttttgccagttgaattgttttgattttcattttctgtttttagtacttacagattacttgcatcttcttatttctttggacaggattggtgatttgattttgaggtagcttgcaagattcctagtacaagagtaccctctctgttagaattacaaagtatgttttcttagtagatggccttttggtgggagggcgtgcatgcataggaccagtatatgtccccaaactatttcgagatatgttttgtagcagcctaaatttttctctcttcttttcttttctgcctaaaaaagaagggtcttactctgtcacccagggctggagtgcagtggtgtgatcatggctcactgcagcctcgacctccccagcacaagcaatcctcctgtcccagcctcctgagtaaatgggactatagacatgcaccaccatgcccagctaattaaaaaaaattttttgtaaagatggggtcccactgtgttgcccaggctggtcatgaactcctgggctcaagtgatctcgctttggtcttgcaaagtattgggattacaggcgtgagccactgcacccagcccctcttatttctttttttctgttatttcacagtttccaaaggactgctctccccttacttttttttttttttaagctaattttctccgtgaaactttccctttctacactacctcattgaatcatcctctctttcaagtctttcccttataggctgctctgatctaccaagaatcttttccagtattttcacacttagggtgttctttctctttctgttgttgattttcgtttacttttaggcctgccattaacttctgcttgctttgttccaggcagttttttttctatactgttggaggtctttgtgaagttttgtgatacaagcatgaaaatagttatctggaatttagggtttatatttctacttatatataatttgaggtttagagattctctgttttgaagttaggcttaaagcatgggttttggtcccttgttgtttttttttttggatttgggttgggagattcagacttacttaggcatcatcaacttctctacccagtatttaaattggctgtattttgtgaatgttttctggtaattttttcttttgtgtgattataatccattgtagaaaggttaaaaatattctacacagatatttgtggatcatatcttaattattacctttttttggtcacatgtaattcttcattgaaggaagacaggtacatttctcccctgccccccaccaccaaatttttaatgtcagcattggcatttaaaatcaatagaggatcaaaaatcactttcatttaaaaaatctcccagttaaatgtaccaggtctaatttatttccacattttgaaaaggaatttatttgttgccagcagcagttttttgggatcaytattacgatgatgacattggtgttgctgctgatacatatacatttgaaagatgttgatctattaaactttcttcatttaacctctgttgattttgaggcataccatctgttgcttcttttaggctagaggatattttctttcaattgagatctcaaagaaaattagttccataattctcattttaaggaaaggtggaattataaatatattaaaatataatagaatggcttttctcttttactaaagaccagtatgtgtcatatgaatagttttttcctaaaaatagaacattttagtgttatttaggtaaaagatattacagaaaccttacaactgtagtcagtgaacttaaaagggggcatctaatctatattctgtcatctccaatcaactgttaccatttttctttatatgaatttttattgtttattcttaaattttataccattttcatctaccttctcaacatgtcctaaacactttcctactttactacaagccttttctaatgttcacgtatgaatttatttttaaaattaataagtttctcttgtttttctttaaaatgtagcaatccatatttgttgacattcttttctttagaacactttagaagcagagtggtatttatttccttttcctttcaagttaatcctaaataaatctttttgataacatcgaactttctgatagaaaacagagtttcttaggaaaacaaattaggtcagtgcctgctgaaaaactgatttatgtatatatttttgatgacataaaatttcctctttttgatttttgctataaaattatgtttaatgaatagattggtagtgtatagctaaaccgtagggataagacacaaattttaagttattgatttaatgttgataaaagccccaccgttatgtgcaaaaaacacacccctgagtttgtacagatgttttattgtgatagatctattatccagctattagaagataaatgactgatctttcccattttccatgcctcaagaaaattgaaataagaaggggaatatcatttgggctgtatgattagggaaggttggatggccattaatttaagggaagaaaatcttggcagcattggccaacttataccatattatcaatcaaaccttgatgcacttcttgtgatgacccagcactctcaggtttttgcaatgttaattagaattcatgacaaaatagatgcaaggaaacgttttgtacccttcataattttatagaaaatttattgttattagaggaaccatttgcttagtgtgatttttttcattaccagcttgtcaactagcatagataatctagagaaaatatgaactccatagatggggtgtcacttttgttgatggttcatgtagtttaccttggagcacagctaatggctgaagttcatagcaacagcacagaaaaacgtggcaaccaagggaagataaatgaaccatgtttattgctttaatataaaaaatacataaatggaaaactgcatttgaatttgatgagctcattgctggttttgttggagtgatttattttttccctkatatgaaaagctactattgacacagtgagatggaagttaactgtctgttttttggaaaccagtatttttggttttaaaatctgagtagatcatttaattttaattctgaatattttatagaatattgaacatttaataaaccaaaattattaattttccttgtagtgtttagcccagggtcagattgttaaaactatatgattaagtatctaaaatgatcagttttattttgtaaaagtactctctttatatgctttttaattattttgatgttttcttaaactttatttggttctatttaattaatgatatttgttagtaccttagaaggtgttagtactttagaattattgtgtacatgtagctcttggtttaatgaatttaatattatatggtagctgattttccatttaattgtttagtatcaaaacacatttggaagaaaataattgctaagacagaataacttgattttacatagtattttaaaaattgaaactgtgaattacctgttcaatttcatggatcattttatcctagatactatcctttatttttgcactttaacaccctttaccaattgatgttgatattaatataaggttgataatacatatatatagatgtttatatctcacaatgagttattctagagtttaatgtcataaacttagttgtaagatattttaaaatgatactaattgtcactttatagaaatgtaattatcacaaaatgtaatttctaaagaaattatgtcttttgcagaagacatcaaaatgtgattgaaagcatgagcttaacttccttgccatatctataacaaataggaaaattatatatatannnnnnnnnnnnnnnnnnnnnntcaataaaatgcagcttcacgtttaatactgaattggtaattcataaaatcccccacaggacttgaaaacttgtttagcataatagcgagtctatattctgagctgttttctttcaattgtattgttggttgcatattaataaactaaatgtcagccaactagagggacaaacactcaaaatatgaatatcattgtatctaatatttttcaaaaagtaccatttcagtaagttatatttctatttaattgcttattttaagtcattggggaaattttagacactaaagtgaagatccctagtgttcagatagaatatggtattaatttgtttttcaaaactgtattatattgtgggctaactgcacatatatcatttgtacgtatagagaagtatttgtataatatatattctgcttagtttgtgtctttagagtaaaggaatctcaatgttaccactttgtaaaagcatcacagttcagaaactaacattatgattcattaactggtgttggaagagcccccttttgttagtaatatattattccaacttatacacattgttatgaaagtgataagagcccaggtgatgttctaaaatttcagccagtgtgttttctttgtaaataaattatattgggtaaaaaccggtggattaagatgtatatgatttgaaagtgttcttctattaaaatttatgaatttctcatatactttttaacataagttcattttagaatgattgtcsttctcattttaaactgacacaatgtgagctttgttattgtcttgattctttttctgaatattatgaacaaagtactgaatttttagattagaatttaggttagctttaaacatgaaaaatgtgcgtgattaatgtttaatccacatatgaacaatgtgttgaaatttaacctggtgaaataaacacatcagaatttacttctcttcagaatagtattttctagacatattagaactattaaaattattctttgacraatagtcaccataaagtttgttattcaaacatgaacattcattttaattgaatgactgaatactttaataytgattggcatgaaactgattactrtaatgcctgagtaagacctttgatgtaggggagaaacattttttaataagttactatttctttcttttctagttggtagctggcagtgttgtgatggcttttgaagaagtatgcccggacagaatagatctgattcataaaaattaccgcaagctrtgtaacttactagtggatgttgaagagtgggggcaggttgtcataatccacatgctaactcgatatgctcggacacagtttgtcagcccttggaaagaggtaagtgttgaacagtcttccactttcaagtatactaagagaatggatgagctttttaaaacttgggcaaaaaattaggagtagtaaactagagaaatctgcrtatttaaggaagactcatttgtctcttgttcttttactaaagcaggcaaccaatataaatgcaagcataattatccattattttggcactgattgatrcatatttattggtgtaagtatatacacttttagtttgatactggcaagaggcccttgttaggaggagcagcatgacacagtgtttacagtgacattgccaaaccatggatttttttggttactagttactttcacgtctttgagccccagctattccaggtactcatttgtaaaaaaagtaggtgatgtgctcctatagcatgtgaatttatacctaaagtaattaatttcttgcctctatagataaatattgttgaacttttaaactactttttcctagttttgtatttataaaatgtttgtgttcttctcttcactttagctggtagcatttagtaaaattaataatttaagtgaagctatttgttttctttgtgcagattaacattagaagtacgccttattcttttttttaagtatgccttattcttttcatcatattgacaatttaraaaattttatcatataacttgtaattaagatccttaggatgtatacatttaagatttaaggtaattttaaaccagtttaaataaatccttaaatgttgtaagaatagcacattcattctagtcttttgatgncttatctttttaaaatacagtattatagattttaaaaaccaatttgtgtaaaaaaaaaaaagatttttaaaaagctcctgttatatcaaagtggtctgtatacatacttatgacaggccttgagtgctcagtacatcttgcttttgttaattagaaaaatgtaaataacatggaaaaatgtatgatacatgctttaaatgacacatcaagcttgcaaattattataaaatgttgatcactattttctatattgatttagtattagcattaaaaactgtttagaaattttaatacttctttatccacaagacagtaatactgattttcatctcacttttaatattaacaaaatgatgattatgttatccatcttaaaaattgaartatgttttgaattattaatatgtaagtcttatgttacataatgctcttaaattgatgaaattttactatccttgtcaactttaattttataaagttaattttatttatcattgagcaaagtacagttttgatggcacttttgctagattaaggaacatctctatgatgaaaatgtcctggcccttttatgataactttgatgagagatttttgttgccaaacagcttatttgtttgatttcagccaattcctttcaaaacttctgctcagattttttttctattgtataaagttataggcaattttgccttagctaatcactgtcaccatttaaatttttaaattttactttcctatcattttcagtaactatatgcaaatgatcctttgcttgtaattatatagaaactggagttaaaatatatagtgtacttaccatacctgctaaaaatatgtaacccgtagtaaaatctctgcttttgtatatttgtctgtttatttgtttttctgttccttgaattttatcttattttagataaaatttatttttaaagccattgcaaaggaaagttaagttttacaccatcatatacatttgttttttgacagataatttgaaaaattgggactgtattcattcttggtgttttcacatgttaactccatgaacatgaattaggacaaacatgaggtgaagtctggtcattgtccctggcatactggaatgggctaagtcatttcttttctttgccacttacttgcaatccaaccttggaattattcgaaatgctgtgctcattagactaatttagtggttttccagtgtgcacatcagccctcaggatgtgctagcactgccacaggaacgagccaagcagggcaggggtgctctagactgtgcagctttttgggcttttgccactgtttcaaacacagaagccttttttgccttcctttcttatgcagcgttgaatttgatttcctttgagaaagatccattggcttaaaagacagatagaaagaaaaccactttaaatagaagatttataagtttagctaatttgattcctattattgttgttgttgttttttaattatagaagcaattcaagtacatgttcccttctcgtaacctcttggttgacgccttagaggcaattattggtaactgtttaatttcagttactctggtggttataaattttactttgrataaaacattttgctttatttattaatttaagttgatatcagttgacctcaattcaaggaaaaattattcatcgattgtgtaagtgctatttgagggtctcgtttagcccagaataatcagtataacaggcttttgtctacatacgtacatatgttcagttcagaagcagtgtgaaagatttgaaaggctcagcccttattgcagtattagaatcaaggattgtacaatatgttagactcttgttataaatatattttataaaattaagattcaaatgagtggtcaacactaggaccatgtctgtgctctcactcttccagttaacccatctcaggcttcctctgtgctaattatgattttgttttactgagaaactttggagtgagcagtgtagccatttatagtcttcagtgctttctgatctaggcttgatgttgcttccaactttttagygactacacatggtagttttagctttagaagttggcagacgaggccgggcgcggtggctcacgcctgtaatcccagcactttgggaggctgaggcgggcttatcacgaggtcaggagatcaagaccatcctggctaacacggtgaaaccccatctctactaaaaatacaaaaaaaattagccgggcacggtggcgggcacctgtagtcccagctacttgggaggctgaggcaggagaatggcrtgaacccaggaggcagagcttgcagtgagccgagatcgcaccactgcactccagcctgggtgtctcaaaaaaataaataaataaataaataaaaataaaagaagttggcagactaaatctcaaagcagagtttgaccatagctagaagaaactgagaagtatttggcatttatatttgcttgctctttcttatgtgatgttgtaaaaggaacaccatgtagtaaagaaaggttaagatgattatagaataaaaagacaaggtgaaacagtactctagcagaggcattcctgagagtttacctctcttttttatccttttaccatcaacacttgaatgtgttgtttcatggaatcatccaagtagaaatgtcttcaytctagccctccattcccttttacctacaggcagaagtcacttacataaatgctatataagcaccattttatgatgaattaagggccattttaccttgaagtaaagaatttgccagtaggaaaaagtgtcactaaaacaatgtatcgacataaaagttaaatttataattaaaaaaacctgcctgtaataccgaattcatttaaatccagcagttttctctcagatactaagagaaaatgtgaaaaataatactgtgatgctttatayttaatggcttatcatttttgctgtactttcttttcttctttgttttccttttttgggatagagtctgtctctgtcacccaggctggggtgcagtggtgcgttcttggctcactgcaacctcttgcctcctgggttsaagcgattcgtctgcctcaacctcccaagtaggtggaattacagacatgtgccascacacccagctrayttttgtatttttagtagagatggggtttcggcatgttggccaggctggygttgaactcctgwcctcaagtgatctgccctcggcagcctcccaaagtgctgggattacaggcgtgagccaccatgcctggcctgtactttcttacatagtattccatttgccatagggcaatcagaattattatacccattttatatatgaagaaattgatatatacagattttagcaagtcacttaagacaatattaattataaaaggtggagcagaaatataaacagaattatctgatgcccaggccagcattattgcctttatattttgttaccctgtgacttgtaaattaaaataatttcttagttaccttaataagttttctgtgtttgtttattgtgttccggtcaaaaccagctttgaggctcccaatccatagtgctcagacatgcaattagctaacaaccataattaaatttgctctcaaagagaaaaatcatgtttcctattgaatttttgcaaacatttgtttacgttaatatgcttgaagtgtggcaaaattgttttttgttgaggaatcgaaaattcgtagatacactttttgagatgagctgatgtacatgcttttgtcaataagttctcaaatgaacacatcatatacaaacaagcttcttcaggggcagaagagatttttaatttagtttatttgcatcattatagatcagtatttaggctgtttatatgtaaatgtatgatttgaggaacaattaagtgttgacaaagtagattgcagtcatatcaattgcagtgcattttccataatttttctaactgacatctttgatgataaatagtggatgtcaagtcaaagctgattatacagtgcactaggaattcatggggctgtcagggagaagaccgattgactttaaatttacatattaatgagaagatttgttaagagggtgcttgactatagaaaataacggcgtatttatagggcacracattttataaataaagctgatgcaggaaaatggaaattaaaccttttaggttaataaattcaagagactgctaaaatgcacatttgcatttttattttcttaaatttaccttactctttgcagtccatgtgggttgttttttattctaggtcaagtttgtataattttcaaggatataaaattgyttaagtattttatttgtcattcaagcctattatgggagatttcttgaagcataaacctagatctctaagactaaagttgcttttgtaaaattaatcgatttaaaaaaataaatattataaaacacagagtaaattttaagagtgatttaaaataaaaaccaacatctgttagtggcatcaattgtaaactgaaaggaaactctgacactggggcctgctaggaatgtttttaattgcatgaatctagctttttacaactgaacttkctctgggagatgagaggttttcaagaattatcaaaatattttacttcagtgatttggaagttaaaactctaaatatttaccattattttttagaatatgaatccgggttatgtaattctggtggcagtatttatgccagtttaaaatttggagtaattaattttgtctctctctgtatatctgtacatcaattataaaaccttacataagtttaacaaagtccaaatttagaattttgtttaaagtatttttaaggtaagttcttaagtttttcagtggtagccataaaataacttatcaaaatscaaaatttataaatgtagttttttgatgagcaattttctgtaggtacagaggtacttcagggaagtacttcatgaactccacatccagatcctgtcttaacggaccaaaatgttagagattattgagttttaattttctttactgattaattttctttgttaaaacaaattttgtcatgtgtcttaccaatggactatagatccacgattctgtggaatttattaaaaaaacaaaatactgagaagttgtggtagaatacattctttacaatgcaataagagcagttttttgtgcactgttttaagtaactgttgacaaaggrttcaacatataatttaaggtgaaactaaggaccatgatctaatattgaaataatgtctcctctcttcccattggttatgaagcatttatcgtaaagattccgtattctttttgttgtttataatttattcctattgattggaattttttttaactcatgaagttttcttttttaaaaaagaaaactttaaattttaccaaggaacatatgcatggtttaaaagaaagaaaatgaatagtactacaaggcttatgagaaacatttttctgagtgacccttctcaatgtctgaattagcttcctcagttcttttcccttctgtgtgtgagctcaaaagtatctgagccaggtctcaatcaatttagaaagtttattttgccagagttagggatgcacctgtgacatgtgcagcctcaggtggtcctgatgacatgtgcccatggttgctatagcttgcttttatacattttagggaggcataatacattagtcaatacctgtaagatgcacattggttcaatctggaaaggcaggacaacttgaagacggggcttctaggtcatagatggatttaaagatttctgattggcaattaattgaaagttaagttgttatctgaagacctggaatcaatagaacggaaatgtctggattatgataaggggttgtggtgactaaagttttatcttgcagataaagcctccaggtagtaggcttcagacagaatagattataaatgtttatcagacttaaggtctatgttgatgttaatgctggttggcttttcctgaattccaaaagggaggagggtgtaatgaggcatgtctgacccacccttcctatcatggtctgaactagtttttcaggttaactttggaatgcccttggtcgtgagaaggggtcccttcaggtggttgtggggtaagaattttatttttggtgtgtgtgtgtgtgtgtatttacctttctccatttctaggtaatagacatatattgctatttcttgatttatcaattttaggcattatgtattgacttcctattatagaaatggagaatttgtcattcttctattaccttatgcttctgcttacctctttcatctttggaatataattatattagaattttttcaatccataggtgttcattttcctatgatttatgaatattattcagctgtataatagcatttcatctcttgtggaacttttggttctttttggaatcaaaaattgcttcattttaaatttgcttactttatcatgtcactatatgaagcattccaagttctccrttggaatattaaatattctccaaatattattttatgtgcagttgttgtgatacttcttgtctacccaatgtcagttctacccctcccacttatttaaataacaggatcctgattttgttcagagtagttatatgccyaatgaaaaataatcaacrtactaaattcctttagagtcagaaatgggtccacatctggaaattgggattctggggaagctattgtttttctgacagacttatttgacatatgtatattttaccctttgccctttctcatgattccttcccagaatgcatgtgtgatgattagaggtgcagtagtcatgttacaagcataaggataaaactatattctgggggtgggcagagctgaaaaacaaagtgtttggggcaacttttcattttatggagctacctaactagatatttctgttatatatagctgaacacagttctgactagtacagttgtcaagtatatcaagtatttcaacagcttcattttcttcccaggagatatgttcctggagtcttcaccctctgttctaatctgattgcttactaggcctgcacagttccaatctgtttttctagaacttaatttcatgtctcttctgtgttraatcctatttcttaggctttcttcttctctctctctttctctctctgtctctctgtctctgtctctgtctgtctctctcctttcttttggttttcctggctttggagcatatcctccaatgttttcttaagagtgggtagatgggagataaaattttgagactttcagtgtcactctcacacttgattgatattttacctgggctcttggattagtattctcttaggccttgtgcatttgaaaatggtttattgtttcttgtatatttgacatcttgctggttatggtactgttgggacacacccttttcttcttttgagaactctgtagacattacttaattttcttctgcaatgaattttgctgtgaagaaatctgaagatagccaaagatttttctcctttgcaggtgacttgattttttttttctgcatgctaaaaaaacctgtttaaaaagtctttgaraattaatcaggttacatctcaacgtgarttattccatatgatctccaggttcacttcttccttttattttagggaattttcttttctttttgtaattttaaaaattcgatgtttacattttttttctgcttcatttgtaagttatatacttgaggaatacccgttattctgttttataatctttgtctaccatgtccatcatatttttagaaaatttctttaatgtttgtccttttttcttttttttgagacaggatctcactctgtcacccaggcttgagtacactggtgtgattacagttcattgcagcttcgcccttccaggctcaagtgattttcctgcctgagcctcctgagtagctgggaccacaggtgtgtgccatcatacttgataatttttttttttttttttttttgacactgagtctcgttctgtcacccaaggtggagtacagtggcacgatcttggctcactgcaatctccgcctcccggatgcaaatgattctcctgcctcagcctcccaagtagctgggattacaggtgcctgccaccacacctgcctaatttttgtgtttctggtagagacggggtttcaccatgttggccaggttggtttcgaactcctgacttcatgtgatccacccgcctcagcctcccaaagtgctgggattacacatgtgagccaccgtgcctggcctaatttttgtattttttataaacacaggatttcgccatgttggctaggctgatcttgaactctggggctcatgtgatcctcctgccttgacctcccaaagtgctgggannnnnnnnnnnnnnnnnnnnnnnnnnnnnnnnnnnnnnnnnnnnnnnnnnnnnnnnnnnnnnnnnnnnnnnnnnnnnnnnnnnnnnnnnnnnnnntcgtgttcttagtaacgtgttgagtgatatgcttttgacacttacatatagtccgtttatatgtgaggagtgtggtcaggggagaaagatccttcttcctccttgccctactggctgttggaggtaatcaacagtctctaccacattctccataataacctaaaaaatttttgaagacactatgatttggaaagaataattgtttcatctgttaagatatatactattcatgtatatatatgtggtataaatattagattaaaatgaagtgttctgacaaaatttttttatctcaggagtacacctcctgttccctctagattttgaaatggtctattttagtttgatcacaatgtagtatattttaattcattaaaatagatgtctggtaggtgaggaaggcctgatacattgtaggttggaagctcttaattaatttataagtgaaataatggaccttttctcattctcatttattaggaaatacttcaggctgtgtcatctaagttgctgattcattccaatttttaaaatttgttgtggaaatgttcacattaaaaaaaatcagctcatactgacctttgtgaaaygctttaaagaactctgttaaaaaatgttagttaaaaataagttttcttgggttgatgtccttcagaaacaccaatttttcttagataagtaacttcatacattttcatataaagtacatagaaaaaccattcctagtrtagtagagctatattctgaaaaaaaaaatttttttagacaaaataaatcccctttcctcttcaccctccatccccatgattctgtgtatgtcctgctgaaaattcatgtacttgtctagcatggggcttatagtatgctgtatgtaagcactaggtratggtgctggttagttatccatttgacatgctgaccattttctaatttgaacagttctagccatgttgttggaattaaaaatttagggccagacattgacctttgcttttttaacatttcctttagtggttagctactgccttcctcaacccagtggagaccttgacagattccctattacaartaattgcttccagagctagttgttattcctgttaatttatttaggggccagtaaagtttagtgcctatatatataaaaatatatatttgtgtgcgtgtgtgtgtgtrtatatatatgtatatatatatgattccatctttaaaataatgtatttattgatttaatgatttagtttttatttttatacattcagcttacttagtaaaaggcaaaagatttatacagtctgaagagaaaccagagcatgagcttacttagaatataaaatctctttagtgagtttatattagcactttctctcactttctgtttcctaaacatcctttttgtgtgactagccttatttttgcatttcttataattttaaaaattgtatctttatgtcgtatattgttagtgaacttttattactgttttatgtcattttgggtttcctaaattttcaagtttttcactgtaagtcacagttccaagagaaacagataagttgtttctaatccatattttccccaacattttattttaagaattttgcaaatggaaagtgatatcagtaaaaatggcagagtagagaactcccaagagcttgttgctccacagagatacaagaaaatctgtaaaaacagtccaatcagctttttgaattcagaaaatagtcaaaggtttacagcaaccattcaaacatttaagaaaatggggcctgaaacycaggagaaaagatttgtggcatttaaacttaccctcactctatcctcccttctctgcctcagtgacaggggctggatggaacagagtagattctgttcgcaaagaggtgtgattatttgttttgacctgcctggaggatccctaatgcaagggacatgcctttattttgctgaaatcataactccctcagaacaaattatctactaatgccccttggggcaatagatatcaatgggagtaaacaatggacatgccaagaagcctggaacaaaaggctggaggatggaatgctttggggaataagggagttgagaagctcctgtggataatatgggatctagaaagtccatttcatgcgtagggttagacacctactcagaaaagatctgataagaacctaagcttttatgtcagactgaccttcaagctctgcagaagaggaagtgatggctaaggcaaatttttaaatggcccagctaagttttaggcaaactgcaagctaacaaaacagtaaacacttccatgaccacatgcaacaaagaatgtactcttttcagaaatagcttagaaacgactgtaaacaaacaaacaaaaacctgataggcagcaacaataatccctggggaggagttagaatctgagttagttaccacattataatattcaaaatgtctagtttttagcagaaaacgatgaggaatgtaaagaaacccataaatttgttccatccacaagaaaaaaagaaagtaatggaaactgtactcaaggaagtccagacattggatttgctagcccaagggttttaaatcaccatgttaaatatgctgaaacagctaaatgaaaccaggaaaacaatgactctccaagtagagagtatcagtatgtatagagaaatgatgcaaagaaaccaactagaaatactagagggaaaacgtataataacttaaatgaagtattcacaagtagcaatcaacagcagatttgaacaggcagaaaatgaatgggtgaacttaagtcaattgagattatctagtctagggagtagaaagtcaaaaagcatgaagatgaacagagctcaagagacttaagaggcctgtgygatgacatcaagtgcaccaacacacataatacatattccaggaggaaaggagagagagaaaggggcaaatagaatggctgaagaaaaaaatggctgaaaacttcccaatttgatgacacactaatcaacacattcaggaagctcatcagaatctaagtaggagaaattctgaatgcacaccaagacacatgatatggtttgggtctgtgtcccccccatatctcaccttgaactgtaataatccccacatgtcaagagtgggaccaggtggagataattgaatcatggggggcagttttccccctactgttctcatgatagtgagtgagtttcacaagatctgatggttttataaggggctttccccttcactctattctcattctctctcctgctaccctgttaagaggtgccttcctccatgattgtaagtttcctgaggcctccccagctatgctgaaccgtgagtcaattaaacctcttttctttataaattatccagtcttgggtatttcttaatagtagtgtgagaatggactaatacagcacataaagatcacattttcaaaagctaaggacaaaaagagaatcttgagagcagcaagagaagtgactcattatttacaaggtttcctcaataagatcaacagctagtttctcattagaaaccatggggccagaaggtagttgaagaaccatgtttgaagtgttgaaagaaayaaaaaagtcaacaagtaagttcttctttggcaaaactttccttcaaaaatggagaaatcggtacatgcctgtattggtataaacagtccaatgttttagatgcatttcaaagtaagatgcagacatcagtacacattacacctaaacacttcagtatgtatatcattaattagaattcaatatttgtttatgattattttccttttgttgacataaaattttcacagtgaaatgcacaaattttagagttttgataattgcatgtatgttagtaacacacacaaacccttttcattatatgaagtattactgttgtgcttccaagttagttgtttgccctcagatgcaagtattgttttaatttttttcattatagtgttgtattcaaaaagtaaaggatttgaggtattaccatactcctgcatttatacacacacacacacacacacacacacacacactgaatatatggcatatgtttagtgtatgtacacacacaaaagcagaaacactgatgtgtggatcagagaagagactttttatttactcatggttatcttagtgtcactttcctgcacttcagttccccatgagggtgatgttatgagggttagtgccatctgtatatcttgggggatggggagttgtaatacaggagaggagctcctcctaaataaatgaatctcagaatttatataggattgtgtatgtagtccattttcatgctgccaataaagacatnnnnnnnnnnnnnnnnnnnnnnnnnnnnnnnnnnnnnnnnnnnnnnnnnnnnnnnnnnnnnnnnnnnnnnnnnnnnnnnnnnnnnnnnnnnnnnnnnnnnnnnnnnnnnnnnnnnnnnnnnnnnnnnnnnnnnnnnnnnnnnnnnnnnnnnnnnnnnnnnnnnnnnnnnnnnnnnnnnnnnnnnnnnnnnnnnnnnnnnnnnnnnnnnnnnnnnnnnnnnnnnnnnnnnnnnnnnnnnnnnnnnnnnnnnnnnnnnnnnnnnnnnnnnnnnnnnnnnnnnnnnnnnnnnnnnnnnnnnnnnnnnnnnnnnnnnnnnnnnnnnnnnnnnnnnnnnnnnnnnnnnnnnnnnnnnnnnnnnnnnnnnnnnnnnnnnnnnnnnnnnnnnnnnnnnnnnnnnnnnnnnnnnnnnnnnnnnnnnnnnnnnnnnnnnnnnnnnnnnnnnnnnnnnnnnnnnnnnnnnnnnnnnnnnnnnnnnnnnnnnnnnnnnnnnnnnnnnnnnnnnnnnnnnnnnnnnnnnnnnnnnnnnnnnnnnnnnnnnnnnnnnnnnnnnnnnnnnnnnnnnnnnnnnnnnnnnnnnnnnnnnnnnnnnnnnnnnnnnnnnnnnnnnnnttttcagtgttattttgctgaataatagtctattgtatgaatattccatagtttatccattctcatattaataaatactgggctatttccagtgttttgcctattgtaataaatctgttaggaacattcttgcacaaatctttttatgtttttgtatatgttgggtcaatacctagatatagaattattggatcataaggtggatatattttggttcygcaagaacctgtcagtctttttcccaaagtagttgtattattgttttagtttgctacagttgccatgacaaaataccacagattgggtggcttaaacaacagaaatttattttctcacagttctgatrtctagaagtgcaagatctcaaggtgttggcaggtttggtttctcttgaggcctctgtcctttgcttacaggtggccatcttctcactgtgtccgcatattcctagggttttcctgagtatccagatttccttcttttattaggacactagtcacattgtattagggcccaccctaatggcctcattttaatgtaaacacctctttaaaggccctgtctccaaatatagtcatatttggaggttaaggcttcaacrtaagaatttagggttggggggcacagtttggcccataacaaccaagctgtaaaccttacagtgacatatggagattttgtttgctccacatcctcaccaacatttggtaacgttaatgttattcattttggccattctgttgggttttctgatattttaaaatgagttctcttagtggtattctaataaagaattattcaatacttttttgttgttgtttttaatgaggcagggtctctgttgcccaggttggggtgcagtaatgccatctcactgctgcctcaacctcccaggaccaagtgatcctcctatctcagtctcccaagtagctaggactacaggcacacactgccatgcctggctaattttttgtctttttagtagagatggggtttcaccatgttgctcaggctggtcttgaactccagagctcaagtgattcgcctgcctcagcctcccaaagtgctgggattacagaataactatttaattctgagatggtttgaggttagaaaacttagtccttttatcctcaaaaaccataactagataattgaagggttagaaaaaaatcaaaaatcaaggttggagcctccttgaacccttctgttacacacccattccccttgtcccccctccccctgcttggcagtcacagattgcacccatttatgtttgaatgatgactcctgtacacccatggagctgtcatctttgcctccagtgccacaggtgtttgtgtaagcatatgttttcatttctgtagggttctatagtaagcatgtkcccttccccgtcttacctccagtggttactctccaaaggcaaacagatctcttttggctttgtcttctactggttatcttcatattttaaaaaataacttgtttatatgatttttttccccagtgactcagtgtatcctataatttagatacaagaatattttggaaataatgaagaataaatagtccctttttgaaactttatataaaaaccttttatattccaattatttctgttttttcttttttaaaatgttaagttggtgttttgtggagatctagttttctaccctccctttacctagaatataagtttttttcctgttttatgtattaagagttcttcatagtattaaacaaaaggaacttttaattaatcgccctccttcttaggttgtccacaaatattgtaaaacctctgctttaacccatttgtttttatgccctagaggagaattaaacatcagtttcaattcaacacacatttactttcctgtctctaatataaactttttattttagagattaaggtatggagagaatgaatacatgaggaatcatgattagttctacttaggatcattgtaattttgtttcataatttatgatcaaatgaaaactactctaaaatgaattttgcttaacaaaaaatgtttctattttcttccccatcactggatctacattatttagtttttaaataagtaggacccttatttctcatgtcttgaaacccttagacctaagttcaacatgtttcatgagcatattttatttcagaaaatttgaaaaatgctttattatagatcctctagatttctcagtacaaagtttggaaactgctgcattcagaaagcttgtttcttacatactagagctgaatctagtcataagaaatgagatgtgttgtgggcaattgaacactgaagtttcatagtggctcaacacaaagttactgtgcacaggtgtttctataattgtgatgtattgggggagattcagtgttcaatggtcctcaaacccacacttccacctgtgtagtatagtggtcactgggctgtgatataaaacatgtaaagtgtatagcatagcagtttcttcacagaaggaaaaaaaatctcaaaccagtatgcatatcctttgttgttttacatagacacaaattttggggaaggagactttttcttctttgtgaaaaatactaaattaaaagttttattaaacgtgaatttttttccagtgaattatctctaataatgtattctcttcctgcttagtaactaatttgactgagtgattattatattagttaccacctacccaccctggtcttgtcaggtacatctaacctaatgtcagagagatgtaacacaatatactgctgtggtatgtgctatggactgaatgtttgcatcccctctgagtgcatatttgaagacttagccccagggtgatgatatttagagatggataaaagttggtattcttaaaggcaatgcctcaggttactttagcttttgggaggtaatgaagtttagaggaagtcatgagagtggggacctcataatgggattagtgcccttctaagaagcttgcttcctctcttccaccatatgaggtagctgtccacacaccaggaggagggccttcaccatgaattgaatcacctgccccttgatcttggacttttcagcccckagaactgtgagaaataaatgtctcttgtttcaggcacctaccctgtggtattttgttataacagcctgagttgactagtgcagtgtcttagattatgtgggaatgtcatgatgtgttaaagtcacttttaaacattttgcaagagtctcaggccacagcaggttgcagagattgtttcatcctggtgtaaatcttgagatggcactagcacccttcaggctgccttggaattcagaaggcaagtgggtatattcagtgtcttttatgtgactactctaaatgccaaggtaataaaggtgagaggtgacaggataaagaataataattcccgagttcaaatcctggctctaccatttttaatctctgtgactattgataatttatgtaaattgtgtgcacctcagttctttcatctgtgaaaaagatagtaaatacctgctttgtttaccacatggggtggttctcaggtttcaaagaggtatttgtgcaagtgttttattaatactagaagtttcttaagctgaagttgttttttatttctactaagtccattgttactgctcacatgatacaaaagtagatatttttcaggaatgtttgattcctttatcaatttttatacataaaaatattttgctgtaggcagttttaactgtcattaatttcattttttatttttctattattccttatgaactgacaaaagatcatagtttgtgtttatttcttaggaaatccattcagataaaataagtctccctgtatcttaagatctctttgaaaagtaaatattaccctcagcacccaaaattgtgggttcagttactgacttattactatttttgtgaacatttatgtttagagcttcagatacaaaatatgtagaaagtactactacttaagtataatttcacacttttctttattccatgagcctgtggaatagtaccttaagagtatataaaccatgccttttccaaaatatacttcatggagttattttttgccttcataaagcttatatgtaatgtaacaacgtttgtctcttctgaaagtgaatgttttagagcaaagtgaaaagctatattttattctgattttttttttcactagcattagggtggttggtamacatagcagagagagacctatttttatataagataggttcagatatattaaactcactgctttcttaaaaataaaaataagctttattttttggagcagttataagtttacggtaaaacttagttgaaggtgcagggatttcttatatatcctctacctccacacatgcaaaacatcccccaccatcaacattttacattacgatcaatgaatttacattaatattgttgtcacccaaagtccacagtttacattagggttcatccttggtgttgtacattcttcggattttgtctgatatatgataacwtgaatacaccattgtgttttatcatacacaatagttttgctgccctaaaaattctctatgctctacttgttcatccctccctccccaccagctcctggcagtcactagtctttttaatgtctacatagtttgccttttccaaaatatcatatagctggaatcatacaatatgtaacctattcagattggattctctcacttatattgtaatatgcatttaagttgtctccatgtcttttcatagcttgttagctcatttatttttagcactgaatactagtcctttgtctggatataccacagtttatttatccactcacctactgaaagacattttgagcactttctagttttggcaatgaggaataaagctgctgtatccatgtgcaggcttttgtgtggacatcttttcagcttttttgggtagatatcaaggagtgtgattgctggattgtttggtaagagtatgtttactttggtaagaaactgcaaagttgcctttcagagtggctgtaccattttgcattcccatcggcaatgaatgagagttcctgtcactttatatccttgtctgtatacggagttatcaagtttctggattttgtccattctaataaatgtgttatagtatatcattggttttagttagcaattccctaatgacatggttttgaacatgtttttatatgtttatttgccatttgtgtatgttttttggtgaggtatctcttcaggtcttcagcccatttttaaaaaattgggctgttattgttgaattttaggaactctttgtatattttggataacagtcctttatcagatatgtctttggcaaatattttctcccagtctgggcttgtcttcaaattcttttgaccttgttcttttgcatagcaaaagttttaaattttaatgaagtccagcctatcaattatttcttccacagatccatgnnnnnnnnnnnnnnnnnnnntcttcccccagatcccatgtcttttgtattgtatctaaaagttgccataccccaaggtcaatctaagattcctatgttaacctctaaaagttttatagttttgtgttttacatttaggtctgtgacccattttgagttaatttttgtgaagattgtaaggtctgtgtctagatttatttttatttttatttttattttttgagatggagtcttgctttgtcgcccaggctggagtgcagtggcatgatctcagctcagtgcagcctccacctcccgggttcaagcaattctcctgcctcagcctcctgagtagctgggataacaggtgtgcatcaccacacccagctaatttttttgtatttttattagagacagggttttaccatgttggtcaggctggtctctaattcctgacctcgtgatctgccctcctcagcttcccaaagttctgggattacaggcgtgagccgctgcgcctggcctgtgactcttcgtttgttccagcatcatttgttgaacgactatcttttctccatcgtattgtcttggctcttttgtgaaagcagttggctgtatttatgagagtctgtttctaggctttctcttctgttccactgatgtttttctctgttatttcacaaataccacactgtcttgatatgtgtagctttacagtaagtcttgattatgggaaactttaaacatacataaaagtatggctgacagttcaacgaatccctatgtatacatcacgtagctgcactgttcatcagctcatggctgctctcgttttgctaccttaccccattccaagatttcatgtaaaattttagatatcatataatttcatttctattgagagtgtatttataaaacattatctttgctttaaagaaactgcaaagccttctccagtataaattggtccccatttttttaaattttttttttttttggtttggtccagcttaaatgtatatttttaaagaaactaaaaaaagtattctatggtagtatttcatttcatacatgtacatattttaaacatggaaaaataaaacattcatttataaatagaacattttatactcattttatgaaatagttttatcacatatattttagagacattttgaggactcctttttgagtcattttcatttaatagttttccattggaaagcatctttacttctgtctggatttttggagatacacattaccttggaatatggatacaatgctgtmatagaaatatgtttcagactttgagtactcattcacatgatttagcatagtcacttagaattattttgtaaggaagatctgtcatttctccctcatttatttatttattagttgttttaactgccttagctctagaaccagtcatgtttccatgtaaaagagcaggttttatggccttagaagtaatgttttctgtcttagatttcagtcagatggttctgtctttttgtaatagtaatagtattatattggagcaaagttggcattacttaatggttgtatagaaaaactgaaaccacaatataaaacattttaattagtacgaattagaaatcccatgtatgataatgcctcatttctgtaggctcaatagaaacaacatgtataataattgatttttttaaaccttttcatgcatttgtaaaacacatttttcttgtcccttggcaatggaaaatataatttttactgttttcttttaaaattgtgtcttttattatctgtataacaagaaatcagaatatcaagatggttgaaatgatatgcataatatactaaaaataagggcttcatacataaaataatatttaaaggcttcataacagccatgctagctacataaggggtttttctactttgtttcaaattcatagatgtattaattgagactgcctaatatcaatgtctagttaagaaatatatttgggccaggagtggtggctcacgcctgtaatccaggcactttgggaggctgaggtgggcggattatgaggtcaggagattgagaccatcctggctaacacggtgaaaccccgtctctactaaaaatacaaaaaattagctgaaaaaattagccgggtgtggtggcaggtgcctgtagtcccagctactcgggaggctgaggcaggagaatggcgtgaacccgggagcttgcagtgagcgagatcacgccactgcactccagccagggtgacagagcgagactctgtctaaaaaaaaaaatatatatatatatatatatatatawaaaaatatatacaaatatttaaaaatatgtaaatatataaatatttaaaaatatatatgtaaatatataaatatatataaatatgtatatatttgaggatatagaataagctcagaagattaagcagttctactaaaaacagaatatttctaaaaactttcaaatacaaatggagggaatattaaaattagatattagaattctcttttgtgtatatgaagtatggttagtataccaagtggaataagtggaaacttactataaagtagatttcaaagtctttcaaattcatttatttttactcttaagcagactaaacattttccttaatatatcttgtttgtcttatttaactattctgtttctggacaaggagaaagtaaaattcatttcatcatatagttaacatgttaaataagaatgattacttttaaaaccattcagagtcctctcagatataaactttgattcctctacttaacttacttaagtatctaggctattatctctaacagaccacaaatctttatctgatatgtcaaaagtatcacaaaggtaaaatcagttaaattgaaatttttaaaatattactgaatttaaagaactctgtaagtggtcactgaaagtctagcactttatttaaacacaatataaaaatatatctgagttttctgaaaaattgtgttatgttgcattatctgccgtaaagctcgatcctaccacttaattccttgaacatattaatcatagttgttttatagtctgtcttagtttgggctactgtaacaaaaatgtcctagattggatgagttaaacaacaaacatttatttctcacagttctggagactgggagtacgggatcaaggctctgacagatttggtatctggtgagggtctacttcttggttcatagatagatgactgtcttcttcacatgatggaaaaaaggccagaaagctctctgaggttcattttgtaatgccactaattccatttatgagagttccgtcttcatgacctaatcacctttcaaaggccccatctcctatcctaataccatcacactggggattaggatttctttctttctttctttttttggagatagtgtcttgctctgccgccccaaggctggagtgcagtggcgcaattttggctcactgcaacctccgcctcccaggttcaagtgattcttctacctcagcctctggagtagctgggattacaggtgtgtgccaccatgtgtggctaatttttgnnnnnnnnnnnnnnnnnnnnnnnnnnnnnnnnnnnnnnnnnnnnnnnnnnnnnnnnnnnnnnnnnnnnnnnnnnnnnnnnnnnnnnnnnnnnnnnnnnnnnnnnnnnnnnnnnnnnnnnnnnnnnnnnnnnnnnnnnnnnnnnnnnnnnnnnnnnnnnnnnnnnnnnnnnnnnnnnnnnnnnnnnnnnnnnnnnnnnnnnnnnnnnnnnnnnnnnnnnnnnnnnnnnnnnnnnnnnnnnnnnnnnnnnnnnnnnnnnnnnnnnnnnnnnnnnnnnnnnnnnnnnnnnnnnnnnnnnnnnnnnnnnnnnnnnnnnnnnnnnnnnnnnnnnnnnnnnnnnnnnnnnnnnnnnnnnnnnnnnnnccaacgtggagaaaccctgtctctactaaaaatacaaaattagccgggtgtggtggtgcatgcctgtaaccctagctactcaggaggctgaggcaggagaattgcttgaacccaggaggcggaggttgcagtgagccgagatcgcgccattgcactccagcctgggcaataagagcgaaacatatactgcaaatgactatatattttcacaaactgaatacacctatgtatcaaatacctagattgagaaacagtaattatcagtatacttcataagcccccttcttgatacccttcacttaataatctgcttttccttacagaaggaaacagtatccttacccttagtgataccagcatttcctttctgataagttgttggactagtttgaagctttggatgatggattttgttctacttgtggttctagggaatggattcaacaatcttgagttcacttatcacctcaattatggattgagatgatttaagctgggcttttatctgaccatcgttactccccaagacatagattttatattttaaaccaaagactaggagagttagcaggattgtaatttttggcggatcctggcctcaccttttgttactgcatttttgttaacctgctgaaagctctactgagcttttaggcctctcagcttcctcttgtctaattaacacatcctttttttttttttttttttttttggggaaaagcaattccaaaagccaatcagaattctaggtttctagatttactacttcttctgggtcttgtctgcataattcatcactgtttttttagccctccagtgccttctaacaggtttcttaacttttccccagcttttctagttctcactgacaggcggttgttctaagttgtctgtttagccattcttagaaatagaactatataatcttatattatgtgtttttaaaaagtgttctctaaaggcttagttaaaaatgacatcttttatcactgtgatttgtgactccttttaagcatccataactagcattgattgaagttgtttcagtgtaatgagttccccaaacamtacattatggttcaaaatgaagcagttgtgtamgagcctcataatacatttataaatcctcaagtatgaggcaacttctttctgagggataattttaggggggaaactttttttcatatttggcatctagggatattgaatttgaggcatagtaatagtttcaattacatggcttctagaaagaaagtttcttaataatagaagcagtggcaatagctactgtttgtgtactttaatttgtatcaggcactaagtgcttgtataatgttcaataaactgattcaatctttataaacactataatgatatagttactgcttttatagatgagtaaaccaagacaaggaaaaaaatcaagacaaggaaaggttgagtgatttgtcatggtcatagagccagcacttatattgaactggtgtgtccagatacacccatatgctgtgtacgtatccattctgtttggactaatgcctgttctgattcattaaaaacctgagaaacatagtccacagtagtacagattcaaatatgttgttggagattcattcttgtcctccaagaaagcctcatctccttcatttcattaacctcataaaaacgtccacccttcacttgtcaattttttctctgcttggttccaacttagagaattatgcagttggtacatgcctatagctagtaactgggagagccggatctaagaagctgtgtcatgatgttctcatggcagtagaaccaaactgaaatttcataaaaagtataagagaatttcttctgaggggaatgtttttaaatgataattaacatgaactattttagctataagcaacatgttcttcatgtttgttagctcataatcccattataaaaactttgttatttcaaataatcccttttattttaggaaattacaatttctgtaatattatatgttaatttgtagaagttttattagtagcaatataagatcattgaatcatgtggaaaagatactaatgaaagaaaattactcttttgaaatctttttattattaatattttattagtttgcataatttttatttttattttattttattttattttattttattttattttattttattttattttattttatttgagatggagtcttgctctgtcatccagtctggagtgcagtggcgtgatcttggctcactgcaacctctgtgtcccaggttcaagcgattctcctgcctcagcctcccaagtagcttggactataggcatgtgccactatgcctggctaatttttgtattttcagtagagatggggtttcaccatgttgggcaggttggtcttgaactcgtgacctcaggtgatccgcctgccttggcctcccagagtgctgggattataggtgtgagccaccatgcctggccgcataattttttaaaactgtaaaaaaattcatcaataggaagcagttgcatcaattgtgaaccatgtatgttatgaaatattactaaattttaataagatagtgattcatcgacctttaattatagtcattaaaaatgccatcctttcaattaaatacatattgaagaaatacagtagtgcaagtaatcctctgtaaagtgttcatatttttgtaaatgcatattaaaatcaaaccatataaaaatgtttcttatggaagtgaactcaaaaacctatatgatggtatgttcatagaggacactatagaaacatttacataagtttaaaaatttttttttaaataattttattattattttttaagttccagggtacatgtgcaggatgtgcaggtttgttacataggtaaacgtgtgccatggtggtttgctgcacctatcaatccatcacccaggtattaagcccagcatccattagctcttttccctaatgctctccccactaaccctgccctgacaggccccagtaagtgttgttccctcgctgtgtccatgtgttcacattgttcagttctcacttataagtgagaacgtggtgtttggttttttgttcctgcattagtttgctgagaatgatggcttccagcttcatccatgtccctgcaaaggacattatctcgttcctttttatggctgcatagtattccatggtgtatatgcaccacattttctttatgtagtctgtcattgatgggcatttgggtagattctgtgtctttgctattgtgaatagtgctgcagtgaacatttgcgtgcatatatctttataatggaatgatttatactcttttgggtatatacccagtaatgggattgctgggtcacatggtatttctggttctaaatctttgaggaatcagcacattgtcttcaacaatgattgtactaatttatgtacccaccaacagtgtaaaagcattcctatttctccgcagcctggccagcgtctgttttttgagtgtttaataattgccattctgagtggtatgaaatgatatctaattgtggttttgatttgcatttctctaatgatcagagatgttgagctatttttcatatgtttcttggctgcatgtatatctttttttgagaagtgtctgttcataccatttgcccactttttaatggggttgttagtttcttgwaaatttgcttaagtttcttgtaggttctggawattagccctttgtcagatggacagattacaaaaatgttctcccattctgtaggttgtctgtttgctctgatgatagttttgtttgcggtgcagaagctctttagtttaattagatcccatttgtcaatttttgcttttgttgcagttgcttttggcaatttcatcataaagtctttgtccatgctgatgtcctgaacggtattgcctagattttcttctagggtttttatagttttgggttttacatttaagtctttaatgcatcttgagttaatttttgtataagatgtaaggaagggatccagtttcagtttttcacatatggctagccagttctcccagcaccacttgttaaatagggaatcctttccccattgcttgtttttgtcagatttgttgaagatcagatggttgtagatgtgtggttttatttctgagttctttattctgttccattggtctatgtgactgtttttgtaccagtaccatgctgttttggttactgtggccttgtagtatagtctgaagtcaggtagcatgatgcctccagctttgttctttttgcttagcattgtcttggctacatgagctgcttttggtttcatatgaattttaaaatagttttttctagttctgtgaagaatgtcaatggtagtttaatgggaatagcattgaatctataaattgctttgggcaggatggccattttcatgatattgatacttcctatccatgagcatggaatatttttccatctgcttttgtcctctttgatttccttgagcagtggtttgtagttttactgttataatatactgccataatcttaaacatttgtacagcaaaataagcaatacatatgtgtctttcattaaaataatgtaattgaactcagtatgttaattaacaatgaggaagaaatggaatgagtagatggttataaaaagcagttttttatgtacattttgatgattttgttagtaatagtgctatgtctgttaatacagcactttcattatgtatcactttcaggtagagtttgaacatttgtttaattaaccatgacttaagattgtaagtgagtgcttatgcttagagcatttaattatttgtgttttattggtttattaatgtacttaacagaactactttagcctggagctccataaaggaatagtcactcaagtccagctttgatataaaagtatatctcacttatagtctttttattaagcactaaaagacaagtagtgtgtttgttttgaattctgtattcaaaggaaggtgataatgttatgatttctagtttaattttgaagatgagtattagtagaaatacttttgttttcaaagagtataaattttgtgagttttctctgaataattttataagatttttttgcctgtggatttaaaaagcactgagctaatattattcctattctgagagacctaaaagttgtacttttgatgaaaggtgttttccagtgatatttatgtcaagatttaaggaaagattgtgtaaaatctgtaggcacctagcaagggaaaaatacttaagtgatattaacctaaaacattttagataattttctttattgttatgtataacaatgcataaatacaacaaattgcttttaagtgacttactgatttttatctccttagttttattcaattaaatggtttttaaaagataatttagattcacatgaaattttaagaaataattgagagagatctggcataacctttactcaattttccccaatggtaatgtcttgcaaaactctaatacagtattacaaccaggatattgacattgatacagtcaaaactgagaacatttccatcacagggaatcttcatgttgcygtttcatagccaaaccgactttattccacatgtttaaccttactcccaacccttaacccctggcaactgctaatctttctgtttccatarttttgttatttcaagaatgttatataaatggaattatatggtatataaccttcattgtagattatccattttgtcattctataatgtccttctctgttgtaattttctttgctctgaagtgtactttatctcatattaatatagttattgtgctttcccttgattaatattagcatgctatgtatttttccatctttttacttttaacctgcctttatctttatgtttatggkgaatttcttataggcagcacatagttgagtcatgggttttaatctactttgccagcctttgtcttttaatcagcatactgatttacatttaatctaattatttatttttaaggcttaagcgtcccatttagttttttgttttttgtttgttctctctagtcttcatttctcttaactgtgggttatttcaacattttttagaattccatctttgcttatctgcagttaatttgaatatatctctttttttattaattaaaacctatttttttgaaattttttagagatagggtctcactctgtcacccaggctggagcacagtggcttgatcatagctcattgaagcctcaaagtattgggctccagtgatcctcccacctcagcctcctgagcagctaagactatgggtacatacccccatgaatggctgagttttgttttattwttttacttgtagtagaggcaaggttttgctctgttgcccaggctggtctagaactcctggccttaagtaatctttctaccttggccttaagtaatctttctaccaaagcacgaatatatctctttgtgcagcttctttagtggatgctgtaggtattacattttacatgcataacttatcatcttaccatcacagtctactgatgtcctcatgttacacttcaaggggcaaactttttaaccacttagctccctttgatctcttttttctctccactttataaatagttttcttaggtatgtcctttacatgcatttagaaccgtatcaatgttataacttttcttcaaccatctaatataatttaaaagactcagaggagaaggaaaaactattatatgtactcatatttttccttgccatattctttcttccttccagatgtttgaagattccatcttttatcatttcctttctgtctaaagagcttcctttagccattctttcaggataggtctgcttataacaaatactctagttcccctttatctgaaaatgtcttgattttctcccccttcattcctgaaatatatttttgctagatataagattctcttttgatagttcctctccatcagttggtctactgtgttctgtcctccatggtttttgatgagaaatctgctgtcattagacttgtttttctgttattggtaaagtgtcatttctcctttcctgctttcaagatttgtttttctttgtctttagttttcagaggttttactataatgtgtgctgttttggatttctttgggtttaatcctgtttagggtttactcagcttcctcaatttgtagttttatttgccaaatttaaaaagtttgcagtcattatttctttgagttctctttcaactcttgcctctgtctcttctccttccaggattgattaatagatgaaaggaatgttaggtcttttgttgcattttcactggtccctgagactctgtttttttttttttgagacagtgtctcgctgtgtcacccaggctggagtgcagtggccaatctcggcttactgcaatctctgcctcccaggttcacgccattctcctgcctcagcctcccgagtagctgggactacaggcacccaccaccatgcctggctacttttttgtatttttttagtagaggcggggtttcaccgtgttagccaggatggtctcaatctcctgacctcgtgatccacccgcctcgcctcccaaagtgctgggattacaggcatgagccaccgcacccggcctgttttttagttttgattttttttgtccctagtctattttatctttgttcagattgggtaaatcttgttgttctgtgttccagtttactgattatttcttttgtccccctcctctgcttttgatcccattcattaggtttttagttttggttcttgtatttgccagtcgttaacagtttttatttggtctttatatcttctatttctttctttaaactttataatttttttttttttgagatggagtctcactctgtcacccaggctggagtgcagtggcgcaatctccactcactgcaacctccgcctcccagggttcaagtgagtctcctgcctcagcttcctgagtagctgggattacaggcgtccaccaccatgcctggctaatttttgtatttttagtagagatggagtttcaccatgttggccaggctggtctctaactcctgatctcgtgatccacccacctcggcttcccaaartgctgggattacaggcgtgagccactgtgcctggccttttttttttttttttttttaagatggaatkttgctcttgttgcccaggctggagggcaatggcgcgatcttggctcactgcaacctccgcctcatgagctcaagcaattctcctgcctcagcctctcgagtagctgggattacaggtgtgccccaccagccaggctaattttgtatttttagtgagacagggtttcgccatgttggccaggctggtcttgaactcctgacctcaggtgatctgcccacctcggcctcccagagtgctgggatgacaggcatgggtcactgcacccagtctagactttataattctttgctaaaaccttctatttctgtattttttaccaggatgttctcaattgctcatcgaagcattttttaatgatttttaaaaaataatcagatcattccaatatctctattatcttggtattggcatctgctagttatctatttttattcagtttgagatcttcctttctcttggaatgatgagtgattttttaattgaaacttggacattttggatactttgagactggatatttttaaaccttcaggttaactggctttgtttgataccactctagcagggaagggtggtggaaagagagaggggtgctgtctcatcactgccaggtcatagcaggagtccggattccctgcttatcctccactgacacttcagagggattttactcattgttaccataggtgaatgtgggatttctggctccccaaccgtctttctctgatagctgtctgctaggagggatacaaggtactgttctatgtgtgtccttccctgacaaccaccagggtgtgggcggggctgactttggttactactaggtgtggtgctgcaagtcctgactatgcactaggcctcctctgacatcatcacagtgaggaggaataaggtcaccttgacactaatggatgggcttagaagtccaagctcctcacttggtcttcactgacaatatcagaatgccttgttacctcttggtagagatgaaactctcaatcccatcttggccttttctgaaaccacctagtgaggtggttggggcatctcattacagcctaataagggtagaagtctaggatcaccatctcagcctctactggtggggatgggggtagggccataattttttatctggtgttgggctgcacttgagtagttacttctaaaagttttatatcttgctagactgcccctttcctggtcctttggctagagagagcggttctggtggtttctttcatctgcatttgttgccagcttctgcaccgagttgtggatatatgaaataaaaagaaaacccagggaactcactggtctgtctttctttggatcttgaggttcctatccagtgctcctcctttttgcctttcaaagtcttcttatgtttgttttatatatgttttacatgtagtgttctgcttttctagatctctacttagtgagagagatggggaaaagtacatctactccatcttcctggaagcagaaagtatgtttcagatacttggtaacggaagttacctctaaacagaagttgaattggatgtatgtggctattactgtgtttgtttggttttttgtttgtttgttttgagcactaaatgcctgtaggcatattttattggcagagataaagaattcaaaacaaaaacctagaatcagctcctctggatatttataaatctcaaactgagacgttttcttgacaactcagggacctacttaacaacactagttttttcgtgtcacactttactgtgatttcttttatgttactattcaaacaatgctcctctttttttgactctttgatctagttacagagtggctgacaatttatggaaatagttttcaggttttaggtagtattataggccttgttaaaatctaacggtcatgtgttccttttgaaggactataggtatttctatggggatttaatagtcaaaaatttactttgtaatacaatagaagcacatcatctatagcacagtaacttgttataaaatatgagaaaaatcaatagacctttattcgatataggttgtgtaatatttttaaattgcccaaacagaagtattctacggtaaaatgttgttatagatgtttaaaggaaagttttctttgactatataatatgcagattgctcaaggtctaaagtaatcttgggttggatttctttcattgtagggtgatgaattagaagacaatggaaagaatttctacgaatctgatgatgatcagaaggaaaagactgacaaaaagaagaagccgtatactatggatccagatcatagactcttaattagaaatacaaagcctttgcttcagagcaggaatgctgcggtatgttaaaatccttataagaaataattcactggtttttaaaaaacagcaattaaaaatatctcaatttagtaagtgagtctgtgtgtgctaatggagcatttgtttgtttacacaccaartgacatgtaatggatagttggaagtacagtgtggaatgtaagctatagatttagagacctaatgtctgagaagtaatacctaaatatatttcagccttccatgtttccaggtatacagagttaggttttgatgacaatacctggtttggcctattggacttcatttacgttttaatggttttgttaattggcttttcttaagatatttctaagttgtttctcaattggttggattatattagctcttatataagaactatgtatatttatcagttattccattgtgattgggggtacttgatctggtattagtccatactgtttgtatctgtctgatagaatttttaagagactaacaaaggtaatgcctcacatattataaatgtaaattggcagtaatagtaattaaaaatcatctttatttgggtcataaggttttttttgtttgttcgacacctttttgtttatataaccatttatattttagaagaatacatgtgcacawtacaaaattagaaattacaggctagcaaaactaaaaagaaaattaaaacatcacattctcaacactcagaaatcacttatgtcttagtgtattttcttccagatctttctaatctgcataagtgtacatatattcatggttacacatacatatatatatattttttaaccaagataaaaatcatactgtacatagcattttctaacctttttttctctagtcagtcctctctactttttattttaataaaatttcatttcatttaataccaattgatcttaaattattctttttggatgatttatccaaaccattatctaatgcattgcatcttttaaagcctgtcaagtcttgcagaatgtccttctgggtttgtctgattgctgctgcttctttttattttgttattttgttygctatacctactggaatgggatggttgcatcttttatagtgtcatttaattcttttatattctgtgtttcctgttaactggcagttatatccaaaggcttgacggatttaggttaaacatgttcttaaagattttaattgagaaagtattcttaatgaattgttctgttcagaacaattcttaatgaattgattcttgagaatttagagcttacagctttgtatatccaagttatcaacaacaatttttgtctaatacctaatggtttagtttccaaatcattattcagtaatcatgcctagtcataatgaaaatattatttcatggctgttgtaaaatatgcttatattttaatgtactcagcttagccagatgctagttaggtagctgtaatttgccatcttaagctgtactttatgagtgactcactgttcatttaactaggtcttagaaattgattttatagttcaaatacttatggatcaaaaacgttttcaaatagtgaaacaaatagtggcagtttgtacttctggtcccattttgtttgggttccctgcttacttgatgctgtaatagaggtggtttactttttgtgtcagtgtattttggtaccttgttttgggatgctgctaaatatgagtaaaggctaacttttgaagaattgtggatagatttttttttaacctcgtacttaagtttatggagagactttgagaatttctttcaggaaacataatacatcattgctatgtagtttgtactggagatagatactgaaagcggaatgttaggaggctattctaacagtctaaataaggtgacagcggcatgaatggttaagagtagaaaagtgtttataggatgcgctttattatgaacaggcatgatgtaactgtagaaggtctataaggttgtatatttttagtctttttggattttgaagttttgggaacttttttcatggcgtttacaaattagcctatacatttcaaatctgggtatcaaagcgactttcaactgttggatttctaaataccgaggaaaaagaggctcatttagtccttttggattttggagtaccctaatatattagaacagatggcatgccaartggcagctagaattttaaagacattgacatgtataggaagtacagtttgctttcttgccagtaggattggacttttatttgtaagggaaaaggatttactatctgtaagatagattaaaattaagattcagctttcttttctatcatttactaatacttattagccaggtatatgcgttaatatttttttaaatgactgatcttggattaggtcaatcattaattgagattcttttattttataagatttaaaattcaggagagtttattttgtaaccaacttatatttgcagttcacaagtgaagaaatgagatattcttgcattttttaaattctcaactaatatcttaaagctataaatcaaacttgtaagaaagtacaagaaatggcaaacagtaaatttaggaccctgtatactgtatttttaaaaacggttctttagtttcagaagaaacttttttttttaacctcaaacattcttctgtgctgtatactatttaggcatatatattaatagaatttttgctatatatttgttcaaacttcatagaccaggcagaattaaattaatattagtgtgtcctttgagccaaaggcagcattggtaacatctgtagctatgtctctgcagttgtcactctgaatctgagtgtagaggcacttaggggaaacagtactcttctgttttgagacaaagaaattccagtcaccctttgtttgttttgttttgttgagacagagtctcactccattgcacaggctggagtgcagtggcatgatctcggctcactgcaacctctacctcctgggttcaatgattctcgtgtcccaacctcccaagtagctgagattacaggtgtgcaccaccacgcttaacctaatttttgtatttttagtagagatggggttttaccatgttggccaggatgctctcacacctgactgcaagtgacccacctgcctcggcctcccaaaggggtgggagtacaggcgtgagccactgtgcccagtctttgaatcacccttataatggctttgaaccagaagccatttttaaggttctgtgtttttaaaaacaagattattttaaatgctactgctgtagatgtatttgttttaatggagtttctttaattgtaacttaaatgtgctgagttttctttatttcagcctactagttactgttatcctggcttcatttagaaaggcatgcttataattcttaaaaagccccagtctcagagcagcagctgaggagcatggaatttcgagtgtcttgagctttgccacgtactagctgttacaccttgagcagttcattcagtgtctctttttttttctgaggatgtattcttttcatagcactgccatacatattgccacaaactgagtggattaaaacaacagaaatttattctgtcacatttcaggaagccagaagtctgaaatcaaggtataatcagtattggttacttctgtacgctctgagggagaaaccttctctttcctggcttctggtgattgccagcaatccgtggcattgcttggcttatgggtgtatcacactaattatctccatcttcacatggccttcacggtgtctctttttgtcctttttttttctcttataaggacacgttcattcgatttagggctcttaaccagcatgatgtcatttcaattcttatattaataatttctgcagagatcccacttccaaataagatcagattctgaggatagtattgggcactgggrgtgggggacacttcttcaactcactacgaagagtaacattccattttacgtcacaggaatttgtaggacttagaggaaataatgtgtaggaatggattttgaggttgtagagtgctctagtgttcatagttctgttatttttatgctttatcttgtaggtggttatggcagttgctcagctgtattggcacatatcaccaaaatctgaagctggcataatttctaaatcactagtgcgtttacttcgtagcaayaggtaggtcatgattttatatatattttttcttttgtattccttcaaaagtaatgtttgaacaaatgtaatctttcaggcatttmatatataactctgactatattttaatcaatcgatcagtaagatttcatacttaaggggattattataaaagtctttatgcatttatctcaaacttaatgataaatactgaaactttttaacctcaagcccaaagatattgaaaatattttgtggcataacactagagtgtcactagtagcctagtattagtgtttgaaatttttaggtatggcaataatgatgtttgggagttttggtaaatctggaatcactgaaaaactatactgaagtactatcagattgacttactcaatgtattaatacatggttttatatagagcaatgtgtatgctaagtaatgtagtttatgccagaattgtgcttcctataaagctggaatatttaattactatgctttgctccactctaaaaagagagctgtgtttttaatagctactcattttaaagattgcatactcttagtttcagatagacagacagaaagagcatgccaccttctttgattttacctctttataatttagtggtttaggttaacgattcaaaacaatttattgagtttccatgacatataacatgagaatcatgatttcaggtttaattcagacatttgtttctgtgtttaagaataccttcatttcagctatttgacataccttagctatttttcagtaattagttgttttaatttgaaacaatgtttttcattgagtgcttgtttccactaattgcgttggaaggaaaaaactatgtatttatttttgcccttaactggaacttagtccacaattgtagctcttgactggcttagtaacaaatgagatgccatttcctttgtgttcctattctccctatctgtatatccagctattatttttctcttttgctagttcaatactttttttttttttcctatggctagttcaaaagatatcagaaagacctggaattggtctttcacatgaagccttataccagattcagttcatttattagatatttgggtctaaaaataacatgactacttttaaaatctggcctttgccctgggaagaatgagttatttaatgagtttataataacagtgtggtcctatctacccctattaaccctaagaataccttccttggatgtgttcaaagcaggtacaatgttaacttcatattttaggagcactttattataaaatttgttttaactattcttcatgatgaatcacgtctaatttattggtattttataggaaaagtgcgttaaaaagacacacatctaagatttactaaaaacttttcattattacatttaagagtctcattcacttgaaattattgctaattctttgtcattattgtagtgcttactcaaagatgtttcattggaacatatacccagtaaaaattatcttttgatttctagggaggtgcagtatattgtcctacaaaatatagcaactatgtcaattcaaagnnnnnnnnnnnnnnnnnnnnnnnnnnnnnnnnnnnnnnnnnnnnnnnnnnnnnnnnnnnnnnnnnnnnnnnnnnnnnnnnnnnnnnnnnnnnnnnnnnnnnnnnnnnnnnnnnnnnnnnnnnnnnnnnnnnnnnnnnnnnnnnnnnnnnnnnnnnnnnnnnnnnnnnnnnnnnnnnnnnnnnnnnnnnnnnnnnnnnnnnnnnnnnnnnnnnnnnnnnnnnnnnnnnnnnnnnnnnnnnnnnnnnnnnnnnnnnnnnnnnnnnnnnnnnnnnnnnnnnnnnnnnnnnnnnnnnnnnnnnnnnnnnnnnnnnnnnnnnnnnnnnnnnnnnnnnnnnnnnnnnnnnnnnnnnnnnnnnnnnnnnnnnnnnnnnnnnnnnnnnnnnnnnnnnnnnnnnnnnnnnnnnnnnnnnnnnnnnnnnnnnnnnnnnnnnnnnnnnnnnnnnnnnnnnnnnnnnnnnnnnnnnnnnnnnnnctggttcatctcactgggactggttggacagtgggtgcagccccagagggtgagctaaagcagagtggggcgttgcctcacccaggaagcacaagaggtcgggtgatttccctttcctagccacgggaagccgggacagactgtacctggaaaaacgggacactctcacccaaaaactgcgctttcccaaggtcttagcaaccggcagacaaggggattctctcccatgcctggctcagcaggtccaacgcccacagagccttgctcactgctagcgcagcagccttagattgaattgcgaggcagcagcctggcttggggaggggcatccaccattgctgaggcttgagtaggtaaacaaagcggctgggaagcttgaattgggcggagcccaccacagctcagcaaggcctactgcctctatagactccactctgggcaaggcatagctgaacacaaggcagcagacaactgcagacatcagtgtacctgtctgacagctctgaagagagcagtggttctcccagctyggtgtttgagctctgagaacagacagatggcctcctcaagtgagtccctgacccccgtgtagcctaactgggagacacctcccactaggggccgacagacacctcatataggtggttgcccctctgggacgaagcttccagaggaaggaccaggcagcaatatttgctgttctacagtatttgctgtgctgcagcatttgctgtgctgcagcctccgctggtgataaccaggcaaacagggtctggagtggacctccagcaaactccaacagacctgcagctgacgaacctgactgttacaaggaaaactaacaaacagaaaggaatagcatcaacatcaactaaaaggatatccacaccaaaaccccatctctaggtcaccaacatcaaagacsaaaggtagtataaaaccacaaagatagggagaaaccagagcagaaaagctgaaaattctaaagaccagaggacctcttctcctacaaaggattgcagctcctcaccagcaacagaacaacgctggatggagaatgactttgatgagttgacggaagtaggcttcagaaggtcggtagtaacaaacttctccgagcgaaaggagcatgttcaaacccatctcaaggaaggtaaaaaccttgaaaaaaggttagacaaatggctaactagaataaacagtgtagagaacaccttaaatgacctgttggaactgaaaactgtggcacgagagctttgtgacacatgcacaagcttcaatagccgattcgatcaagtggaagaaagtgtatccatgattgaagatcaaattaatgaaaaaagtgagaagacgaggttatagaaaaaagacttaaaagaaatgaacaaagcctccaagaaataacagactgtgggaaaagaccaaatctgcatttgattggtgtacctgaaagtgacggggagaatggaaccaagttggaaaacactctgcaggatatcatccaggagaacttccccaacctaccaaggcaggccaacattcaaattcaagaaatacagagaacaccccaaagatactcctcgagaagagcaaccccaagacacatctcacctgcagggacacacataggctcaaaataaagggatggaggaagatgtaccaaacaaatgcaaagcaaaaaaaaagcaggagttgcaatcctagtctctgataaaatagacttcaaaccaacaaagatcagaaggccattacataatggtaaagggatcaattcaacaagaagagctaactatcctaaatatatatgcacccaatccaggagcacccagattcataaagcaagcccttagagacctacaaagagacttagactcccacacaaaaataatgggagactttaacaccccactgtcaatattagacaaatcaacgagacagaaggttaacaaggatatccaggccttgaactcagctctgcaccaagcagacctaatagacatctacagaaccctccatcccaaatcaacagaatatacattcttctcaggaccacatcacacttattctaaaattgaccacatagttggaagtaaagcactcctcagcaaatgtaaaagaacagaaatcacaacaaactctcacagcacagtgcaatcaaatttagaactcaggctaagaaactcactcaaaactgcacaactgcgtggaaactgaacaacctgttcctgaatgactactgggtaaataacgaaatgaaggcagaaataaagctgttctttgaaaccaatgagaacaaagacacaacataccagaatctctgggacacatttaaagcagtgtgtagagggaaatttatagcactaaatgctcacaagagaaagcagtaaagatctaaaatcgacaccctaacatcacagttaaaagaactagagaaatgagagcaaacacattcaacagctagcagaaggcaagaaataattaagataacgaaatacccttcaataataacgaaatacccttcaaaaacgaaatacccaataacgaaaaacccttcgaaaaatcaatgaatccaggagctggttttttgaaaagatcaacagaattgatagactgctagcaagactaatggagaaaagagagaagaatcaaatagatgcattaaaaaatgataaaggagatatcaccaccaatcccacagaaatataaactaccatcagagaatactataaatacctctatgcaaatcaactagaaaatctagaagaaatggataaattcctggacacgtacacactcccaagactaaacgaggaagaagttgaatctctgaagagaccaataacaggctctgaaattgagataataatagcctaccaaccaataaagtccaggaccagacggattcactgccgaattctaccagaggtacaaagaggagctggtgccattccttctgaaactattccaatcaatagaaaaagagagaatcctccctaactcattttatgaggccagcatcatcctgatactaaagcctggcagagacacacacaaaaaaagaggattttagaccagtatccttgatgaacatagatgcgaaaatcctcaataaaataatggcaaaccgaattcagcagcacatcaaacagcttatccaccacagtcaagatggattcttccctgggatgcaaggctggttcaacatatgcaaatcaataaatgtaatctatcacataaacagaaccaacgacaaaaaccayatgattatctcaatagatgcagaaaaggcctttggcaaaattcaacagcccttcatgctaaaaacacgcaataaactaggtattgatggaatgtatctcaaaataataagagctatttatgacaaacccactgccaatatcatactgaatgggcaaaaactggaaacattccctttgaaaactggcacaagacaattatgccctctctcaccactcctactcaacrtggtgttggcagttctggccagggcaatcaggcaagagaaagaaataacrggtattcaattaggaaaagaggaagtcaaattgtccctgtttgcagatgacatgattgtacatttagaaaaccccatcgtctcagcccaaaatctccttaagttgataaacaacttcagcaaagtgtctcaggataaaaactcaatgtgcraaaatcagaagcattcctatagaccaagaacagacaaacagaaagccaaattaatgagtgaactcccattcacaattgctatgaagagaataaaatacctaggaatccaacttacaagggatgtaaaggacctcttcaaggagaactacaaaccactgctcagtgaaataaaaaaaggacacaaacaagtggaagaacatttcacgctcatggataggaagaattagtatagtggtaatggccatactgcccaaggtaatttatatattcaatgccctccccatcaagctaccaatgacttccttcacagaattggaaaaaactactttaaagttcatnnnnnnnnnnnnnnnnnnnnnnnnnnnnnnnnnnnnnnnnnnnnnnnnnnnnnnnnnnnnnnnnnnnnnnnnnnnnnnnnnnnnnnnnnnnnnnnnnnnnnnnnnnnnnnnnnnnnnnnnnggaaaggattccctatttaataaatggtgctgggaaaactggctagccatatataaaaagctgaaactggatcccttccttacactttatacaaaaaattaattcaagatggattaaagacttaaatgttagagctaaaaccataaaaaccctagaagaaaatctagagaataccattgaggacataggcatgggcaaggacttcatgactaaaacaccaaaagcaatggtaacaaaagccaaaatagacaaatgggatctaattaaactaaagagcttctgcatggcaaaagaaacttccttcagagtgaacaggccacctacagaatgggagaaaaattttgcaatctacccatctgacaaagggctaatatccagaaaaaacaagaaaagagcaaccccatcagaaamtgggcaaagtatatgaacagacacttctcaaaagaagacatctgtgcagtcaacagacacatgaaaaaatgctcatcctcattggtcatcagagaaatgcaaatcaaaaccacaatgaaataccatctcacaccagttagtatggcgatcattaaaaagtcaggaaacaacagrtgctggagaggatgtggagaaatagaaacacttttacactgttggtgggactgtaaactagttcaaccattgtggaagacagtgtggtgattcctcaagaatctagaactaaaaatatcatttgacccagtgatcccattactgagtatatacccaaaggattataaatcatgctactataaagacacatgcacacgtatgtttattgcggcactattcacaatagcaaagacttggaagcaacccagatgtccatcaatgatagactgaattaagaaaatgtggcacatatacaccatggaatactatgcagccattagaaaggatgagttcatgtcttttgcagggacatggatgaagctggcaaccgtcattctcagcaaactgtcacaaggacagaaaaccaaatattgcatgttttcactcataggtgggaagtgaacaatgagaacacttggacacagggccgggaacatcacacaccggggcctgtcaggggtttgtgggctgtgggagggataacatgaggagaaatatctaaagtaaatgacgagttgttgggtgcagcaaaccaacatggcacatgtatacctatgtatcaaacctgcacgttgtgcacatataccctaaaacttaatgtataataatataaataaataaataaataaataaataaataaacttcagggcttggcacagtggctcatgcctgtattgctagcactttgggaggctaaggtgggaggattgcttgaggccaggagttcgacaccagcttcggcaacatagtgagactctgtctctttaaaaaaatcaaaattagccaggcgtggtggccgatgtctgtaatcttagctacttgggaggctgaggtgggcagattgcttgatcccagaaagttgaggctgcagtgagccattgatcatgccactgcactccagcctgagaccctgtctctaactaacttattttagtactgtgtgttttaagtaatacagatatttgaattgagtgttgtgaagaacagaaaggtggagctaattctatgagaggtttagaaaagatgatgtttgggtggatcttaaaagaataatattgtgaatttttttcttggttggcaggttgattgggaggtcgaagggttagagtaggtgaaaaacataattcatgctaacacaagggattatgaaagagcattgttttcaggaagtaataagtatggcatagagtgcagttaggaatataaatctatagtgattaaaatagtgtgatatttagacagaaaagtaagtggaaagagtagaaagcctagaaatgtgcccatacacgcaaaaatgtaccatatagtagaggagatattacaaaccaatgaggaaaggatggactatggactattcaagactgttcaatattagaatgatgtattattcatatgaaaactgagtttaataataaaatctaaattatacccaaattcaaggatattttatcaaaaaaacctggtttataattagcgaaaatgtcaaggtcatataagttaaaagaaagactaagaaactgtttcagaccaaaggagacaacttaatacagtatgtgatattgaactggatccttttattatacatcattgagacagttattgaaacttacgtgcatagtgacaattgtgtgaaagtaatgcatcagtttaatgayctgattttcttcgttgtactgtagtctgtggaacatgtccttgtttataggaaatatacatagaagtttttggggataatgtagcatcagattggcatctatcgtctcaaatcgttcagaaaaacaacagcaacagttctttgtactatacgtgtagctttttcctatgtttgagattgttttttagaagttgtccagctggatgcagtggttcatgcctataatcctaggactttgggaggctgaggcaggaggatcgcttgagcctaggagtttgagaccagcctgagcaacacaacgagactccgtccctacaaaaaaatttaaaataagctgagcttggtggtatgcacctgtagtcccagctacttgggaggctgaggtgggaggattgtttgagccccagaggttgaggctgcagtgagccatgatcataccactgcactccaccctcggtgacagagtaagaccttgtctcaaaaaaaaaaaaaaagaaaaaagaaaaaagttgtctaaaagttaaaatatagttatcaaaataaaattaaaaattaaaagattatctgggaaaaatatttctaatacatgtgtctgaataaatgatttgtactcagaatatgtaaagaactcctcctacagtctttgccttctaattggagcgtttagatcatttgctgttttattttttttgtttttktttttttttcagtaggtttttggtgaacaggtggtgtttggttacatgcataagttctttagtggtgatttctgagatttcggtgcacccgtcacccaagcagtgtacactgtacccaatgtgtagtcttttattcctcaccaccccccaccctttcccctgagcccccaaagtccagtgtattattcttatgtctgtgcatcctcatagcttagctcccacttatgagtgagaacatacgatgtttggttttccattcctgagttacttcacttagaataatagtctccaattctatctagtttctgtgaatgccattattttgttccttttttatagctgagcagtattccatggtgtgtakgtgtgtgtgtgtgtgtgtgtgtgtgtrtatatataacatgttctttatccacatgttgattgatgggcatttgggctggttccatatttttgccattgcaaattgtgctgctataaacgtgygtgcaagtatcttttttgtataatgtcttcttttcctctgggtagatacctactggtgggattgctggatcaaacagtagttctacttttacttttttaaggaatctccacactgttttctttagtggttgtactagtttacgttcccaccaacagtgtaaaagtgttccctttcaccacatccatgctaacatctattattttttgattttttgattatgaccattcttggtggagtgaggtggtttcacactgtggttttgatttgcatttccctaataagtagtgatgttgagcatttttccatgtgcttcttggccgtttgtgtatctttgagaattgtctattcatatcctttgcccactttttggtgggattgtttttttcttgctgatttgtttgtgttctttgtagattctggatattagtcctttgtcagatgtatagactgtgaagattttctcccactctgtgggttgtctgttaactctgctgattatttcttatgctgtgcagaagctttctagtttaattaagtcccatctatttatctttgtttttgttgcatttgttattgggtttgggtcatgaagtctttgcctaagccagcgtctagaagggtttttccgatgttatcttctagaatctttatggtttcaggtcttagatttaagtctttgatccatcttgagttgaattttgtgtaagatgagagatgaggatccagtttcattctactacatgtggcttgccaattatcctggcaccatttgttgaatagggtatcctttccctattttgtgtttctgtttgccttgtcaaagatcagttggctctaagtatttggctttatttaatgtagtttattgatatgaatgtatttatgttcacatcttgatttgcttctgtttgtctcttctatttttttgtgattttcttaagactaaatattttttattagtaaaaattttttttcacaagcccattggagattacacattgtttatatctataaatccagaagagagaattaaaatgtctgagtatttgggatggtagactataggagaacaaatcaaaagaattaattggtatctggaaagcagatgtattaacatggagggcaaattgttttctaactttactaaaagacaaaaagccaaactagcagaattgtttaggttaattagatataaattataagtttgtattgggcagacaattagtgaagatgtagaattctccttttccgaattgttttcaaagaactagtaattgtctaatatctgtttgtggacataagaaggtagactaagttgacctgaagggtataatgccttaccacattggcgacaatatgatttgtgtgtgtgtgtgtgtgtgtgtgtgtgtgtgtgtgtgtgtgtgtgtgtgtgacagagtttcagtcttgtttcccaggctggagtgcaatggcgcgatctcggctcactgcaacctctgcctcctgggttccagcaattctcctgytcactgcaacctctgcctcctgggttccagcaattctcctgcctcagcctcccaagtagctggaattacaggcatgcaccaccatgcaccaccatgcccggctaattttgtatttttagtagagacagggtttctccatgttggtcaggctggtcttgcactcccagcctcaggtgatccgccygcctcggcttcccaaagtgctgggattacaggcatgagccactgtgcccggctgacaatgtgatttttaaaagtagaaataaactttcaattaaatgyctgtactctattaaattcatcttgctacctttgttttaaaatgtttactttctcttttctctactatagcttgaaattttgacaaacttggcaaatgaagccaacatatcaactcttcttcgagaatttcaggtttgtgtacagtgctaattataaaaaacttctaaaacatatgttcagtcttaaatatgcatctttttctatctagaaatatgtaattatgtacataaaatagtgattgggacaagactgacaactaagaaattcataaatttgcaagaataaactaattacaatttataatttaaggaaaacatagtattctctttcatattttcatagactttgaaggactttggtgttataactctgtctttgtttgaaattgtatttctggtaagaatttcatctttttgtgctgccagcatcaatagtcctttctatattctgtggtcatgaaaacggtttcatttcttacctggttgttcccattttattgacctatgactatttttgacactgcccccttagcctcatatatagctcaaaaaaatttgtttcataattgccccactacgattttttaaattgctgttttttattttgatttgtttagttgtatttttatgccttatgagactcttcctagctgcatttccccccaaaatattattcaaaaattacttcatggacatgataccctttatgatggaaaggtcatctctgaagccttagttgtagagcacagcaatagaaaactttacatcagtattatgacttttatattccactatctgttttcttaacaaaaatataccacatactatgcactaatcacagagtttttcttttatcagcttccaacttttagagatgtattttttgccatagttctcctatatgccaatattaaatttcttcttggttataagacactgtatacacgatttctttttagctatgtgatttttaaactttttacaggaatagtagaataatatggcatgtccataatttatattttcatacctggattactccacttttatgttgtgtatctttctagacaaatttcttaaaaaattaagatgttctagaaaatatactattttatgttattattcagtaatcttatagctgcagatcattgcttgaatctgattttcacttcattcctataattttatttatttaaagtattggtctttgtgttttttcttgttcctttcctgttgtcctatctagtctctttgggtgtcctctcactgtccagtttttgcttatatcaagtctcctgggattgtaggaaaggagacttaggtaatgttatggaatgggttgtatagagggcacatactagacctgtttcaaaatattggtcatctagtcttttcatttaatatcaggatgtttaataaggtccatttttcagtcaaacttttaagtatttttttcatgtattcatttttatcactgtctaaatttgtaccttctgtctatgtttgtgttatgctcatagttacgcttttagtaactttttgggtaaaatagggaatgtttctaaagactcataagttcatatttttctttaaggaaattaaataatttatttgggaacacttttaaatataattggtcttgccttcatggaactaggagagtttaattaatttaatttatttgttcaatgtttaatcacctggttggtaccatttttagcaaatttgtatttttttagacatctttaggttttctcctccatttgtcatttagacaccacttaaatgtattgcatttttcatagtggtaagtctacattggatacttnnnnnnnnnnnnnnnnnnnnnnnnnnnnnnnnnnnnnnnnnnnnnnnnnnnnnnnnnnnnnnnnnnnnnnnnnnnnnnnnnnnnnnnnnnnnnnnnnnnnnnnnnnnnnnnnnnnnnnnnnnnnnnnnnnnnnnnnnnnnnnnnnnnnnnnnnnnnnnnnnnnnnnnnnnnnnnnnnnnnnnnnnnnnnnnnnnnnnnnnnnnnnnnnnnnnnnnnnnnnnnnnnnnnnnnnnnnnnnnnnnnnnnnnnnnnnnnnnnnnnnnnnnnnnnnnnnnnnnnnnnnnnnnnnnnnnnnnnnnnnnnnnnnnnnnnnnnnnnnnnnnnnnnnnnnnnnnnnnnnnnnnnnnnnnnnnnnnnnnnnnnnnnnnnnnnnnnnnnnnnnnnnnnnnnnnnnnnnnnnnnnnnnnnnnnnnnnnnntgtctctgaaaaagtgaccctttttttctagattcacagatgctgctggtaaatgaactgaaacctccaaagagagagctctcatcatctctttcaaccttgcacttaaactaattgctgtctttgggtgactgctcctactatctgttttggagtctcaagccactatggccacaggtgaatgagcctggcttgaaaatgtgcttcgtccataggcacattctttaagtaaaaaaatcaaaacaaaatgaaattaatctacatcatcacttggtcctcatattgtgcttatgagaagtttatgtattctggaattcttatatattgacaaagtttaatayaatcggagttttggttaactcaataataccagtgtgtaaactaattgaaataatatcttttagacctatgtgaaaagccaggataaacaatttgcagcagccactattcagactataggcagatgtgcaaccaacatcttggaagtcactgacacgtgcctcaatggcttggtctgtctgctgtccaacagggatggtaagtttacagtttcattttattttcaggtgatttaaatttgaatattcttggtattatttccaagttgtaaccttttctaactttgcattttagcttttccagttatatcagtagtatggtcacaataagtagcattttatccttgaatgcacataaatatgcatattctgggttcttttttttttagtaaaataggccattaactagcaggtagtatttgttttaccgcaacagatctaagaaaatttgttttacttctttacaatttaatcaccttgattgtatcttttccacctttttactgcattttaatggcatgtaagtcatgcataatattggttcacctgcagagggtgctaaaagcaggcaaatgactataacatggagaagtggctagatcaaaaaatatgttaactgtataccttcaacattctttttcctcagaaattcacctaattatattcaaaattaactagatttaaaagccatmaacttggagcagctttgtgtttttaagccaaacaatatctaagtgttcggtaaaactggataggtaatatccagtaaaatatgtaagctagatcccatattgttctgtggcaaagcgtcagttatttctatgggtaaggctttgaaataaatggagccatttagagaaagaaagaaaagccaactttacctttaaaataattttgtttaaagaacttttattataattatgtattaaaatgagacttttttaagaaaagcataattttctttgtaaaatcattgaaattattttgtggaatttaaaatatactaatgtctatgtcatgtctagatatgggcatatatgatatagcagcccatgaggtaaaacaacaaaattgattacattttatttgaaaaataactttttagtacaagaatcctataatctctaattattttttcccacatgtagatatctttagaaaactgtaacattgttgagagtatttctgatgaaaaaaattggaacaaaatttattcccagataacattgatttttgttgtgagcataaaattttaaacttgtacctgtaaactcaagatactatgactgaagatttttctacatgtagtattaaaactccaaataaatgccaaccaaaattatcaagacgataggtttaaaatttttttttatctctacaaagtagctagtggagataggatgataaacgtcatccattctatctctttctacttttaataataactaatccttttatctctgtttctatgtcacattttaaaatgtgacattaaaaatgtgttttaaagaaattttcctgtgcctttaataatgactttctattcaaccaaataaaatacacaccttgggaaaataactttgtaccattaaagattatgaaccaaggcttaccagggcaattgttcttttacattttagttacatacagaaagcaccggaaattagttagaacactgattagttcattcaaatacaaaatatattcaaattttctcaattttattttttgactttttttttctaatggaaaatttcaagctttggattttaaagcagttatttctgcttcagatttaatttctcaaaaaatatttttattgactttaaaagataaatattctacccctacatcacttttaagggaagactagattgttttacaattagaaaatgaaagactaatacatacttcctctctaaaagtagaaggatttagtttaactactttaaattttgatattttaatggttaggcttttgttttttgatacaactcttaatcatggttttttttttcctgcagtgtgaatattaacaaacttaaattgtattgtcagattatatttgcataatcatcattagcccataatacctgattaattatgtctgtatcacatatgctacactattttttgtagtttggaagtctggctcagtaaaagtgagaggtaaaacaaataaggagaatatttatatcaaaattagtaacataaaagaaagtcatagtatttttaactttaacatagccaccctgacaatagagccccttcctctttgtattaaaagatctacttttaggaataaatactgtgaatgaagactcagtttctttaaaatctgttaagatcttttaaggctctaggaatctgtaattatttgattttatattgaaatgaatacctcatcatctgttcaaataatgaatctttaaacctcagggacatttaggctcaattgtttttaaatatgtttaatatatttctcttggacctctagttttgtgtgtgtgttgttaagagcctttctaagcagacttgaagcttgccctaaaacagcctattattactctctaagattaatttgataagccaatttcttatagacctttagtaagagaaatctacatttcagttgacttaggtaatttattttaggtaacatattagcgaaatttacttttttgaataaccttattgccatctactctaaactaaaaggattggggcagaagactttgttttgtttagttttaaacaattcagtaagcatttattgaagacttaaatcagttgagatgtttaataaatgttgaatatattaataggatatttatttaacttataaaaggttcctatctttatagagctaatagtccattggagggagatagtaatataagacaaatatattatagtcttcccatatagtgaccacttactctcttgccagctatttgcttacatgtaggactataccacctatgtagaatgttacagctatcctgagtaaattacccagtctacctgtgcaccagattcttcatttgtaaaatgagtatgatagtagactgtactttttaaagttaggtccattaagatttgttgaggacaaggaggaagttaggaaatatctagaacataggatcattttgtgcttctgatagagtagcaccaaagtgctgaggtctttggaaaccaagaggtaccataaaggagaagtagagtggaattacctgaggggaatgagaaggcacttgtggtaggcagaattattgcgttccaaagatgcccagaacctgtgaatatgttaccttacgtggaaaaagagacttcgcagattgattaagtcaagtttctatagatggggagattatgtggttagacctaatgttatcatgtgggtctttataagggaaagagagacgcaggtcagtcagaagatgtcagaaggtcagggtgatgtgattgttggaagaggtctttgaaccaaggaatgtgggcatgcttgagaagttgggagggggaaggaaaagatttcccctagaacttccagagggaacgcagccctgttgagagcttgatgttagtcccataagacctatgttagacttctgactttagaactgtacaatgataaatttgcattgttttaagccactatgtttttagtaatctgtgacagcaacaataggaaactaatgtagttcctaaagataaatgatgccaaacgcatatttcaactgtagccaatcctgcgtctgcttgtagataattaaattatgcaacatttttttctcttacttaggctagttttgcaataatgtattttaaaaatataaatttgttatactatgcattctttaaaaccacacttaccaaattttgctttgcatagtaatcacataaccatttatttttctgctagagtgtaagtttgatgagggcagaatctcattctgatttacctttgctttcctcatagcaccaagaggtagtctttatagaagtaatacttgcctatgggtgggcgcggtggctcacgcctgtagtcccagcatttgggaggccaaggcgggtggatcacctgaggtcaggagttcaagaccagcctgcccaacatggcgaaaccccatctctactaaaaatacaaaaaattagctgggcgtggtggcgggcacctgtaatcccagctgcttgggaggctgaggcaggagaatcgcttgaaccccggaagtggaggttgcagtgagccgagattgcgccactgcactccagcctcagcgacaagagcaaaacatctcaaaaaaaaaaaaagaagtaatacctgcctatcgtaacatagaacgtatatagatagaatgtacatcctagttctgagtttgaattctgggtaaagttatacaattccagtgcatctccctttcttcatctttaaaataataataataaggtacctactttacattattgtgagaaggaaatgaaatgtgatgttgttttgtaaactgaagcattaatattagttagcttttagttaaatcatactaggtttttttttgttttttcttttctcactctgtcacccaggctggagtatagtgttgtgatcacggctcactgaagcctcaaccttccttggcccaggtgattctcctgcttcagcctcctgaatagctggtactataggcacgtgccacaactcctggctaatttttggattttttgtagacctggggttttccatgttgcccaggctggtctcaaactcctgggatcaagccatcctcctgcctcggcctccgaaagtgctgagccactgtgcccagtcaatattagttaatttcttattcttatggataagcaggtaaacagtttgaaatacatatatttactaatgattagaatgatgaattttgtttatattcttaaacggagctttataaaaaatacatttcagtgaaaaagagtaggccgggcatggtggctcacrccggtaatcccagcactttgggaggccaaggcgggtggatcatgaggttaggagtttgagaccagcctgaccaatatggtcaaaccccgtctctactaaaaatacaaaaattagccaggcgtggtggcgcgcgcctgtaaatcccagctactcaggaggctgtggcaggagaactgcttgaatctgggaggtggaagttgcagtgagctgagattgcgccatggtactccagcctgggccacagaacaagactctgtctcaaaaaaaaagagtaataggacacaaattatggtatttctaatataatattaaaataaacctttgtagtgtatgccaggggaattcctaatagccatgaagccctattaataaaaatatcaaaataataagtaaaggcaatgttgatttatttctttggcatcattagcattaataacacattatataagattcatttcataaggtcaggttctcaggtgagttatgttacgtttctttaccagtaccaccaaaaagagactggaccagtgattggccagtttagtatgataactaaatcccgtaatcccagtttgaggatctacttcctatccacctccagtagtagttactgtattagttaaggctctggcaagaaacagatggcacacttaaaagggatgattgaagtgaattaagtgaatgaactgtttgtaaactgtggtcaggattaagggaaaccaacaagatatgatgtaacaccctggagctaacaggctatcaacagtgggaggcctttaccatgcctcagattgaagggaaggggtgtgaggagcaggagcagttaccagaccctgcaggagtgagccacttgcagtaccttcagtaggggattgcatgtaataccagggagaggaggctggcagagtagggatccaggataacaaatatccccgccctccccccaccatctcctgctgaagctttctattgactaaacacagctataagccaggaccaagggagtctggttgaggcagactacaggtgggcctcttagggcacagtgctggggagagaaaggtagagtggactttatagaacaaatagagaaaatccatctcactctcacaatcccattctttccggctttgcactccatgctatttctacagtgacttctttactactaccactcatctttactactcacttttctgggcatttcacttaaggaaaaattttttttttagtttgctgttttctgcagaatagggaaaatgttgtttagattgtagataattgatttccactatataatttataggaatcaaagagcaatatttgaggactctggttaaaagccaaagacatagaacactatggtgagcagcataatccaacgtcttttgctttcttaatctaaagatgcagagataagaaaggaactacagaagctaggagacagcaacagaggttagaaattaaagttaactctcctagttaagacagttgttcacacctcaaatttggaagcgcactcatggttatgctttcacatagtcttttaaggcttgtattaaatagaatgtttttctaatttaagtttacattttaygaagcayattgcatttgaattgaattatacatatttagtatgaatratttctatctttttcagaaatagttgttgctgaaagtgtggttgttataaagaaattactgcaaatgcaacctgcacaacatggtgaaattattaaacatatggccaaactcctggacagtatcactgtgagtatcaattaagagatgtttgctgaattttattcagtaagttgtaattttgttaaaataaatggtcagcctaaagggtaatggttaggagagctgaagtgtctggattccaattctgagattctaagatttcttgctgttataggagggaattacaaatctgaataggggaaaggatagaatgagcctcgtggtattagattggaattggagatagcagtgtgagttttatatatcaacagctagatgttgggtgagtatatatgcatgttcatgtgtcatacatgaaatgaatatacaaacatctgtttcccagagctgtcctttgagaggagttagaaacaataccattgagcacactttgtgcacagattttgtttttttaattgagatattattttatactataaaatttactcttttgaagtgtatcattggtttttgatcacttataagttgtgcaatcaccagtatgtaattgcaggacattttcatcaccccttaaaaaaaaatccataactgagactgcccagtctcccttcactctataccctggccactactaatctacttttttttatctttatggatttgccttttctggacaatatgtagccttttgtttctggcatctttcacttagcatgttttcaaggtttgtgtatgttttcgaatatagtacttcattcctttatatggtagatcttagtttttaaacacaaatcttgaagagtggagcaagatggccaaatagagggctgcaatgattgtcacccctgcaagaacacgaaattttagcaactaattacacacaaaaaagcaccatcataaccaaaaatcaggtgggcactcacagtatctggttttaacttcatattgctgaaagaggcactgaagagggtaggaaagacagtcttgaattgccggtgtcaccgctttctcatcccctggcagcagcagtgtggcatggagaatctctgcactagggggagggagagcacagggattgggaagagaacaagagaacaagagtctctgcctggtaatctagagagttctcccagatttatccaaggcagtacctctaccagtctgcaagaaccacatcattattgggcttgaggcccaagtccctttgaataacctggaaagccttcccaaatacaataagcacaaacaagcccagactgtgaagactacaataaatacctaacttcaatgcccagagactgatgaacatctgtaagcatsaagaccatccaggaaaatatggcctcaccaaacaaactacataaggcgtcaggggccaatactagagaaacagagagatacgtgacccttcagacagagaattcaaaatagctgtcttgagaaaactcaaagaaattcaagataacacagagaaggaatttagaattctatctgataaatttaacagatattgaaatagtaaaaaagaatcaagcagaaattctagagttgaaaaatgcaattgatatactgaagattgcatcagagtctcttagtggcagaattgatcaagaagaagaattagtgagcttgaagacaggctctttgaaaatacacagtcagaggagacaaaagaaaaaagaatataaaagaatgaagcacagctataagatctagaaaatagtctcaaaagggcaaatctaagagatattggtgttacagaggaagtagagaaaggggcagggatggaaagtttattcagagaaataatatcagagaactcccaaacctagagaaagatgtcagcattgaagtacaagaaggttatagaacttcaagcagatttaacccaaagaagcctacctcgagacatttaataatcagactcccaaaggtcaaggatgggaaaggatcctaaaagcggcaagagaaaagaaacaacatgcaattgaagtctgatacctgtggcagcagacttttcagtggaaactttacaggccaggggagagtggcatgacataaagtgccaaaagaaaacaacttttaccctagaatagtatatccagtgaaaatatccttcaaatatgaaggagaaataaagactttcccagacaaacaaaagctgagggagggattttgtcagcaacagacctgtcttttcttgtaagaaatgctaaaaggagctcttcaatctgaaagaaaaggatggtagtaagcaggaagaaatcattcaaaggcacaaaattcactggtaatagtatgtacacagaaaagcagaatattgtaacactagaattgtggtgtatgaagtactcatgtcttgaatagaaagactaaaacgtgaactgattaaacataactatgacaacttttcaagacatggacagtacaatatgatataagtagaaacaacaaaaagtgaaaaagcagggtagaacttttattagtttcctttttgcttgattgtgtatgcaatcagtgttgtcatcagtttaaaataatggattatattaataagatagtatttgcaagcttcattgtaacctctaatctaaaaacgtaaagtggatacacaaaatataaaaaacaagaaattaaatcctaccactagagaaaaccacctgcattaaaaggaaaacaggaagaaaggatggaaggaagagaagaatgtgaaacaaccagaaaacaaataacaaaatggcaggagtgagtccttacttatcaataataacattgaatgtaaatggactaaactctccaatcaaaagacagagttactgcatgtataaaaaatcaagacctaatgatctggtgcctacaagaagcacacttcacctataatgatagacatagactgaaaaaaaaaagggatggaaaaagacattccatgctggtagaaaccaaaaaagagcaggtgttgctatacttacatcagacaaaatgtctgtctcttcctacacttataaaagacaaaaagtgtaggaagagacaaggtcattatttaatgataaagagtcaattcagcaagaggatataatgactttaaatatatatgcactcaacactggagcacccagatatataaagcaaatgttactagagctaaagacaaaggtagacctcaatacaataatagctggagatttcaacactccactttcagcattggacagatcttccagacagaataccaacaaagaaacattggacttaatttgtgctatgcaccaaatggatctaatagatatatacagaaaatgtcatccaagagctgcagaatacacattctttttatcagcacatggatcattcttaaggatagagcatatgttaggtcacaaaacaagtcttaaaacattgaaaaaaataataccaagtatcttctctgaccagagtggaataaaactagaaaatctaaannnnnnnnnnnnnnnnnnnnctcctgaatgaccaatgggtcaatgaagaaattaagaaggacattgaaaaatttcttgaaacatgtgatgatggaaacacaacatactaaaacctaagggatataacaaaagcagtactcaaggggaggtttatagctttaagagcctacatcaaaaaagaagaaaaacttcaaataaataataaataacttaatgatgtatcttaactagaaaagcaagaacaaaccaaacccataattagtagaagaaataaaaatcagagcagaaatgaaatcagagatgaaaaaggagatattataactgatactgcagaaattcaaaggatcattagtggctactataagcaactatatgccagtaagttggataatctagaggaaatggaaaacttcctagacacacacaacctcccaagattgaactgtgaagaaatccagtatctgaacagaccaaaaacaagtaacaagattgaaaccataataaaagttctcccagtgaagaaaagcccaggatccgatggcttcactgctgaattctaccaaacatttaaagaagaactaataccaagtgctactgaaactattccaannnnnnnnnnnnnnnnnnnnnnnnnnnnnnnnnnnnnnnnnnnnnnnnnnnnnnnnnnnnnnnnnnnnnnnnnnnnnnnnnnnnnnnnnnnnnnnnnnnnnnnnnnnnnnnnnnnnnnnnnnnnnnnnnnnnnnnnnnnnnnnnnnnnnacatttaaaaaatcattcgtcatgaccatgagatttatcccagggttaccaggatggttcaacattcataaatcaatcagtgtgattcatcatatcaacagaatgagggacaaaaaacatatgatgatttcaattgatgctgaaatagcatttgataaaattcagcgtcctttcctgataaaaaccctcaaaactggggatagaaggaacatacctcaatataataaaagccatatgtgacagacccacagttagtatcatactgaatggggaaaatcttagcctttcatccaagctctgaaacataacaaggatgtccactgttattcaacacagtactggaagtcctacctcaagcgttcagacaagagaaagttataaaggcatccacattggaaaggaagaagtcaaattatccttgtttgcagatgatattatcttatatttggaggtattttggggtataagagcattcctacaacttacctttattggttaagaaaacaaaatgtgaccaggtgtggtggctcacgcctgtaatcctaactaacactttgggaggccaaggcgggtggatcacctgaggtcaggagtttgagaccagcctggccaacatggtaaaacctcgtttcttctaaaaatacaaaaattagctgggcgtggtggtgtgtgcctgtaatcccagctacctgggaggctgaagcaggagaatcggtggaacatgggaggtggaggctacagtgaactgagattgtgccactgcactccagtctgggtgacagagcgagactctgtctcaaaaaaataaataaataaaaataaaaaataaaattatatgtttacctggagagatagctaacacaaatgcagtaaaatgttaacatttggggaatctaagtgcagggtatccagaattttttttactcttcttgtaagtctgaaattatgtaaaaaaaaaataaataaataaagcaataaatattagttccaactccatcacttaccagctccgtccttatgttaaagtctttatgcctcacttttcccatgtgtcaaatgatgatcgtaaaaggacctacaatatagtattattataggtattagcttagttaatatggtaatgcccttggaacgctggctggcacatagtagtgctgcattatgtgtttgtcattctatcttcatgctcttcttccctttaaaaccaaagtttttgaaagaactatctgcaacaagttttattcctttacgtcaaactccctccccgtcacagttggattttggttctccagcacttcattaactatgccttttccaaggttactatctcctttctaaatccagtggatacttttctgtccctatcttccttgatcttttcttagcattggactacgctaactacttcgtcctttttgaaatagtctcctcatggcttctgtgatttttctcttctggtttttcttcaaactcttcagctatttcttctccattgtgtttgctttttactatgcctttttcttgagtgctggttaatgttttgccaagtgatgttctataataaatgcagatgtagtttagggaggagtatattatttccttttttgaagatgggttaatctgtattctcattctcttcagagggatcatttttgtgtagtcaagggtaatggatcacaagatttagaacctgccagtcaagaccaattttaaatatctctggtggcaaaattgtctttcccttagggtgttagtaaagcttgcaaggcagttacacatttatcttaaagctaaaaaaaaaaaaaagtatggcttacaggagtcatttagcatctgaacttccaccccatctctcagcggagagttactttgtattcatatctgttcttactgttgattctaatgatcaaagccaagacttctcatagagattgtgtatgagagatgtaggggttaagagagtaatttgaaaaccggatgacttggattcacagttggtctgtaccttttactagcttcatgaacttaagcaagttacttgacttcactatgctccagttttctcatctgtacaatggggatcatagtactgacaaccttagagctctgttgggtggaatgaatgagtcaatgcatgtgaagcacttagaacagtgctcggtgtaagctgttattaagggaatattgagtgttttttgaagaagacagactatggtaaggttttaattttgtaagctttcttattgcctcttttatattttacttatttaaaataactcctatagagcatatcatttgccaggcactattctaagtaccttaaaaatataaattattaatttttaatagcaacacttcaaggaaagttctcttaatattcctattttatatttgagaaaactgaggcacaaagaggttatgtaacttgcccaaggtcacatagcagcaggtctgctttcttaaccagtgcattatgttgtatctcacttccatttataatctatctgtttaaaaatttcactttatttaacaaatatttaaattgtcaccggtcctttttctgtattcagttcacatacctactcagtgacctagccaaggttttttttattatttccttttgcttccctcaagtcattgacaaattgggaattagagtgacatgatcaatgtctaccgcagtgtagaacagatgtttgacattactttgatgggaaatgagaggttaagctttttttctcaaagccgccgaaatggacatctagcattcctatccaccaagcatcaaaattcagtcgtgtctctagtcattgtaacactgctcatatttagttacttcctacgaagtgatacagcccccaggaagaaccacttgtctaaccaatagctaatgaactagcacagagaactctagatggaagaagacaaagaagagagatatataggtgactgtatatttacacatgattatgaggttggtgcaraaataattgtggtttttaccacaatggcaaaaacctcaattcctttgcaccaacctaataaatgtatagcaatagactaggaatgtctaaccaaagtgctaaatttgaactcttgataaagaagggggcatannnnnnnnnnnnnnnnnnnnnnnnnnnnnnnnnnnnnnnnnnnnnnnnnnnnnnnnnnnnnnnnnnnnnnnnnnnnnnnnnnnnnnnnnnnnnnnnnnnnnnnnnnnnnnnnnnnnnnnnnnnnnnnnnnnnnnnnnnnnnnnnnnnnnnnnnnnnnnnnnnnnnnnnnnnnnnnnnnnnnnnnnnnnnnnnnnnnnnnnnnnnnnnnnnnnnnnnnnnnnnnnnnnnnnnnnnnnnnnnnnnnnnnnnnnnnnnnnnnnnnnnnnnnnnnnnnnnnnnnnnnnnnnnnnnnnnnnnnnnnnnnnnnnnnnnnnnnnnnnnnnnnnnnnnnnnnnnnnnnnnnnnnnnnnnnnnnnnnnnnnnnnnnnnnnnnnnnnnnnnnnnnnnnnnnnnnnnnnnnnnnnnnnnnnnnnaacttgggctagtaaactcgttctggtcctgtttagaaaggaagaggcaattataagtactagggcttcaggagagtgcagctgctatacataaaacctgtaacagtgtatgaggcctgtatctggcaaaccctaggctttcttggaagaaaactttcttctatttgagtatattcatgtccagggatacagaagatactttygatgtgtaaactttctttttctcgctcattctctctctttccctttttttttttaatggagtcttgctctgtcaccctggctggagtgcagtggcgcaatctcatctcactgcaacctccacctcccaggttcaagtgattctcctgcctcagcctctgagtagttgggattacaggcatgcgccaccgtgcctggataatttttgtgtttttagtagagatggggtttccccatgttgaccacgctggtctcaaactcctgacctcaggtgatctcaccccagcctcccgaagtgctgggattacaggcgtgagccatggcacctggctgatgcatcaactttctcaacagttgctggactataagccaaataagtacagtcttacagctctatatagcaaagcttatttttttcagcttttgtttttctcagaagataaccattaatagatacaaaaatatggtgagaattcagtattcacaaaggaaaataaaggaacaaatagcagttttacaaagccagaaaaaaawtaagaaagaaagaaaacaaatgtaaaataaataataagtatttaaaagtaataaagatggaagaaataaaatcaaatatttctcatcttgaatatgaatggactgaattttctcatcaaaagacagacttacaaattggaataaaaacaaaaactagctacaggccatttatagttaaagcaccttaatcaagtgataaaagttgaaaataagaaggtaaggaaagagatattaagcaaatatgaacaagaaagtgagatttacagttaattaaaagcatttaacaagataaaaaggaacattataaaatgaaaaaagggtaatttgtaaagaaagtaataagcacaaacctatttgcacaaaaaatatggcaaccaaataaatatgtaaaggaaaaatctattcaaaatgtgaggagaaattgataaaatagttacaatgtgtgactgtaatgtatttctctcatattagatattyctagtagacagatataagtaagaaaattaagtaatcaaaaacttatttagtaaatatagctaaaaccttatatctcttgaacagataatacccacttttaggagtatakccagtgaatattttcaaaaaatcaagaatgtatttaggcataaaggaagcttaaagattttgcattctttgaccttaagcaatgaaatgagacttaaataatttaaaagggtaccagaccagttgtaaagtaagaaatgtactttcagattaaagaatgcatttaaagaagaaatgcaaacttttttctaaaacccaggaaataaaatgctttatttcaaaacatgtaggacatggctaaagttataaagatcaccatttttaaagtatagggatataaaataaaagaaaaacgaatcaaaacagaagagggatcaatgctgattttgtaaaatagaatacaaaaaatatatatgagttgaaaagtacatgttaaatctggtcttttggaaagaaaataaaacaaaattcccttctaattattatgaagcagagagaggtaacaaaagtagacaaatctggaatatgataataaaagaaattaaaatacaagaaagctgtatggaattctacagcacacatttgaacttaaggagaatgaaaagctgataattagttgttactgctcatctaacgtatctgaggaaactgaagtgcttgaaggtgggacaagcaaggaagaatcaaaacaatttgttgtgcagaaccctcaaaatggtcaaccacaagttaccccaggagaaggtgatgagggatgtagcagacataacttcaaagtcaggaaagaagaatgattgaatccccagaatctctctgttccagtcaggagagctgtttatacaagaacaatggccatgtggaaataaaagcagtgttttattaatccgaccaagtacctgataactcctaaacgtaggcaagtgattttaaaatgtgagccttaaaataagagccttaaatgagacttctgtcctcctgaatctctacctatttcaccatcaaacccaggagtgtcattctaaaacactgcaattttaggaaaagccagtctgtccaatatctaaggacaatgggtcaatattgagcatgttttcyttcagtgcytgagccactttattagggcagaatcctgggtccatctttcttctggaaggagagagaacagaagtgatagcaagacctcttcccacctggccaccttacctatccttaaaagaagaggtgaaagaagtgggaaaatgtcccactatacacgggtgtgggaacaggcaagaggatggcctgggtctgccctgaaaatctggctcttggggaaatggcaggaggcactaagggagccattgcacaatgtggcagacaaacagaggatgaaggaataatccttcatctgattaataagtaaatatgaccccagtgaggtgaagttaattgcctccttgatgtaacaccatcagtgtgggatcagaaccggtctcaacagcttgctgaccagtattcttcctagtttaccacactcattttgtcgctacccagtgatccagtatgaattttgkattcagatttggagttctgatcctagttccaccactaaccagctgtgagatgtgggcaagtttcttaactcatttgttacctagtttcctcatatgtctagtgcagatcatagtagagcatacttcatagggctttggcgatgaatgactgagaaaatacgtaaagctctcaaaaacagtgcatggcacatggtaagagctcaatagatattagctatgtaatttgttttaaaaagagaacatagattttatcatattgagggctttgttttaattggttatttagtaataattgaaaatataaaaactaaagtttaaatgtattttacattttgaattyggtcaaatcaaatagatttatgtctgtaatacagtcaacttacatgttctgattgtgagtattctgtcctttggcgtatccttcatttatgataaatactggttttggagttcttctagaataaaatgcatactatcagctggcatggtggctcatgcctgtaatcccagaactttgggaggctgaggcgggaggattgcttgagcccaggagtttgaggttgtagtgagcaatgattgcaccaccgcactccagcctggatgacagagtaagaccctgtctttaaaaaacaacaacaacaamaaaacaacccrtactacctgtggattgctctgacaggatttcacataatgtttaatgggacagatgggatttcatatcttaacaactgaaagatgttattctgtaaaaactgagtaatattgaaatagcactttgtatccttgttgcccagatgcctcacaggatgcctgccatttcacaagttacccaccctttctctggcaccccattgtaattcaggcttaggctttaatgcatattgagtccagatacagagtattagatctgatttgctgttggtatgcagtttgcttagatgtctactgattttgcctttgacaratttaaataaatgaaattgatgtttttgtagggtttactttggactgttgcactgtgcagtgggctggtgttgaaacacaatagcttttaaattgaactgcttacagagtgatctgcaaaatctttctagatgtctttctatagctgctgtggtgagctaggaatcattatttgtttttgctggcaaattaatgggttgtggtggccgtggaaactgccttctagtacaaggtttgaaaagtgcatttaatcactttctcagggcatttagaataaagaatcaggcaaagtcatttacaatccaatttgtctttgagaatattgaaaagcagagcttcataatgaaagtattatatcatatgtatgactctgtgtgtgtgtctgtacctgtgtctgtgtctgtgtgtgtattattagtttggttttatttcagtgttcctatttattttgtggttaaaaagaccatggggaacaaaaagtgactaatttacttttcttttttttttgagacagagtctcgctctgtcacccaggctggagtgcagtggcacaatcttagctcactgcaacctctgcctcctgagttcaagtgattcttttaccttagcctcccaagtagctggaattacaggagtgtgccaggctaattttgtatatttagtagagacagggtatcaccatgttggccaggctggtctcaaactcctgtcctcaagtgatccacccgcctcagcctcccaaagtgctgggattttaggcatgagccactgtgcctggcctctaaaaagtgactaattttcttacttgcctttttttcaggtgcttcaaatctttgaaagtagtggctgtgaattcatagtgtcaatggtgtataaatgagagtcctgttgcttaatgggaagagaaagggaaagctggaatccaaaaatcttagtattctgatcccatccacctgctcaaaaatgttgtctttgtcagtttcctaagctttgtaatacaatgccatcaccaaaagtttggtatatttatattgatattatttcttgtggtgaagttttctaagttttaaaaattcttggggattttattagctcagttctagaaaactacaaatcttattctcaccaccatcttgagatttttattgtgagcattgtgatttattgatttttaattttttcaaagagttgtattttaaatatatgtatcgtgagtgtttacagtattccaatattttaattttaattttagtatattcatgaatataaacaatctctttaaacattacttgtttttgggatcgtctttttaattgcaaaagattgttaccagaagaaaattacttaaaatgggataatagattatggtatgtcatagaattctgatttttatactagcaatatataataaaatatttaagaaaaataaatctagcataactgaaatttgaagttgcacatatattcttatttagaactacctttcattatggcaggcaacttgaattcctctatactggaaaatttaatgtaccactcaattactattctttagcccaatttaaaataatagattgggagtaaggtcttaatgcagtgtaacctttggaacgttagaaataacctcttttctttccagaaatcagtatrcagtaagggcatcagttttatcacactgcatgaatagatttttaatagcacttagacctttttctaattgcacaagtatatggatttcttstgtctcaccaaacatgctaaataataatttaaagacatgctgttacactgttttaaaatatatacctttttatttaaaagcttttttgatcatctcattctgattctagtgaaggactcaatattgtaacttaatatttttatataatttcataatgtgggtgttttgaaagattttgcaatggtagatattgtgataaaattttagctatggaaaggtccttattctcacttttttctttaacaatcctactatgtatagccatgaaactacagaaaatattaggactttgagaaattgtaaaaggacttcataaaaagaacattatctttcctcgtgatgccaccttttaatgatagctgtcagccttttcacttattataaaaaacaaattttctgtgcgaggtgaaaatgttcactgaaatgaatttacacaccctctcaaattccttttggaataggggaggatgcaaataagcaaatagtaataaaactaatttgcatactctaaattgttggtcttaatggtactgatggaaggtttccaatttgtcacaaagcagtgacttttaagaacataaattatattgaaatgcagtttatttaaaaatatagtgccaaaatgcaatattggacaaatttatccctgtttcttttgttgaccaaataatagactgggattcatgattttataagcagaccttgatgatcttatcagtttgatatrtttccagtgttgtagatgctaatacataaagagcaaaaacagttttgatttggaatcatagtacctaattgatctgtttctttttctgtattatctgtgggttctcaaatgggctttgtggaccacctgtctcaggagtcatctgtgatgctttttaaattaaaacatagatttctgggccccaccacagaaatactattttggagctgatcccaggacctgtctttttagtaagaaccctggatgatttttgtgggcattgaggtttgggaactgctgttctagagcaggggtcagcaaaccatttctataaattgctagacagtcaatatttttggctttgaggaccatatggtcttcactgtaactatttctgccattatagcacaaaagcagcaacagataatggagaaacaaataggtatgggcagstagactggcttctagaatttgttcgtctctgatagaatctagattctagaccatcggtttttgctgtatgaatattttctaagatattctcttygaaatcaattttaatgagatttcctatgtgtttattttttgataactgayraaaattcataaatacaggawtaattcctagatatacattaaattaattaatagctgtaaaacttttgtaatagttaaaaccttttctatgttaatattagagtatgattaacttacttctaactatgtaatctgcttctcatattaggttcctgttgctagagcaagtattctttggctaattggagaaaactgtgaaygagttcctaaaattgcccctgatgttttgaggaagatggctaaaagcttcactagtgargatgatctggtaaaactgcagatattaaatctgggagcaaaattgtatttaaccaactccaaacaggtgagaggcaaatgttagtcaacctatctaatacgtactttcctcttcactctgatcaaacagcgggggtctgtgccttcattagtctgaccattcaacaatttctaggtgcctgtttgtttcaggttctatgttagatgatactagtgcaaacagatgacattctagtctagtaagagagaaaacagattaaaaaatgaaatagtgtgtgttaatgctgtagcagaagtattgacatacagtggaattctagacgaattataaagtctgaagtcgatgtgaggtcagagaaaattttataaaggatgaaactcttgactaagggcttgtaagagtggtttactgtacagaaagaggaaagcacagggtcagagtcaagaaacagcttggtgtttctgggaaactttttgaaggtgagtccagaatggcaggtacaatggtctgaaagtttatatcccccaaagttcatgtggtgaaacctgatcacccatgtgatggtattaggaggtaggacctttgggaggtgattagrtcataagggtggagcctttataaatgaactttatgctcttagaaaagagatccctgagagctagcttgctgcttctgccatgtgaggacacagtgagaaggtgctatctgtaaattagaaaatgggtgctcactagacaccagaactgtgggtaccttgatcttggatttcccagcctccagaactgtgagaaataaatttttattattaattatattattaataggcttcccagtttatggtattttctaacagtagcccaaatggactaagacattttgcagtttgaacgcatggagtggcttgtatgctctgctaagtagtatggaccttgtcctgcagaggaaagggaaaccacttttaatagtagtataatttaccagatttkcagtttagaatattcattttttaagtccattgactttttgagcagctgttaataagaggaatcatttttgcttccatgtacgaaatagggacttttcctatatctgaattgctattctctgtgagtggacttacctgtttagtaaattggaaaaagattcttgctcatttgcagctaggcttcttgggaagctttatgctctgtgtcctatctatttttctctaattttcacttttcctctgactcttacttttgccttkgtgattttttttctccacctcccctctctttgtttttgtccccttccccaaaactctttctgcctagatatctctctgacatccttcatcccttcgtgccccgcccccgtactacagtccagtgtgtttgtcattgtctcctttctcttccatccctgtttgtttctctctttttgtatttgctgtgtatctctctatatgtgtctccctctctgtctgcctttcctgcttccccatagaccacacttattttctagtaaactaatgtttgcctttcagaatccttaggtcgattcctcaaattcatttctatatgctttgggattatcttcatccctaatcgtgatatgagttatcttattatagcttttgctgattcatctacaagatttgtaaccagataattgcaaataatggagcatatttccattatttagattttgtctttacattttaagtcatctttaaaaggaatcagttaatcctttccaagtgtctgtagatttcttcatacattgagatgctttctaaaaactgagtaaagaaagacctatgtttgctgttgagtttcatgtttcttgataaaatagagggagttttagcctgaaactccatggtgttcactaaatccctgtggtatggcaaaagtcaatatgatacctagactcttaggatttttttctgtctggtttggccactctaaatatatctagcttatggattgttgttaaagtaataccaaaatcaaatgtcaatcaagacttaatcaaactaagtaaagcttctttctttggctcttttctttgtagctgtgaataaccaataatgaaatgtagtactgtttattgtagagcatgtttcatgtctttttacccagtgaatttgaagacaactagtttgcactcaggtttttttttttttttcttgatctctattattaatggcagttttggagctcagtttctgaagtgttttttttttttttttttttttgagacagagtttccctctgtcacacagtctagagttcagtggcatgatcttggctcactgcaacctctacctcccaggttcaagcaattctcatgcctcagccccctgagtagctgggattacaggcatgtgccaccatgcctggctaattctgtatttttagtagagacaggtttcaccgtgttggccaggctgatctcgaacttctgacctcaagtgatctgctcacctcggcctcccaaagtgctgggattacagacgtgatattttatattttagaatgatacttctaggaaactacaataggcctcaccacctaatggtgaaaacacagtgattttttttaatcacaaatttttatgtagctcattgtttttaagtgattaaatatgaaaatagattaatagtgtcttgaagagttgttctctgtttttgaatatttctcaagaagaggagattgagagaattagcaactgaaaattagttgttttttgttttgttttggagcagagtctccctctatcgcccaggctggagtacagtggcgtgatctcgactcactgcaacctctgcctcccgtgttcaagcaattctcctgcctcagccccctgagtagcttattatgggtgtctgccaccacacctggctaatttttttttgtattttagtagagatggggtttcaccatgttggccaggctggtcttgaactcatgacctcaagtgatccgcttgcctcagcctcccaaagtgctgggattacaggcgtgagccactgcacccagcctgaaaattagttttaaagaatggttttaagcactatcaacttgatagaatttttaaaatttgtgtaatccattagatataagacagactaaaataattgttttgactgaaatactaagaattgttttctctacttatttattttagccatctttaaaactaagctagggagagtcgattacagtgatgagtagctggtttgccgtgaagtcttgatatttatttgtagatctgaattcccggtggcctaaatacctcagtgagcatttctataatttttattgaattatttagggttatagagaatgtctaaattgatttttataagatttagcatattgtatttatttgtatgtttgaagaataatcaaatagtaaatttctttatctgcctcaaactatttttgacctaatataaaaaataatttaaaaattagttagcagtctgttttgagtatatcctagactgaccctaccatagaaaacagctgtaaactccagaaaaatacaagaaacaaacgactttctgaagacacagaatagtaaagaaaagcaagagaatctggagggaaattcatacttagaagaaggaaatggcacagagttattttccctgtttttatggcttttatcctgaggacagtttgcagttggcactgtgcacagtggctagacctccaaaaggaaattcaaagtccttctggcttgaggaagtagagaagagagttcaggaaagctacagacattggaaagttaaggaaaaatagtagaaaggagagagtcagtgtgggagaatctcaaaatctgggagtaattgtacctaagtttttggctggcatctgaaccatacttatgcagggtggattcagagaaacacagctaggaattaaagaaccaagctgaaatttgaggtgtacccaagagactgagtttgtaccttgaaccccaacaaagttaattacctgctaaaacaaatgaaaatcctgtactcattcaaagagtttaactatgtccagagtctctaaaatacatggcattcttaatgtccaaatgtatcttgtatatccaaaattactcaacataagaagaaccaggatggggagttattgtttaatgagtacagagtttctatttgggaagatgaaaaattctagagatggatggtggtagtggttgcataatatggtaaatagactgcctggcttcaaatcatgttgtgccacttacatgattttggacaaatcatataacctatccaagatttcattttctcatctgtaaaatgggaattattataatatagtcaattttgctatattgcaacatgtatgcttctaaaatcattgtgctatacaaaatcacacaataaaaaccatagggattattagaaaaatgcagttagagtggcaacactcaaaaactatattggtgacatattttttaaaaaggaacctaaaaaaaaaaamcagaagtacaattttacacgtgttaaatggttaacaaataaatactacaatgatactgctctttatattgaaaaagacttgaggtttgcttatggaagaaaggctatacttgttcagcggtagaaagagggttaatctgaaattggatggaaagttgtgcctcctaatgagcatgaatatggcgcataacacatgtagatgttaacctctgaagtacatgtttgaggtatgtatgttttgtgtattcctacacatctctgtttagctgggtgcatttttatgccttcacctagtatttcttgcagaagaaatcaccacaaaattcatgttatgcccaaattgttccctaatatgccaactgagttggaacaaatgcacattttcaaaacaagcattagagcagaactgactgtacctacctcacaaagttattatgaggataacatgaaacagttcatgtaaaatgcttagatttccttgcacataatagtgcctagttcattttagttatccttcttttgtaaccctagcgagcaactgctgtattcttcttagggaatatgatgatttacagtaaagaaactagtctagttactgacaaaaagtgtattcttattaggaaaaaaaactactgatttgggtttatcctactgagaytttctaagtaggatgctgaaatctccccgcccctcttttttttcagtctgtgaagaaaaaaatggttagaaataagtatcaagagtagaaaacactcttagaatactctcacacaggagtaatttcacttttatgtggggaaaaagttgaaagactgaaaccagttgaagttgctgaaatctagaactgttaaggcagtataaagatttagcatgagttcgttgaaatagtctactgaagtttgaggaagaaaggatttaattaaacaaattaataacaatttaaaagttaatgaataaaagatgcttttgattttaaactctaatagtatgtcatcttttaaatgtagtgataagtgctataarttaatgtttttcttagctcattttgatttttagttatgaaatattgcaaacctatggaaaagtacataatagcataaatacatatgtgtatatctaccactaggattaagttgatattcacatttgcctttatttatttatttatttatttatttaatgtaagatgtatagaactagaacctcaagcttctgttcacacgttcgtttcttccccattggtaaccactgccaccttgttggtgtgtttcattcaatcatccctgttttatatttttattatatgaatatgcatccataagcaatgtatggttgtttttgtgagttttcaaattttacataagtagatattctactttatgtatatgtttgcaactttttttgcttaatatcatgtttttgaaatatggatatgtgtagatataatttaattactatctctgtcagacatttaagtttctacttttctgctattaaaaaagaaagtgcttccttgagttcttttttactcttagtgagagattttgtaaatcacactgatgttttagggattcctcctaaagttaaaagcagattctctcttgcccgtgattcaggtctttggagaaatctccttcccccaaagcctctttaatgtgatttaacaaaaggagacttggacactctgaagtgacatctctatcctttctttgatatgttttcctggcattgaaaaactcaagtaaatataatacagaaaggaagaccttacagaaaacttttcaagttgacaaaaaggtagatactattaaattcagaaattacatctaagtcacataaagaatcctgtttagtcatgaaattaagaaactaattagggctgggcacagtggctcacgcctgtaatcccagcactttgggaggccgagacgggcagatcacctgaggtcaggagtttgagaccagcctgaccaacgtggttaaaccccgtctctactaaaaatacaaaaaaattagccgggtgtggtggcacatgcctgtaatcctagctacttgggaggctgaggcaggagaatcacttgaacctggttggcagaggttgcagtgagctgagatcgcgccattgcactccagcctgggcaaccagagcgaaactccatctcaaaagaaagaaagaaagaaagaaactaattagatggaacaacggtactgcttaggtttgcctctggtgtaagttaagaattctatgtagagtttacttcatttaccaaacatatttgtttgtatcatcctgttaaaaaataacagcaatgtagaaccaatataaatctttactatgccgaatgcagacttctgtgtcctttttatgtaatagtaaagatattattagaactatagtattaatagtaaaatatatattaggactatattttaagagacctttttagttatttgtactgacttataatctattagaagaaagctattgtttgaataaatatttcccagtttattgtcagagtattttgagaagtcttttaaataatgtatttctttttttttttttttttgaggcgagtcttgctgtgtcgcccgggctgcagtgcagtggcgcgatctcggctcactgcaagctccgcctcccaggttcacgccattctcctgcctgagcctcctgagtagctgggactacgggtgcccgccaccatgcccggctaattttttgtatttttagtagagatggggtttcactgtgtaataatgaatttcttaatttttatgtaacagttcttcaaattcatttttcctgtgtcacagtgacttagagtcaatctgaagaaaatgtaattgatataattagtgtctggatagcattagccattagttggtaccaataatggttccttaaatctaagcaggaaaattagtctgaaaacaaaatttaataaatagctgtatatatgatattgaatatttttgttaatgataatacattatactgtcattgcttatcttgtgtaatttgtgaataaaacaaatttaaaagtactatttaattaatatcccatctggttttggattgagcctctggtgatattaaaatgtcatgattgtacttaaatgttgtctgttttcttcctaacagcttccctggacagatctaatttatgcctgttgtctccatgccatctagtttaggatttgtcccaaatttttaatgaagtaatatcactaatatttgccttaaaatagcacagttaatttgtagacctccgctttgaggtcttctatcttctgccataattttgtctagtggcatgttaagacacaagtgcagtgaacagagatttcattttaatatgtgagccatttaaatctgaaagactgtatctttttcccaccctttctagatgtaacataactaacttcttccttttagaacagcaggcaggatttgtgctgataaatgaagtatactctgacaaagcaggtgggaaaagctgtcttttgctttgctggaggtggagagatgagtatttaacaatgcttcatttgccagcaacttgatataccagcaagtgttgccatggcctatgagatgcatgaagctccaggctgccagtgggtggaattaaaggaaaacatgggaagttagaggttggttataggtgaaatatgtgcaggagtaaagactgaatagtcctgtcctaggtcattaaagagagtggtgaaagcactcttgctacagtagttttgtcatttattgtatagtgtaagtctaaagtttgttttattatttggcagttctttttttatcttgttataaaatcatcagcaatatattttttaaagtggaagtgtacatttaacaaacaataaagtgctaaatttccacttagtacttaacatgcataaaatatttgtcgacatttaccaaccatcatgagagtgctggtgatctcattgaccacacaacaaccagaagacacaacaatctgctacaaaaagatcaacatccatttaaaaagctagtagttattttaagattatgcattaaggtaatttaatacgtacaggtgcagaagatgtttatataattctgtgtgaaacatgacctcatttagatcaaataactttttgaaaattagttttttacttttattctatgttttcttatgcacatatgaaaaatgaaacaatagctgttaatgtggtggctccattagtagaaaaaaggcccaacactgctggttttcaaacagaaaatcagttaattccaaaaatagacttttttcattcaatgtatttgtatatttgtttggtcagggctgcaaatgggaacaaagtaaagcttttggaagtttattctgtcaaaaatattgcaaatgctgttgtaaattaaaaagctcaactttgaagataaaactgtttttgatgaaaggacgttgtcatggtaaaaatcaatgttcttatttaattaagaaaactatggaagagaaatgttttaggaattggttgttgtgcatgcgaacaaactgcttattcagccagttgaaataaaaccgtagttgtcacatttactgatattagtatacacagtttgaccgaactataaaattcttgtgatgaaactgatgttgaaaaaccattctatagcataacagtacacactgtctttaatgcatattagcaacagaattttagatacatgattttgtgaagaactgctttgtaaattaagtttcttatattggcttaaacattttttattgataattgagtcttctgtatattggttaagttttggttcacaaattgtttggattatttaaagtgtcactagtaaatgccaaaaaattttaccttttgaaaaattttagcaaatagcaatcattagaaacaagtcttgcaaacagaaagactttgaaagttttccctgtacaggcaagggaagaactgaacaggttaaatggtgagagctcaagatttaatcaagaggttgtcatttgcactatctcacctatcgtgaagactcttttgatggagcacctgtttttaattagaaaaatttatattgtgtagaatgaaatgaaattgagaaggcagttggttttgtagtatctaaattgatgacatatttttaaaaggataaataaaataattatttgaaaatgttgtcaatattgtaaaaactttttattgactacatggrggaaaagctaaatatttgggtttgaaatattgacagtttttaacataaaagcaaggattggtactattcttcattcagtaggattttctctgagattacatgattgtccagaaatactgtaaagagggtattttctccattatacccaaatatggtctacagagaagaaagttgaaaatgtcaacaattttataattactcactgcagaatttaatttggaaaaagattgcaattttatttttttaaaaaaacttaggccatataaaaatgtattctccagagaaatactaatgccttgttactagatacatacactgaagaaactgattaatgtatgtaaatgtgtggtgaataactattctgcttatggttttagtgcatcattgtacacaaatttgtttttatcttttagaaagaatgttatttttgaaaatacattttaataaaacttatttataagcttataatataatacattttacagtcaataaaaatttttaaattatataattttaattactttaaatgccctacctaactttcaaaattgttaacatattgaaaatgtttaatttcctaaaaattaattttgggctaagaaatataagccaaatgtatcattctgctagctcaaaaaaatcattgcaattaagagactctttctttattttagttgcagatttaaaatctcagcactcaaatggactttagagttaaccaagttgtaaattctaactccacatttgagaaaactaatgattaagtggatttcccaggtttttccagcaaattaattacatggtttagtgtaccacattttcttttaagttggttttgaattgtattcctcatttggtgaatactttgcaaattgtcttaaaaaatgaatcatagaaattttcttacctgtacttgaaccagcatggtctagcaattagtgaatagcaattgttggtaaccaaattcagaatagctctattaacattttcacttgtattttttataattctactttaataaaactgggttaatcctttttaactactctgctactgaaataaggttgctttctatcaaatcaattatcttaagcaattattgtaaaagagtttaccacaccatttctgtactttgacttattgttctagaattgtctttagctctgcctaacttgattgattttattttttatctgcttctaatgtgcataaaatcttctaatctaaagtaaatgatttagtgtttctyggtttatttttcccatatattatgaattctatttggcttatagttaaaattgtacacatgtagccttcttgttaaaactatgctttttcaataaaataactgtagtttaaaatacaaacctgttttgttaacatttcaattttggtttaattattaaaattatttcaatatatgttaatgtagtacattcaaaaattgacttaggaagtcttattatggtgtaaaagctactataataagttgttcccttacataaataaataaatgaccaatattactagaggctataagcagcwtgggggaaaaatggaagaagtcttttatcctagttttcagagggcatcagcagcttgcttttatgaaaaagtaacagctaaatgcactgcaaataatttgcagtaatccagttcagtgattcatgtgtctgctttaatgggtcataattcagggtaaagtaactgagtgcagtcagagtgcagacactgcttatgccagggacagtatctcttcataaaacacacctcaggagaagcagtttgccagccccctaatactttctgatgttttgatgtcctgcatatttttccrattaagttttgagtgccatgtttttagttgtatttccacattcattattctcacgtagaccccttcagcgggtttgccatatatgattatttttttaatgatgcctttctttccacttcagcagtttaataatctagcacatggctgcttctcaatactcagcattcacctacccagtacagaagaggacatgtgctttggcttcaaaattccatttgcagcattagaaatgtgtattccctatggaacaacatttgtttgacataaccattcatttttattacctctttaaatatgtttatccagagttatcgataatcataaataactgtattctcatcttgatctgtttttttccaacagacaaaattgcttacccagtacatattaaatctyggcaagtatgatcaaaactacgacatcagagaccgtacaagatttattaggcagcktattgttccgaatgwaaagagtggagctttaagtaaatatgccaaaaaaatattcctagcacaaaagcctgcaccactgcttgagtctccttttaaaggtattatcagaatataactccaaaatatatgttatctaaaaaattatgacaagatgttgccatttctaatgtgcttaaaatttatctcttaggaaatataaatgattcrcatatataaatatataagaacagcatgctttctactcattcatctgctctcaaaagcaagttttatattaaagtttatatttttgtagaccttatttactaaataattttaagcgttctgactttattctaacatttaaactgggcaatagatgaaaactgtcttattcttataaataatgacttcatttctcttttaaatagttttataagaaatataattccttttaatagtgagttattaagtaaatattctgtgtacactaatatcagtttttctaggaggaattattttataaaaagtatccctctatatttaaactggtttttcaaagagggaagttgacttacgtgtcccagctttttaaaaggagtaattaagtattktaccaccttacaagtagccattccagttggaatcaaatagttacataccttggttttcatattgtttcttatttaatgttcttattttaaagcgataaaaagcaattcagttttgtagaaaaactattaaaattctggatgtgtttgtgccaagacatgtatatggattgtttaactgtgctgtcattcttaatattcacagtaaagtaatttttagagaagctacatttcagagcaacacctctaaacacactgactgattagcttttttattgaccattatgggggagattattgtaatctatggactgaaatcagttttttgacctatgaagagcttcctagtctatatttattccttgacatttgaggtaatatgccaattaccttgagctctgattatgattgttctctgttatatacagctcatattgtttattttatatktttccctatttttaatagatagagatcatttccagcttggcaccttatctcatactctcaacattaaagctactgggtacctggaattatctaattggccagaggtggcgcccgacccatcagttcgaaatgtagaagtaatagagttggtaagttgacctttctgaaattaattttgccaaagcagtggaagactctaggatagctattgttttatataaaagcttttttggagagttgaaaattgaaaattgttctagtatttctaaatgtaatgtgttagatataccttgcctttatagcaactaaatattatagtattcctatgccattgtacatgtactgttccttttcttcaaggaaatagagaactgaattctctgcatcagtgccacccacatttgtgctattgcatttgtagccgcgtagattcaatttctaaggtatttagtttcattggatgaagttttttctactttgtttagagatttgtaagcttcctgacaatatccttctgaataatttctgctgttctctttcagaaaaaccacacaaagtgttctagattttttgatgaaccatttttaagtgaagcctgaacataaatagggagcattgtgtaccaaaaatgtcctttgacaaggtcacaaagtgaataatatggtgctttctcatcaaaaacaaatttgctatataaatactctttttctcaatctttaaaaaaaatgctggccattgagataaaagaattaacattcttttctaatattatctgtttctttctcatatatacaagaaaaagtgagagaggccttctaattgtatttagcaattatgcaaaatatatttaatactttaaaatgtggagttaacaaaaaaagcagttaagaattgtattctggatacttttctggtggaaaagatacattgaattaggattcagataactggggttctttactaattcctgtgggaaagtgagttaacctccttgctctcaatttttctgtatacagtggaagaaaacctttattactttaataaatagaatttctataatgatcatggccatgtaatttgattcctctgagaaattattaaatgtttctcttaaccactccaacttatcctggctttgaagcatggccggaattaataatagcactatttaggaacccctgacagtgtacgatgataatgttttataaaaactatcttgtttaaacctaataatgattgtaagggatggttattgttattcccacattgcagatgaggaagccaagtcttagataacttaaagtaaatcgcctaagttcacatggcaagtaagtgatagaaccatattccaacccaggtctgagttcactgtccatgctgttactgtattttattatgtaatatgagaagaggaaccttgagcttgttcacaaatctgtattatccttagtacttagcaccattatctttatgttttgacaaatgatctgtacttagagacagccaaaaatttgtaacagtagtaatatgtaaaaatatgagaagcaattacatgtctatccctccttgcagctgagtttgttgatttttactcaaatctgcatactcttaagtactctycaaaagagttgccttatttgtgcaattttttttttttttttttttttttgagacagagtcttgctctgtcacccaggctgcagtgcaggggcatgatcttggctcattgcaagctctgcctcccaggttcaagcgattctcctgcgttagcttcccaagtagctgggattacagccacatgccaccatgcttggctaatttttgtatttttagtagagatggggtttcgccatgttggccaggctggtctcaaactcgtgacctcaagtgatctgcccgcctcagcctaccaaagtgctgggattacaggtgtgagtcaccgtgcccagcctatttgtgcaacttttgatcagatactagaatataaagagagtgttctttgttatggttcctcctacggacatactttctctcctaatttcttattatgcttgtttgttgtttttatggttcgtttttttttttcattatggggtacatgatgttttagcccaagtagaaccatccttttaaccttcccctgcttccgccttatctctccctccttgctgcccccacccaccaaaaagcattatcttctcagagttgatagcaatgctatgcaatttaatttggtctcagcagtattctttattggctgatagattggtttgttggctggcttcttccattttcatgtgctcttctaagcattaactaccttatagggacagtacttaaatataacatattatgttcgtttcacctgtccaattcaacagagacaaattaatttctttttcattttgctgattatatttatgaaattaataattggtaacttasagagaatcattataactgattgaacatggtttgataaaactgtcactgtctgttgatgccatgcagaaaacagcttcagtctattggactctgagacaattggcttaaaattatactatgagggacacaattaaatataaaaataacgtagatagttttctttttaaatgcagctacaatacaaaaaataatgtccgtattatctttcttgtctctcactctacttcatctcccttccaagtcatgtcactgtatttcatgcatataatatactatgttattctagttttcctgtaaagtgatcttacatggtcaagtcctgtaactgtgaaatataacttagtaagaaaaatgacctaggtttagataatctgatattttaatcaaaatgactgggaacctagtcagattgacagtagaagtcactttgaattacacaccaccatttctaggatataggatataatatatatttatattatgatcccagtaagttttgaagatccttagttaataatttatttgcttagttctagaaagtcctttcttctctactgacagaaagaccgccttctgcatatgaagggtattttgcttcataaacacatctgtcaatattttatcctttacagaaactttcaaattagcgtctatgttctcttcttttcttttcttttcttttccctattattccttttccttacaatgataatgtggtcttttagtcataaaggaccacaatacaaattaagatacttttattgttcgtctttggccttttaaaacctgawactccatagaattcatggccatgtcaagaaaaaatgcacgtttgagcatagaagtctggttttccgaaattgttgatttagtgttattaaattaatccaacaaackttttatcagacctcagagaaatatgtttggatttaagaaaaatrtggacttcagagtttaccaaatataagagagctttgtttatagaatactatctttgtagacagaagcattttaaataaatataaaagaaagccatactgctgatcktatataagcatcttattcaaatatattcaagcttctctttttaagcaacataccttaaaccctctagatcagtggttttatttttatttgcttttatttatttttttgagacatgattttgctctgtcacccaggctggagtgcagtggtgcgatcatagctcactgcagcctcaaactcctgggctcaagccatcctcctgcctcagctcccaaagtgctgagagtacaggtatgagctacatcacccagccttagactagtggtttttaaatgtagctgcgcattataatcatatggagattttgtgtgtgtgtgtgtgtttaatttttattttattattatacttttagggtacatgtgcacaatgtgcaggtttgttacatatgtatacatgtgccatgttggtgtgctgcacccattaactcgtcatttagcattaggtatatctccaaatgctatccctccccactcgccccaccccacaacagtccctggagtgtgatgttccccttcctgtgtccatgtgttctcattgttcatttcccacctatgagtgagaacatgtggtgtttggttttttgtccttgtgatagtttgctgagaatgatggtttccagtttcatccatgtccctacaaaggacatgaactcatcattttttatggctgcatagtattctatggtgtatatgtaccacattttcttaatccagtctgtcgttgttggacatttgtgttggttccaagtctttgctattgtgaatagtgccgcaataaacatacatgtgcctgtgtctttatagcagcatgatttataatcctttgggtatatacccagtaatsggatggctgggtcaaatggtatttctagttctagatccctgaggaatcgccacactgacttccacaatggttgaactagtttacagtcccaccaacagtgtaaaagtgttcctatttctccacatcctctccagcacctgttgtttcctgactttttaatgattgccattctaactggtgtgagatggtatctcattgtggttttgatttgcatttctctgatggtcaktgatgacgagcattttttcatgtgttttttggctgcataaatgtcttcttttgagaagtgtctgttcacatccttcrcccactttttgatggggttgtttgtttttttcttgtaaatttgtttgagttcattgtagattctggatattagccctttgtcagatgagtaggttgcaaaaattttctcccattctgtagattgcctgttcactctgatggtagtttcttttgctgtgcagaagctctttagtttaattacgtcccatttgtcaattttggcttttgttaccattgcttttggtgttttagacatgaagtccttgcccatgcctctgtcctgaatggtattgcctaggttttcttctagggtttttatggttttagatctaacatttaagtctttaatccatcttgaattaatttttgtataaggtgtaaggaagggatccagtttcagctttctacatctggctagccagttttcccagcaccatttattaaatagggaatcctttccccgttgcttgtttttctcaggtttgtcaaagatcagatggttgtagatatgcggcattatttctgagggctctgttctgttccattgatctatatctctgttttggtaccagtaccatgctgttttggttactgtagacttgtagtatagtttgaagtcagatggcatgatgcctccagctttgttcttttggcttagrattgacttggcgatgcggactctttcttggttccatatgaactttaaagtagttttttccaattctgtgaagaaagtcattggtagcttgatggggatggcattgaatctataaattaccttgggcagtatggccattttcacggtattgattcttcctacccatgagcatggaatgttcctccatttgtttgtatcctcttttatttcattgagcagtggtttgtagttctccttgaagaggtccttcccatcccttgtaagttggattcctaggtattttattctctttgaagcaattgtgaatgggagttcactcatgatttggctctctgtttgtccgttattggtgtataagaatgcttgtgatttttgcacattgattttgtatcctgagactttgctgaagttgcttatcagcttaaggagattttgggctgagacgatgggttttctagataaacartcatgtcatgtgcaaacagggacaatttgacttcatcttttcctaattgaatgccctttatttccttctcctgcctaactgccctggccagaacttccaaccctatgttgaataggagtggtgagagagggcatccctgtcttgtgccagttttcaaagggaatgcttccagtttttgcccatgctgtatgatattggctgtgggtttgtcatagatagctcttattattttgagatacatcccatcaatacctaatttattgagagtttttagcatgaagggttgttgaattttgtcaaaggccgtttctgcatctattgagataatcatgtggtttttgtctttggttctgtttatatgctggattacatttattgatttgtgtatgttgaaccagccttgcatcccagggatgaagcccacttgatcatggtggataagctttttgatgtgctgctggattcggtttgccagtattttattgagtatttttgcatcaatgttcatcaaggatattggtctaaaattctcttttttggtttgtgtctctgccaggctttggtatcaggatgatgctggcctcctaaaatgagttagggaggcttccctctttttctattgattggaatagtttcagaaggaatggtaccagctcctccttgtacctctggtagaattcggctgtgaatccatctggtcctggactttttttggttggtaagctactgattattgtcacaatttcagagcctgttatcggtctattcagagattcaacttcttcctggtttagtcttgggagggtgtatgtatcaaggaatttatccatttcttctagattttctagtttatttgcgtagagatgtttgtagtgttctctgatggtagtttgtatttctgtgggatcagtggtgatatcccttttatcattttttattgcatctatttgattcttctctcttttcttctttattagtcttgctagcrgtctatcaattttgttgatcttttcaaaaaagcagctcctggattcattgatttttttgaagggttttttctgtctctatttccttcagttctgctctgattttagttatttcttgccttctgctagcttttgaatgtgtttgctcttgcttttctagttcttttaattgtgatgttagggtgtcaattttggatctttcctgctttctcttgtgggcattcagtgctataaatttccctctacacactgctttgaatgtgtcccagagattctggtatgtkgtgtctttgttctcgttggtttcaaagaacatctttatttctgccctcattttgttatgtacccagtagtcattcaggagcaggttgttcagtttccatgcagttgagcggttttgagtgagtttcttaatcctgagttctagtttgattgcactgtggtctgagagacagttcgttataatttctgttctattacatttgctgaggagtgctttacttccaactatgtggtcaattttggaataggtgtggtgtggtgctgagaagaatgtatattctgttgatttggggtggagagttctgtagatgtctattaggtctgcttggtgcagagctgagttcaattactgggtatccttgttaaatttctgtctcgttgatctgtttaatgttgacagtagggtgttaaagtctcccattattaatgtgtgggagtcymagtctctttgtaggtcactcaggacttgctttatgaatctgggtgctcctgtattgggtgcatatatatttaggatagttagctcttcttgttgaattgatccctttaccattatgtaatgrccttctttgtctcttttgrtctttgttggtttaaagtctgttttatctgagactaggattgcaacccctgcctttttttgttttccatttgcttggtagatcttcctccatccctttattttgagtttatgtrtgactctccacgtgagatgggtttcctgaatacaacacactgatgggtcttgactctttatccaatttgccagtctgtgtcttttaattggagcatttagcccatttacatttaaagttaatattgttatgtgtgaatttgrtcctgtcattatgatgttagctggttattttgctygttagttgatgcwgtttcttcctagccttgatggtctttacattttggcatgttttttgcagtggctggtactggttgttcttttccatatttagtgcttcctttaggagctcttttagggcaggccgggtggtgacaaaactctctcagcatttgcttgtctgtaaagtattttatttctccttcacttakgaagcttagtttggctggatatgaaattctgggttgaaaattcttttctttaagmatgtggaatattggcccccactctcctctggcttgtagagtttctgccaagagatcagctgttagtctgatgggcttccctttgtaggtaacccgacctttctctctggctgcccttaacrttttttccttcatttcaagtttggtgaatctgacaattatgtgtcttggagttgctcttctcaaggagtatctttgtggcgttctctgtatttcctgaatccgaatgttggcctttcttgctagattggggaagttctcctggataatatcctgcagagtgttttcccacttggttccattctacccrtcactttcaggtacaccaatgagacgtagatttggtcttttcacatagtcccacatttcttggaggctttgttcgtttctttttgttcttttttctctaaacttcccttctcacttcatttcattcatttcgtcttccatcactgataccctttcttccagttgatcgcgtcggctcctgaggcttctgcgttcttcacatagttctcgagccttggctttcagctccatcagctcctttaaggacttctctgcattggttattctaggtatccattcgtctaatttttttttaaagtttttaacttatttgccattggtttgtatttcctcctgtagcttggagtagtttgatcatctgaagccttcttctctcarctcgtcaacgtcattctccgtccagctttgttctgttgctggtgaggagctgcgttcctttggaggaggagaggcactctgctttttagagtttccagtttytctgctctgttttttccccatctttgtggttttatctacttttgatctttgatgatggtgatgtacagatgggtttttggtgtggatgtcctttctgtttgttagttttccttctaacagacaggaccctcagctgaaggtctgttggagtttgctagaggtcaactccagaccctgttgcctgggtatcagcagcggtgggtgcagaacagcagtggctatagaacagcggatattggtgaactgcaaatgctgctgcctgatcgttcctctggaagttttgtctcaggggagtacccggccgtgtgaggtgtcagtctacccctactggggggtgcctcccagttaggctgcttgggggtcagggacccacttgaggaggcagtctgcccgttctcagatctccagctgcgtgctgggaaaaccactcctctcttcaaagctgtcagacagggacatttaagtctgcagaggttactgctgtctttttgtttgtctgtgccctggccccagaggtggagcctacagaggcaggcaggcctccttgagctgtggtgggctccatccagttcgagcttcctggctgctttgtttacctaatcaagcctgggcaatggcaggcgcccctcccccagcctcactgccgccttgcagtttggtctcagactgctgtgctagcaatcagcaagactccgtgggtgtaggaccctctgagccaggtgtgggatataatctcctggtgtgccgtttttgaagcccgttggaaaagcgcagtattagggtgggagtgacccgattttccaggtgccgtctgtcacccctttctttgactaggaaagggaactccctgaccccttgcgcttcctgagtgaggcaatgccwcatcctgctccggcttgcgcacagtgcgctgcacccactgtctggcactctctagtgagatgaacctggtggtacctcagatggaaatgcagaaatcacccgtcttctgcgtcgctcacgctgggagctgtagaccggagctgttcctattcggccatcttggctccaccctcctggagattttttaaataaaacaaaactaggtcaaatgtgcaccagactaattaaatcagaattttaggaggtgaatctaggtatttgtttttttagtattaatatttgtattgtttatattagcgtttaaaaactattctcaggtgattctattgtacattcagtgctgagaaacattcttgaataagaaattctgtcatgctgtagactcctttacaataaaataggtactctagcaaagacttgcacataggaaaaactcaaaggtacaatcaataaatgagtctcaactattttatcttttcagaagtatacatttccctgctttttaaaaaatcatatatgaagcatgatttaatttcttcttgacaaatcaaggccatgactataaaagcaaactaatactctgtattaaagtggttaaaggggctcatattagtaaatgctgttactaatacaatatttagtaaacactaaagtcagtatttttcttaagcatgtttctgaatttaatattgaagtctttaagaggctaataaatataattagtatttattgtgtcagccacacttaaaattgaacaaaataggctggacgtggtggctcacacctgtaatcccagcactttgggaggtcgaggcaggtggatcacctgaggtcaggagttagagaccagcctgggcaacatagtgaaatcctgtctctactaaaaatacaaaaattagctgggcgtggtggtgggtgcctgtgatcccagctacttgggaggatgaggcaggacaatcgcttgaacctaggaggcagagtttgcagtgagccgagatcctgtcaccatactccagcctgggcgacggagcgagactccgtctcaaaaaaaaaaaaaaattgcacaaaatattttaaattccctgctctccagaaacttacattctaccagggatagaccaacagttaaaaaaacaagtagattgtatagtatgttaacaagtaatacatgctgtgattaaaaaaaaaaaaaaaaaaaaggtggtggggaatggtgttggaagtgccaagagctagggtgaaggccctaaactgggagcatgcctgggacgtttggaggaacagtaaggcatggccagagcagatcaggcaagagggtgagcagcaagaggtgagagaggcrggcgacggggacagttgtggaggggcagtcatgaaaggatggttgtattgggctgtgcagactgttgtagggacttcggctttttctctgagtaaaatggggagccactgcagggtttcaggccaaaaaggagcttgctctcatttaggttttaatataatcattctagatgctgtgttttgcaaagtttgtttgctgggggcagggtggaggggcagtagaagcaaggtaacgagtagtccaggagagaagggtgggtcagaccagggtagctacaggatttcttgatggcttagatgtttaggatatgagaaaaaaagagaagtcaaggattactccaggatttaggctgttgagatggttagggcaatttattgcctacactaaatattttcttttctttctttttttttttctctcttttccctcagtgtcaagctatcaacttgtgtttgttattgctgttattgtatctgcttctagtttcgctcacctattttaggatatattacttttgtttaaatcttctgtgggccaaaaaacacaaaagttttaaaaattgtatatttaaaataagattgttggtttaacatagggcctctgagtgagagtttgtgttgttgtatttaggagtaaagtgaatcagccttaatgccaggacttctaacagttgcattccctgtggaggccttaagcttgcttttgaattcagttatgttgttaatgattaagtttgccagaactctaaatctctgaatgagaattcatttatatttactttatttrtttaaacaggcaaaagaatggaccccagcaggaaaagcaaagcaagagaattctgcyaagaagttttattctgaatctgaggaagaggaggactcttctgatagtagcagtgacagtggtgggttttataatttattggcatatrttatttacatrgtagattacattctatatctcagaaacaaggcctaatccataatattcagcaggtagttttaagtgaagtttgtattatcaaaataatccctttcatttatatatcactctttagttttcaaagtaatttttaattactaaattctctttttactttacaatatctcttggatagtagctgatacattggtatagctgaaacaggaactcatacttttctgaattctaaaccacaatgcctaatatatctattgaaaaacataattttacacttgatgaacttttagtggggtctttaaaagtaactttcttttacaaaaaygtaaagtttattttataccttgaagagtctttttctctttcattttatacttatctytttctgtgaacctctatagagataaakctaaaattattaagtctctatayactataaaaaaatcaaactaaaggttgagggtaactatatgcagtgaaaagaatgcttaataggaaggatttagaggccctggcttttacctatgcaaattgaataaggcacctacttttctctatatcagataaatgaaggggtacagttaaatatttcttaaagtcccttcattgctaaaattctgtgagtgatttgcataatgaaaaatagattgtagtcactttctgatgctcttattaacacttaagctaataggcaaatctgacccaagaccaaacgacacccaactttctctaaaatctttattccttggagaaccagggcctgtcactcttacatggttatctgctaccctactgtaaggtaattcactcttcttttctctgtcttccttatcaaaaatctttgtttttagtatctgataaattaatctgkgatacattacctgtaatttctttcattgtttatagcataagccagttatctgacttaatatgtatgtgcgtgtaacttggatattaccacaaatctaaaatgtccttatttagtagctttattttagtaaaataaactttcctgtttgtaaatgatgataatgatgagtgccttaccctgtggcagaccctgttgtgttctaatctcctttgtatgtttcaaatcatttaatcttcacaacagctctgaaaagtaactagtgttatccccatttgctgaaaaggaaaccaaaacccagagaagttgaataacttgttcagttttacaactggcaagtagaagagccaggatctgaatccgaacactaacttgagaacccatgcttgtaccccttgtaagccgtcttaaaacaatacaggcagtcctaggttttcactgtgatggaccttcctgatgttggtattatttaaccattagaatgtttaattaaaggttatgttcctgcctaagagggcttcgttacatagatcacaggcagggcaacagtttgtccttttgtctgggacacaactctgtagttatagtcattttaaatagtaaaaattatgcttcacttaaaaaatacacatatattcttcatgtattctcttctgcgaacagtcctagcataccataatttacacataaaacatttaaaagtataattcctcagtgtaacttgatcatctctttgacctatggaaaactcgtttactagctcgaataagtaataactctttaattagtcattttgcctattgtctttgaatttggaggtctttccaagtgatttgaatggctcattttcctctcaaaatttgttcctaagaagattcaactrttgccttcttttactctaaatagaatttcccattacaagcagaagaattcaaaattatttctttagccttacatcaatccttacgtaattctttaaaagaaagtttttgacatagctatatactttggggtttgaagtgagattccctcaaatttggtttacttggttcacctttgcttagcttttctctcctcgttgtcagagcatcctctgtctgcctccctccaagctcacagtgctaaaggaatccatagagctgaaagaatggggtgtgggaataaaatgttaaacaagtggtgtccactgaactaaaattcaacatctggtttcatttgtgatgaatattgacagttacaggtgtccgtgtgtctaattaaatgactataaatctaagaacatctggttctgtttttcasakagtgaatctggaagtgaaagtggagaacaaggygaaagtggggaggaaggagacagcaatgaggacagcagtgaggactcctccagtgagcaggacagtgagagtggacgggagtcaggcctagaaaacaaaagaacagccaagaggaactcaaaagccaaaggaaaaaggtaacttattttgtcagaatttccttcaaaaaatattctgtgaaagtttgccccaggcagagatgtttcttattaatcaaaaaatggtgagagaaaaaaagtgtgtatttttttccagatattaaatctttttaaaattaaagtgctagttgttcacattattttcctacttgtaatgcttagctttcattttgaacttgaacatatcttggggttacattttgaaaattggtataaccttggaaggctgagttaagtgatcaagcaataggtatgaaacacttaattaccttttgtagcgattttgctgagggctaaaattaaatccttcaacactttgccattatgtaaccaagacaattgatttttctaaataatgttatattaaaaagattatgatccaaatattagagtcaagggctgtgaaggaagacggtcataagatctttaagtgttagcactttttaagatctcccattatcaataacattatcatgtattaaagtgtcattaaaattttgagtaattgggtctaatatcttggattgtgcaactctgttttccccgctgctgtcagcgagtggcctctgccgacatgatggtcctttccccgggagcctgctgcccgctcacttgatgagcttgcagcccggctcagtcgtggctgacagcactgattggggcgcagtacgctctctgctccttttattacagacagtaattaaagcagctckccctgccacttccataacaaacacagcataatgccctaattatgactttattaatttaagtcaggatttaatgattttaaaagtgatttatattgtttttcctgttcagaacaaatgaaatctgtaggttaaattaatacaggcttttcatcattgcaaagttaaaaacctagttaccagtaaattcttttcattagattaacatctgaaactctaagcagtaaggtaaacaataattaccatcaaaattgagtgatgcataataaaataacacttttacttttaaaatcttatcttaaaagctagaagttgaatatatttagaatcattcacttgttgcagcaaaggagctacttggtttataatagccttgtctttgagagaaatcctgtacttctgctttaatatcagcatgtctatgatgatacgagttataaaacatgtcctgtttctagaaagggaaagttttgttcagtgcatgaaatgtcctttcagatggcaaaagtcagtatactcaaaatttgtagtcatgtattaggtttattattcttttcttcagaaatggatttttctctttacccatgtttgaatttaaaagaattgtttattacaaagagaaccacaaatacattctaaaccttatatttttaagtacacattttaaccagtgaattggggataataaattgccatttttttgccagggaaaaacaacaacatatttttcagtcttcaaatataattacatgtgctctgagatgttaccatggctccatttttaataaatagcaatcatatttcctccacaaaaatcaattctaggaaatattgattctttccttgtctcactcctctccctccccctgtatttttctgtctcagaattttttttaactttgccagtatgataattttttaaagctcctaataagctttaaacatcttcaaaaaccaccctttagtaatcataaatatttatgaccaaatttaaattttacactccaaggtattttcatttgaagggagatagtatgacatagtggaaaaaatacggactttggaatgagacaggcttgagttcagattctagttctgcccctcttgttatgtgcccttgagcaggttatttaacctttctaaatattaatttcattattgtaaatgggataataatgtacccaggaagagtgcatttaaattagataattagtatgattggtatgaagtgcctagccctttctggcccacagtagattcttaaaaaaatacacacacatgtggtagagagaactagacctttagtttccaggaaaatataaagcaccacaaggcatttgtcatcccctgagagaagggtgtttggtcatctcacatgttattccttctccttggagaactgtttccctgcccatctgccagccttactcctatatcttggcttatatgtctctttctccaggaagcattcctaattggatcaagtttttttaggtgtctctccacatgttctcctgacacgctataatttattacttattacttattatactgtattatcactgcaaccttatctgtatcctccagtggaccgtagaccctgtagggtagacacacagagatcctctgtgtcttactaaccatcgttatccttagcacctagcataatgccaacatgtagtcaataattaataaatatttgttgagcaggtgaacaaatgaatggtgttaagcacttaggtatgatcatttgatattttaaaagtttatatttgattagcttaaatttttagcaagatagtactttagaagaatttcctttgaactggttaacattttctcatagaatgtgtttaaggtcacatttgggaacttgtgtaagtaattttcttgggtagaaaatgtataaaatacaagtctattttagcagaagtagatatataaatatttaaatatattactaaaccaggtgtggtggctcaagcctataatcccaatattttgggaggtcaagttgggaggactactcgagcccagaagttccagaccagcctaggcaacctagtgagaccctgtctctacaaaaaatataaaattagctggatgtggtggtgcatgcctgtagtcccaactacttgggaggctgaaatgggagcatcgcttgagcccgggaggtcaaggctgcagtgagccgtgattgcaccactgtacaatgagaccctgtctcatatacgtatatatatacgtatatatacatgaatatatatgtatatacgtatatatatacatgtatgtatacatacatacacacacacacacacacacacacacacacaggcacagtattttgagatagcgttttaaaaaatcagcctaaatatctttaacgttgttactggtagtacttaattcttggtaaatcaaacatttaatgttttctacattgcttttgattatattgtttagtgtcattttatgactttttgcatttgaaatttgtatgacaggatagaattgaatttgaatgggttctaatttatttggttatgggtaataccttttttattacctcattaatgtattctggaatttaaaaacaatttttktataaactgcttatataaaggagttaaagttcatatttcaaaatttactattatgtgtagygattctgaagatggggagaaggaaaatgaaaaatctaaaacttcagattcttcaaatgacgaatctagttcaawagaagacagttcttccgattctgaatcagagtcagaacctgaaagtgaatctgaatccagaagagtcactaaggtaagagattatacatttgttgtaattgaaggtaaatattcttatagcaactaaaatagacaacaccatcctcatctactcctgtgattttattttttctagataagcctttcccttataacccaactctgcagaaatgctagaaactttaaaaaatctcatcccttgccactgaaatcaaggaactcttacgcatatgaccttttttgttcttggctaggttgtgacaaggggggggttttgctgaaggggaagtgaaaggaagtcacaaaaatagtattgagcaaagaattataagtgtacatacatcataagaaattgagactattcaytttttaaaaatattgggcattttgcataatagagtgtgttttaaggcttcaattaaagagtatacattctttagttagtaagaatttgcgtagccatttatttaaaaacaaatggaaccacttatataataaaataataatgctttttggtaataacatttttaacactgaattttgcctgcttagcaggaaaaaaataaagtataaattgcaaaaatatagttattaatataaaatgtattctatctgatttcaagtctagttaaaagaataaaaatatagaattcagacctaacgataattatctttttggtctttaataatcacccccttcctataactggaccatgttcatgctagacttcaagtatagtatttttatatacaactgtgttattctgtttgttgaaaatatggccaaactctgcctttgattcagttcaatttcttcttaatccaatattgttttcgtttatttgttctgttaactggaatctcttcaatatgttatctgagtaggcaaggatgaaaattaatttattgaartagacaattgccctcccccatccagagatttattgttaaagaatgttttaaaaattggctagtatttgtcttgccttatttcacattttcttgcatatattaaaacctatcttaaacttgaatttatatttaaaacttgtgtctgtatataaaataacctgagatttttatttttaaaaaattcacataaaatcttaagagattttatggtttattaatctggcctcatataaaaacttatcacttagtgagtctgatgtactctcatttcatacttacatcaaattaccagaaagtttaaaatgttattgaaaataaagagagttacaaatcgacagtaaatacaacccagagtaagaagtattttttaaaaatgacagaacaagaaatcagtgagtgtcaagtggtagaagttattcttaggaaattttgtaacagttgaaaaattatagacttcagtgcctctgtagtattagaagcagagctttaggatcccattaaaaagccacagtggttgaacatcatgttgtgttgtaccccttcctccccctgaaaaaaacaaaagaagataaaaaccacaggggcactccaggtcagtgattctgtttgtttcttctttgtcaaagactttcagtgatcagattaaatctcttgatagttaaaaatattttcctatagaacgtcagtataaaaaacctcaaactattgcagtgaaccaaggcctttgagaaattcgggtttcgctcacattgttgatagttttgtgttcatgtgtttcccttaggtggcttattttctttatattagaatgccttttcccatctataataggcatacaggactgtggagttttttgctttagtttagcaactggaataagtactctccaccttggagctaccataactacttatttatttctgtttctttctgaatgatttggtgtataccatgcaattacagaatatacctattttctaataataggtgactataattgtggaaaagtcctccttgcaccaagtgttgtggcttctgccctaaattatgagtaatgaaggcagatggtgggtactttactttaatttagcatgacaatatgttagtgctgaaaattcatatgccttatatctgcagcctaactaaatctatatttttactctttcttttcttttttttcatccagacaatgtgttttgagggcactgagcatgaaaatgcgacctaggagttaccttgaatatatggctttcaaaacagttaatttttatggtagtcctatgagataagcatagtgttctacttgttgggagagaatatctttgtttcagtttcctcatctgtaaagcagacatgctagtacctaccttacttctttcaagtgttatgttaaaaataaaatatgaaagatcaatgtaacacactatgtaaytataaaacaacagttttaacatttttaaaaattccataaaagatcaacagtattggagaacatcaaatgctaaaagtaacctaaattttttggtaactcttaagtatcctgctctttttttttcactctttttacactattcaagttgtaaggcaacatttaattctgttcccttacctacagcctctgagcttagccactttccttagaagacagctgccatccacggtcagtgtttctgctctctaactcacaatctccatttaccctacttttcctttgaacgcagctctgtgtaagactcgcatccacttccccaagggtaactcctacttccttttggtcttgttttgttaataatcatctgtctcctttgcacctttaatctctttctccattcattccttttctgccaactgtggcattcaggttttttcagcatttaaagagagagagagggagcatggagtgaaaaaaacagagtgtgtgtacatgagtgagagtgagtttagaaaaatattctacatatcctccatcttgtacttcttaacccagttatttccaactctatcctacacatactgctctctgaaaaggcagctatgatccttccccaaacccagtagccttctcttaatcttgatctttttttatgactattcccctactacttaaaagtctctgcatcccttttgttcttacttttttgacctttcattcttttggttgcttcactttttacacgcctctgacacccaagtgtgaatgttgaccccaaattagtacttagtacacattagtcttttgagatattaattgatgtgaatgaatttttctttaatcttcttttttccctctaaatttttcctgttgtgagacctcattcactcctatagcttcagctaaaacatttatattaattacttccatggtaacatctttcagtctttacattaagtttcagcttttcttcccaaattcataccaaatttttagacctctctgaggctactggttttccaaacctaatacaatcaaaagacatgctctaccatttgtcaccagcattcttttcattctcccagatctgaagccccagaattatctctgactactctgtcattctgtatgtttagatagttaccaactcctatatgttctgtrcgttatttctcatgtctgtttcttctttccctactgccactattctagattagctcttcattacctgcatagaccattgccattggtcatcctctgaccaatgctttcccaaccccaagtccttctatacaactgccagatggatattaaattcacctgtcctgatggcccactgccatttgagttcagtaaactcaggctagcttgcccaaacctaccttgtcttaaccctacccaccttgtgttctttctttctttctttctttcttttttttgagacagagtcttgctctgtcacccaagctggaatgcagtggcatgatcccagctctctgcagcttcgacctccaagtctcaggtgatcctcccacctcagcctcctgggtagctgggactataggcatgcactaccatgcttggctaattttttgtatttttaatagagaggggtttctccatgttgcccaggctggtctcgacctcctgggctcaagcsatccacccacctcagcctcccaaagtgctgggattacaggcatgggcaaccgtgcccagccacacacactaaattctaatcccagtggaatatttgtggttctattaacactctgtattctttcctatttctatgcctttgttctttctttttgcatcatttactacacaaaataaaagctagggagaaagtggcctcatatcactgtgaccctccacttctcctagttgggaatggctgcagggaatgaaaaatgttactgatgatggggtatcactcatgtgaatgggatagtcaaaagggtgagaaccacaggtggattatttatgttcttaaaatgccccagcatattcacgaggcacaaaactatagtcacacattcaggtgccatgtttgtttgtttgtgttattgattggaatatgtcctcatttgaggtcagatgttgttagtaatgaccatagaaaatttccttgttttagttataattatgttgattgataagcgtattttatgtgtaggtgttattttctgagatatatttaattgagaaatatttttagtatagtcctttcaatgaagtaattcttttgttccaaataacacctataacaaaattacttttagtaattccttattttaagtgatttcacatactttacacaatgtaaaggggaaawttttttttatatgaaacagtggagagaaaattcagtgatgtagaccacattgtgtcaggaagagattcacatttatatcactttatcctgtttttgaccaatataattaagttatattctgcttgtagttaaaattatgtgaacagatggtgaaaaaatttatttaaaataatgcttttaaagtttccaggatttttatccttcatgaaacctaggcttcagtgttcttayaactacccagtatattagagtgctcctccacaccatagttatttcagctacgttgttagtccactattcgcaccttattcatgatgcaatattctagttatatctgtagtgtctgtgtactaatggctgaagatttagatactctatgattaaaatgataaaaactttaaattatgattgtaatttattgtgagtaaattttatgtattttccttatatgaacattttaattacataaactatataaagcataataatctaccaatgtgaaataaatattaagtatttaatgtacttgcacttaataatacttaatattaaaagcatttcagtatttgaattaaaactaagattaaggtacatactagctatgaagaaaatagtaccaactgtatatacgtagcagtgtttgagttgctcttgtcagttgtttttatctcaggttatatttgtgtctcaaaactttgctaattccttttgggaggtgcaaagaaactgagtgaatctcttaggtgctctaacgatcagtcactaggatttgactggtgtctgaatgtcagtaaatgttaagatttgccttaataaaakattttggcaataaagatcttttatttgaaagattcttggggataaagtaaatttggcatgtggtgtgaaataaatcatggataagagtgaaaggaacaattttttgattggttttatgttctatttgaaaagtaagcaagttttagttatgtttttacaactatttttgtatgttgcaattatataacttttataaatattgaagaatattgggttttactgttataatgcaaagccttgcctctcagtttatgtctttcctgatttcatttatattttaagttctctaaaataaaaatattattcaattgcagttgagacctttgaaaggaagtgaatgccattaagcaggctttcttattgaagtaggcgtactctaataggaaaagatctgttttagtgggttagacttctttttaacttataaagaagtctcaatttactagcagtgtacttttgttttaaagcacaagtttaagtgttagcctcagatttttaaaatcatatttgtcagttaacttgaaggaaaaaagtcattaaattatctttggttgataattctaattgaaaatatttcatgcaaatatcttgtcctgtgaggctagaaattagctttgacttcttgttgatttcaaagcacagtatggctttgacagactttacatactgcttatcctattttatagtttcaaatttcaaacctctttacaatggtttcctcttagaatgcatatttgatgcttgtcatgtcagatcttttttgctatttgccttttttttaatcagcatgaaaatgaacatgcataatacattaacaaatcttttcaggtgtattgtaacatatttttgtttgtattatttggaggttaataagtatttccaggatcttttatttattatttgaagtgaaatacattaaatagaaatcagtttttttgaccctgtgactttgtattgcattttgaaaatgttgatgtgttgaggtgtataattgaataccatagaaacaaaatggagatttgaggatgatgaattgataactaggtattttttgtggtgagattctaagatcagttactgttgtccttataaaagtctaatacagtcactcagctgttaaaagcctaatcctctatttaaaaaaatatacaaaaacaaattgtctatctttctgcctgatctcttctcaagtactaacacaatggaaacagtgggtgatctgtcaatgtgtttggtttgtcgatgatggttttgtataaatattgggagggtaagaaataaaatcgcacagtaaaatatgatttcatctgccttttctctgcagctccatggctcatgctgcggtgtgaaattctcattttacacactttgcaggcggagcacatgaattatgcattgagcaagaaaaatctcctgcctcaagtcctatatgcatttacccaggttctgtctctattaccaagatgaattgcaaatggagaaatgtttgatggaatagagctcttaacttcttygtttagaattcagaattttatttttatagtagatcctttaagtatgaaaatgttttgaacttactatggattttttaaaatgaaaaatgaaatataagaggaataccaaacacatcatgaagcattttatagcgttgattcagaatgcaagggttttccaattcagtagaaatgaccattatctattgctaatgttatatttcagtcactggttatttgctgttctcagaaagtcartgaaattctgtccttttgaaagccttttttctctctgttctaggcttctaataagagattatgccaatttcacatgcagctctgttctgtgttatatgtgacctgatatgtatttaatagatattgttacacactcttggctgtgaagtagaaattaaggtatagacttgccttcagctttaaytttatcttgatttgataggtttctaatttttcaggtggggaggttacagttccataaagacagtcatgcaccattgtagcttataggaagctacacccattgtgctcagcatagcattttgataagtcacatgatggtatgctctttttgttatatgttctttcttcacaggaatgatattctagttgagacagcattttcattctgcacttgttttcatttacttgcaacttttaaattttagcttcaaaactaatgtttcttctatttttttcaccatcttagacattgtttactcatttgagaaatggagagagggacaaatactgtttcgttcatttttaaataaggaatgaaaattaaaacaactagatgatrtggagtgttcagtgataaaaataattactttgaagaataaaattagtgcctttttaagtgtattaataatgtatattattatgtggtccttgaagtttctgagtatcaggacaagggaaaaaacaagtgaaatttaaattattttaaaatgttacctatgtataattttacgtaatgcttttgttcatgtatgtgcactgttgtaggagctctaacactgtgtaaactttaaatagtgataaaatatattttgctttagtggtaccgtctcgtggctagaggaatacttcaaaaatatttattagcacattagcaataagctatagacttttggtaaattataagttatttgaaggcaggactatatctatcttggctgttatttccattgcttggcacagaatctaatatatatttaaaattctatacatacctattgaatgaatgaatgattaaataaacaaaaacattttagtagaaactttagttttggtctgtgattgagaaaatttaatgtaaaaaatagtatagattagaaagataaactttgactcaattatatttaacgycctactctttgttggcctttagttgtttgtaatgcacttaatactgttttctttttaaaagatttacaawttttttctgaatatctaaccaaactgtgaacagttcaggcttaggggcactgtattctagttcatggatatatacattttgtaagtacagtagaccgaataagcaaatctctgctgggggaagccctagttatatgcagatatgtttttgaaatatttattttctcaacaaaacagtagatcaagtgagtgagtcctttcaactctaaaaagaaagagcctgggaatgtcatttatagattttaatgaatatctttggcaaagaagtttgatacaacccagtatagaaacataaaatatctagtacaatgcctgtcacaaactatatcagaaaaggctgacctatcacaagcccatcaaaaatatctgagctatgcatatgttatttctttttcttaagtaaacctgtttaaaagttattttcaagaatatttgtggactttctaccaaagagccactttacgtttttatgttagcaagaagttgtccgattgtagaataattacatacctttaaattttgttctgacatttataatttttaaayacaaaatagtttaagagtttgcatagtgggtaagaaatactatatgctaattgagacaaatgttgattcaggaaaacattttatataaccatacagaagtttaatttgttggtaccactaagcagaggaaaaaaaagtttgttttggaatattaaggactactccacagatttttaaaacagaacgtgtgataaatgaaatatttgttattttataggagaaagaaaagaaaacaaagcaagatagaactcctcttaccaaagatgtttcacttctagatctggatgattgtaagtattgtaatttaaaatatttcttctgtgtttagtaagagtattttttatttttatagtacctttcatttacatgtcccaaaatatatcaatatttattgtgaaagacttatagatgaataaggcaagaaagttttggaaatcagtggtatttgtttctttcatctattcagcatatcacttcattatcacatgaacaaatatagatggccaaatacaagtacacaaaattcattttaaaatcttttgctttagtaatttatacttgtttgctaaatagtcatccataccttataacttctacattgtgaaatgtggatyatggggattgacacatgtaacttaaggaggtagaggattaaggaatgtaaatmaaaatggaaaggacatcaccatcttccacttggcacaatttcagtaggaatggaaatgggttacaaagcctttggaggccagtttggctatacctctcagtcttttaactgcaaaaaatctttgtcccagcaaatctaagaattcagaatcctacaaatatattcacccaagtgtacaaagatatatgtatttaccacctccccttaaatcctcctgcatagtgagagagagatagtggtactttgttgcactaggagaagagtaacaagaagtgagatttcatgaatattaaactactatcatttttgatagagtttttctatgctgagagtgagttatgttttaggttatctcattctgtcatagatctgttctgtttatactgttacctgccctgtccccagtagccatggcatatacttaatatagagaaattaaaatatataatagagagaaataacagagaaactaaaaataaaattggagttaaatttgaatcatgttttacacattggctaagattttgaggtttggtatcatccagtgttgctaagatttggagaaacagaagtacatgtttttgataggaatataaataggtacagctctttggagtcattttagcaatatctatcaaaacttaaattgcacataccctttcacctagcagttcttccccgccccccgagacggaatctcactttgttgcccaggctggagtgtagtggcactacctcggctcactgcaacctccaccttctgggttcgagcagttctcctgcctcagcctcctgagtagctgggactaccatcaygcccagctaattttttgtatttttttttagtagaggcgggtttcactgtgttagccaggatgatcttgatttcctgacctcgtgatccacccacctcggcttcccaacgtgctgggattacaggtgtgagccaccacgccccactgacctagcagttcttttccagaaatttatcctactgataaactactgataaaatcagatcttatttctttcttgttttaaacccttgaatttaatggcttaattttgcatttagatgaaagcccatactcctttcccaggtttctcagactgtagatgatctgacccctgtcttcttgttatccacatttcatcctactctgtttttatgcatttgtcacacataccaggctcatttctgccaagggcctttctactgctgttcccctgctgagaacaattgactgatccttacttccccaactcagaagtcacctactcttacacactgtcctagtccctttgagctggcataacagaatacgttagactgggtaatttataaacagcagaaattagttgttcgtagttctggaggctgggaagtccaagatcaaggtgccagcgtatttgatgatwggtgagggctagctctgcttcagagatagtgacttctgtttcctcatgtgacagaaggaggaaacaccatccctcataccacttttataagggcaataatcccattcatgagggtagaacccctataacctaattacctactaaaggccccaccataktctggattaggtttcaacacgaattttggagggacataaatgttcagaccatagcacaaaccttcttgttattcttgttattcttgtcattcttgtcttcatggcatttttcactatctgaaattaccttaaaattttggtacttgattattgtctctttctcccaactaagatgtaagttccatgaggacagggtctctgtgttgctcactgctattcctagtgtacagagtggctcctggcagttagtgggcacccagtaaatattgcttgaattaataaaacatataagggcwtatacaaaartttcattgcagcattgttcagtggttagctctggcctccttgtgatgtaggactaacctgggaacagacaagaataagactttcattttatattttgtatctttctgtgacatttgaatatcttacatatgtatgtttgtaaccttcataatttacaaagtttaaaattgtaaaagaataacagtaaagtacatttaaaagggaactaagagtaaatgttacaaggtactagagtgtactaattacaactttttcttcttatattcaactctggatttcctggcaactacggtaaaaaaagaaaaacctataaaatgacataattgttatagttccattctataaaaaagtatatttttatatgttgagatacaagctttttttttttattttttatttatttatttttatttttattgatcattcttgggtgtttctcacagagggggatttggcagggtcataggacaatagtggagggaaggtcagcagataaacaagtgaacaaaggtctctggttttcctaggcagaggaccctgcggccttccgcagtgtttgtgtccccgggtacttgagattagggagtggtgatgactcttaacgagcatgctgccttcaagcatctgtttaacaaagcacatcttgcactgcccttaatccatttaaccctgagtggacacagcacatgtttcagagagcacagggttggggggtaaggtcacaggatcaacaggatcccaaggcagaagaatttttcttagtacagaacaaaatgaaaagtctcccatgtctacctctttctacacagacaccgcaaccatccgatttctcaatcttttccccacctttccccgctttctattccacaaaaccaccattgtcatcatggcccgttctcaatgagctgttgggcacacctcccagacggggtggtggccgggcagaggggctcctcacttcccagtaggggcggcctggcagaggcgcccctcacctcctggacgaggcggctggccgggcgggggactgaccccccccacctccctcccggacggggcggctggccgggcagggggctgacccccccacctccctcccagacggggctgctggccaggcggggggctgaccccctccacctccctccsggacgggatggctggccgggcrgggggctgaccccccacctccctcccggacggggcggctggccgggcagaggggctcctcacttcccagtaggggcggccgggcagaggcacccctcacctcccggacgaggcggctggccgggcggggggctgacccccyacctccctcccggacagggcggctggccgggcagggggctgacccccccacctccctcccggacggggctgctggccgggcggggggctgacccccccacctccctcccggacggggctgctggccgggcggggggctgacccccccacctccctcccggacggggtggctggccgggcagaggggctcctcacttcccagtaggggcagctgggcagaggcgcccctcacctcccggacggggcggctggccgggtggggggctgaccccctmcctccctcccggacggggcggctggccgggcggggggctgaccccccaacctccctcccggacggggcggctggccgggcggggggctgacccccccacctccctcccggacagggcggctggccgggcagagggactcctcacttcccagtaggggcggctgggcagaggcgcccctcacctcccggacagggcggctggccgggcggggggctgaccccctacctccctcccggacggggcggctggcctggcgggggctgagccccccctccctcccggacggggcggctgccgggcggagacgctcctcacttcccagacggggcggctgccgggcggaggggctcctcacttctcagacggggcagttgccgggtggagggtctcctcccttctcagatggggcggctgggcagagacgctcctcacctcccagacgkagtcgcggccgggcagaggcgctcctcacatcccagatggggcggcggggcaaaggcgctccccacatctcagacgatgggcggccgggcagagacgctcctcacttcctagatgggatggtggccgggcagagacgctcctcactttccagactgggcagccaggcagaggggctcctcacatcccagacgatgggcggccaggcagagacgctcctcacttcctagacggggtggcggccgggcagaggctgcactctggacgctttgggaggccaaggcaggyggctgggaggtggaggttgtagcgagccragatcatgccactgcactccagcctgggcaccattgagcactaagtgaaccagacacygtctgcaatcccggcacctctggaggccaaggctggcggatcactcgcggttaggagctggagatcagccyggccaacacagcgaaaccccgtctccaccaaaaaaatacgaaaaccagccaggcatggcggcgcgcgcctgccatcgcaggcactcggcaggctgaggcaggagaatcaggcagggaggttgcagtgagccgagatggcagcagtacagtccagcttcrgctcggcatcagagggagaccgtggggagagggagagggaaagggagagggacagggacacaagctttttaaaaaaatcaagtttttaagaattgaaatgaaagtttttttgaattttaagggaactttgatcccaacctacattttttaactcaatataggatatagtgtttctctttgtttttaatacccaagtgctatttctttaaaaatctttcatagtcctgcttttgtcagaamcgacacttgaaactctcttgttaacaagtcagttcagcctgtgttttctggattgtctgctaagtgcaaggtactttagtaggtgctgtaatagataaatagaatttagtcattcccttccaaaaactaaaatctagtcagagacacagataacaggacaaataactattgcatacgagagaaaatagagatgcaaagtatagtgaagaaacagagagggagatgaaaacccctcttcagggttttcattaaccccaaattaaaaaactacaaaaaccttgtgaaggaaccatgatctgagcttagagataaagacaagcagagtgccaacttcactgtatgcctcctattagcctgcaatggttctccattgcccatggcatgcagtttgttgctcagatactaaaatgttactctccagtggctttagttctcaactgtgagaattagattaatcttgaaagaaggccagacacattccctgtggtttatctaagaggcacatcataatccacacaggttgtttgctaggtacacagtgcataccaggaagactgcaagtactgaatttcttcatttcttcattcaggaaatgttaatttaatacttgctgtgatctttgtaatctgctacatactggagattctaaatgaataaaatattgtccctacccaaggaactctcaaagtgtaatgggaaaaacagataaactggcaattagattgccgcattatagatgaaatgaggagaaatgcacaaaatactgttcagtatcaaggttcctaatccacctagcrgtatcaaaatttaacttttgagttgagtttaagaaagcatcagttggccaggcctggtggctcacacttgtaataccagcactttgggaggccgaggcgggcagatcacctgaggccaagagattgataccagcctggccaacatggtgaaaccctgtctctactaaaaatagaaaaattagccaggcgtggtggtgcacacctgtaatcccagttactcgggaggctgcagcaggagaattgcttaaacctgggaggcggaggttccagtgagccaagatcacaccactgcactccagcctgggtgacagagtgatattccactacaaaaaaagaaaaaagaaagaaaaaragartcagtcaagctgttagaggcatgaggggagggtatactaggcagaataaagttatggaggagggaaagagcttgctactaccagaaataatgattgtctgtctctaaggcagcaaccctagcaatagactgactctactacaaaacaatttggttatttctcttactatttctctattatatctgttgagggaatgttatcatgagcacaggtattagtcctatgcttttaatcggtttagtggtttctttgtgtctcattttattcatttgtaatttttttaaagactataaaacttccacagtttctttagatcattaagttatatgactctttttcatgggggtcagttaacaatacataagaaaacatttgttctaggataatatatgacctaacagtcttttgttagacttagagatatcaatatgctttctatgtttcaggcatattttatattcctggaaattaaacaatatattttaggaccccataccatgtgctctcagtaggacgatcayaaatcagtgatcatattctagtgttcttttataggaaatgtaaacctatgtcattacattgttagtacaactgacagtgaaatatttaaaaaatctctgtcagccaacaataatcatacttcaaataagccttatgatatgtgatatcacattgttgagtgaattttggtcaaggcagtagagtggagtcactaagaggacagtggagcaagctgtctgagtttcaatcccagctctgttactcactagttgtgacatcttgggcaatttacttaatctctccatgctttagctgctttgtctataaaattgggatggtacaaatacttttgggagtcatttaattctcaaaggatgaaatgacttgatatacgtaaaagcatttagaactgtgcctracacatgataggcattactgggtttagtgatgatgctggtgctgatgatgccaatgatgcagatgatgcagcaaattacaaattaaataacaacatattaagccattatgtattcagtttttcttattcttaaatcttaaggcaaagctttgatcagaagaataattgaataattactgtattagatctacttttagaaaagaaaaaagttttatagaaagtttttaaaataaaaagaagaaaataaaattaacctgtaatccaaacaccccaggttaacattctgacatatcagtttagattctcttcatatgcaaatccccccttccaaattggattctactgagaaactgttttatcayttgctttctcctctgtttaaagtacatgttcttagttggtgtggtggctcatgtctataatctagcactttggaggccaaggcgggaggattgcttaagccccaggaggtcaaggctgtagtgagctgcaattgtgccattgcactccagcctgagtgacagagcaagaccctatttccaaaaacaaaacaaaacctacgttctttataactgtatggttgtcctttatcctgttagaacaaattctgtttaacagatttactgttgttgggaatttagctgttttccattttttgctatcataattagtgaagtaacattcatcattgtaaatatatttttcaatatctctgtaactgtttccttaagataaatttccagaagtagtattgctggaacaaagactttgaagaatttgtttgtccaaaattgccttttaggcttggcatggtggctcatgcctgtaatcccagctacttgggaggctgagacaggaggactgcttgaagttgggagttcgagaccagcctggacaacaaagtgagactcctgtctctacaaaaagatagaaaaattagcggggcatggtggcatacacctgtaatactagctactcaggaggctgaggcgggaggattgcttgagtccagaaattcaaggctgcactgagctgtgattatgccactccactccagcctgagtgacagagaaactcctcaaaaataagtaaataaaattgcctttcagaaagcttgtaccagcttacacagtattaatatgagggtgctatattccttgtaccttcaccaatgctagattttgtattttaaaattaccttttctaatttgccaggtgggcatgatatttcattttaacttgtatactatgacattttttttaaaaaccccatagagtcactttgtttttacacattactaattaaatacttcagcacagtcacctagcctcagaattcactttagggtaagctttcaatgccaactttcatcttgccatacctgcaaacagatgcataatcatctctttaataccagagcacacatcttctgaaattatattaaaacccatccttttttaaaaaacagcagaacttgcttgtggtgtgaagtttcttctcttgtctcttgatggtatttagccaagccacagttgaaatcagaggctgtttcttattcagttttttattcgttacatgggcattctaatattttgaaaggacagatggtggacgggtgggtagatagatgtacaaaggaatgaataaacatgcatttagaacttacctgaaaagttacgtgttgcatgggaaggcaacatattatgatccaagttagmagaagcagtttctaattctatagtggttctaccattcactttttatgaccttgtcaatattaatctccctgtggctcagtttccagtgtcttcaatattaaatgctctttttaagccttctcattgccattggcttactttagtctttttcacttcattcctaaactattgtaaattcttccctactcccaaccctgccttcagtctgtgcattgtactgccatctgattaaccatcctgcaggaccatattcattgtcattcctctgtttgatcgatttttgactgttccccttggtctataggataaatccagtccccttagtttttcaatttcctacctctcagcctttgtttatagcattctgttatccaacaattaactggcttctttctttcctcttattcaaatctcacycttacttaaaaattggacttcattccctcctgttcatgaagcctcctcttccactccttctccagtgatccttgttttgcccctgactctgtgacacttgctaaactgtaccggggttttcagtgtgggtctaaggaagcctgggggtttgaagctgtgcttcagccgtactaagtgagcgtagggaagaccaagagctccactccctccccatccaacctccaggctgctttctctattatatatgttgagattttgtttagtgtttcctttgaaatttttcttctttggccgtatcatttatggactgtattgttacttttttttttttttttttgtcaaatacatgtatctctttttcttaattaggttttgttacttgaggatcttgaacttttttgtctctcacttgctacctttcagaataaatatttgttgttaactttayggattaatatttgttctgccttgttcactggatattgtgagactgaaatgagaaaaagatgctttgaaaagtaatgtcacagctgggtgtygtggcacacgcctgtaatcccagcagtttgggaggccaaggtaggaagattgcctgagcctaggagttagcgaccagcctggacaacatggggagatcccatctctaaaaaaaaataaaataaaaaataaaaaaaaaaggctgggtatggtggcatgcacttactcaggaggctgagattgcttgggcccaggaagggattgcaccgctttactccagcctgggcaacagagcaagaccctatctccaaaaataaaaataaaaaaagaaatgtcaaattaactaaatgttattccctttagggtattatcttggaatgagaatttgttggaagctaaaacttgaccacattgtaatgtattttattcaaatggtttagaaacaccaaaaattaatgttattgtctgttcacacagactagcagaaatgcaaacatgtaaagacacaaatttgyattacatgagaagtacagttatagaagtttgttcaagtatatctgtggamcaaagaaggcacatataagctgtttgcaggtgagccagagagtgttttccttttaaagggtagcttgccagatcgaagttgcaagatgagcaaggcagagaagtaggcaaacagagtagaatataaaaggctccaagacrtagaacaagatcttgggaactattatcccatagagctagtgcataacaatgctgaaattggagataagctggacctgaatagtccagtatggcggccacaagccacatgtaattacttaaattatgcaaagtttaaaatgcatttatttagtcatactagccacatatcaagagtatgttaggcatatgtggctagtgtccactttatcaaatgtagaacatttccattagcataggaagggctgtttgggctggggcagaccatagaggactttgtgaacttaattgaggagttgggcttttatcttgtaggcagttatgagcctttgaagagtcttaagcaggggagtaacatgaccagacttgcatttttagaagatttccaaacttacaggtatcagttctcaagtatatagcagttttagaatcagtcaaacatttctatctagcacatagcttttgctgaaaaagtataattacaagggaattaggtagcctgattagagtggagaataaaatagatataggatttgaacatctttcaagacttctaattccactgcagcattctcttgraagcggttgttattcttatgatagtctggaaaaaaaatgtttctttacttttttagggagattactgggtgataaatgttagtgataatgttatgtgataaaaattttcacaaactattactcaagatatttatatccttattttgttataggatttgccattatgttttgaaagctaagactaataactgccatgacttgataataagttgactaaatcaagatgttaaatagaattgtcatacatttattaatcaaagtaatttaattagatttactaacaaaataaaaatgttgcttttaataatttgaattaaacgttcatgcacatttactaatttgggccttttcttacagttaacccagtatccactccagttgcacttcccacaccagctctttctccaagtttgatggctgatcttgaaggtttacacttgtcaacttcctcttcagtcatcagtgtaagttatttttaaaatccaccagctcggttttcttatgttgccattgtatcttttttattaaaatgtaaatacttgaagtggattcttagttttgaacagattcttctctaagaacaagcccaatttagctaagaccttttaattttttaaataatttactcaaaccattatcttctcaatttttttcccttgttgtccacacttaattatcatctgtatgtttttctctggtattgttatatatctgtaacatacaaaggttcttcaccacattgacgcagtacatatacctgaactgtgccacaaaaagttgtctacattaacagactttcatttccgtaatcgttttattcctaccacactattttttcatagactattaaaaattcatgactgtttttatttaaaagttcaagatttttttttctgtcttatttttgtacatttatttacatgtgttggtgtctttaaaattattctttaatgttatttatagaatgtgatgtgaagtgaggctagaacctacctgtcacaaaataatgcaaaaaccgtcaacatatcatggtatttgaagctgcaacaactgtttattgtgttagcatattatatccactaacttttcactgtaaatcaagcacgctgcgcctaagatgtataatctgttgatatgcttgacctcctgttaatttgttgtcagaaatctgacagactaagagacagaatagtaagctttgatgggcataggtagcttcaatagatctggttctcagggctggcagggtactacatggcatataactgatcatctgagctgcctgggagcatagagctgcttctgccaaaagtgggagaaaagaagtgtttaattcttgtgtgttattatggaaaaaattcctcctttaaagcaaatatgctatcagggctatgcaatgaaatactaaaaaaagctatctgcatttctgttcaacattggtcacctcgctcagaaagtacaggtgaaaagttttaagctacaatgttctccttaagcatagaatgagattatctcttaaccacccagaaatgagtaagaatggtatttgtgattttaatttgcccttgtttctaaaaggaaaagacacattaaaagatatgagggagaagcattgaaaataagcagttaagtcttttatttattcaggtaataaatatttattgagcatttgtggtagtctctaaagaaaaagtgttaatcaaaaaatcaatagtgaagcagttagttccttgaatggaacaggaggtccctaaaaccttggttggcagtaaggtagtgaataaataataacttgggccctgatatcagatgtccagggtgcaaacccctgctttgccacttaatagctatgtgactgtgggcaaattggtacttttacacctcattttcctaagagaatactatctaccgcataggattgttatgagattaatgaaataatatatgcaaagctcttagaacagtgactgacacattgtcattactcagtaaatattaacgaatattctccaaagtgatacgatatgtgataatggactctgagtgtagactcttctactttattaataataagaagaaagcagttgagattagaaaagcttgtagtaaattttcattcatcacaaagtaattgacagactcacccttttatactaaggaaagtatttattgagatggtctcttcaaaggaaagaaaagcactccatctaaagttgggcaaaaaatgaccgccagttgacacggctgagtgaagcaggaccacaacactcactccccaaaagctaacaaaatgatcaaacaagtagcgctaaaaagaatgacaaccagaagttcaccagcaacaataaaatatggacaggaatagaactttaaacaaagaaaatgctagaactctgaaaaatggaacgtgtagaaataaactgaatattctactgcagaatgtcatggctcctaatagcacatccagccctcagaacagtactgagaaaagaagatgaatcaaccagagtttaagcttcctcattatgtgtctgaatttggaaagaagtggacagaagacatcagaggaaaataaagaaaacccctcaagaattacaactcccatataatgctgtgagatctcaacaagtctaggagcttttttggatcctgaaatgaagttcatagatgatagagtacatctataattttaaagtcaacatgttgtcctagttgaatagaaaaaataaaagtaatatataataaactaatattttcaatgatatgtaactgtttgaccatgactacactagaagtagttaaatgatgctggcactcgtatatagaactcatgaatgtgagaactatatgtgcagattgatataggtgtgttattcggcaacgcaaatgctacgggttgtggtatttccatcagtgacataattttccaaacactgaacagtttttctgcaccaaagtacttgcatccctggaaaattgagcctgttaaaatcttgccaaagaaaaaaaaaacttcgtattttatatgaaatgttctaggattgagtaattttaagcacgttgtccaacgtgtttaacgtgtctaatgagacagttgaatgttartagtttcattttctcatagtaggaaacagagcttttgtgagggacatggtacagtctgtatcgtcaggatctgccctattcattactacgaacatctagcattcctggccttcactccttaaagctagtggcatcttttactgtccctccctccggttgtgttctagttgtaaacgtcaaagcattatgtagcagtgaaaaccacaggctcttgattcagaccacctgtgttcaagtcagagttctgcgctttacaaattagagacttcgggcaagccagtttacctcccagtgcctccattattttcatctgtaaaatgatcatgctacctacctcataggattgttgttggtattaaatgattaacaaacatgaaatgtttatgacagtacctgatatgtactaataactaaatatttcctgttatcattttcattacacgtacatcattagtgcagctttataaaggaaatgaagtgtgacccaagaaaactgtgttttcttcttactattaaggctgtacatagatatgctgaaacatgaaaattactatggattctactttaaagaaaaaagagtggggatactgctgattgttgaaaccaaggaaagggtgattcaaagtaatagaatcagtagctataaaaattgtgatcatgtgattgagtataaatgataaaaataagaaaccaaaactagaaggtggggaaagatgacaggatgcatggtaattattttttcgatgtaggtaggaaaacactccgtaatatgcaaaattgaaaccgcttttgtttttgtttttaatgaaatgcaaacctcttaatgatttgtatatactcaaagaacatctatctgatgttttggagggttttttattttttggttttaattccatttctttttcttcaaagtaagattatagtcccattctaagggataatttgtctgtttctctgtgtatctgtcagtggttacagaaatgtcacgttcaccatggttaacagttactttagatggaatggtttcagaatgacttgttgattgttttggtwcttttctgtaatgtttaaatgttttataataatataatgataactttttaaaacaaattattactataaaaatgagcaaaasgacwagaactggaaaaattaatttatggtataacaaatcagaatagtgcttactcgtaggagaattagtgcttataaggaaatacaagagtagcttctggggtgctgataatgttctgtcttttgatctgggggctgttacatgggtgtattcagtttatgaaaaatatcattgagctttgcacttaagatatgtgtactttatgtatattctacttcaataaaatatttttaaaagtggacaaatgatataaacacattattcatagaggaggaaatatagatgataatatgcgaaaaaggttcagtggtagtaatgaaaaaatgtagaattaaagaaccatcttgcctgtaacattagcaaaaattacaaaaaccaacatctgttgttgctgaggtatgcaatgaagcaggcattatacactgctccactggtaaaagtataaattatgacatcattctggatggcagttgggccatctgtataaaaagccatcaaaatatgtataccttttgaccaggtaatctcatgtctagattcttcttctaaggaaataattagaattacacagatttatgtgcatggktgttcaaacctaaatgtctagtgatagtagtgatggttacaaaaagtatgcaaaaacaatttaaggaattttgtacaattattaagatgtttttattacatattttaataagataaaatatggtataatgtmagatggaaaaaaggatacaaaatgttatatatataatctaaattttgtaaaattgtacaattgtactgttttcaaatacaaggaaattgaaagagtagaagaaactgcatcataattttaacagcttttctgaatgatgagattatggatgttttatatttaattttcttctgcatatttttaaatattttccagattttctctaatcaagatgtaatacatctattacccaaaaagcaatacttgtaaaatagaaatggaaagcacatatatgaatgacgaggattcctttttatttgtttgggkctttttcctttccttttccttttcctcttccttttctcttcttttctttttttttttttttttttttttttgacagggtctggctctgtcgcccaggttggagtacattggtgtgatcttggctcactgcaacctctgcttcctgggttcaagccatccttctacctcagcctcctgagtagctgggactacagccacctgccaccacaccctaatttttatatttttgttggtagatatggctaatttrttggctaattttttaatttttgttggtagagctagggtttcaccatgttgcccaggctggtctcaaactcctrggctcaagtgagccaccacactcaaccagattcctttttattgacccatctgatatctgtctttctagatcaccactactaattaattgggtgatattgagcaaatcacttggttttttttcaactatgaaatgatagcaaggcagatttccatgtttccttttaactctgatattctatgtgtgtatgaacctaagatggaatttcaaattaatgaaaataatttcactgggataatttgaataagtttgttaaaataaagagatgaaacttttttagtttawatgatgactttctagtccatctataatttttatttattctagtaaatgttatttgttttccttatgtatattagattttttcaattaacaaaatatttacagtgaaacccaaagaacaattgctttttcacagcaaatatttttctaattaaaaaagtcactatttgttcctatccttttaattatatattcagaacacagagattttaaaaaataatgcctgacaaacattattatcattataaggaaaggctttagtttttttaataactctrtaataaatattatttataaacacagcatgttttagtcttgccagagactggccattggccaacagatagctctattgagggaacattttatttcctgctgtagtatctgagtgaacaaaccggttaacttagtaaattttttttaatggattattatttggtcctgagtttaaatcaagacctgcaaacacataaacatcaatccttaaaatgtatgcttcttgcagggatgaaaaaagaatagggggaaaaaagacaattttgtgtgtaagaataaatgtgaaataagaataacttgttcacctctggtattagaaatgttgagtgaaactttgatctgttgtgctttaaattactttgtatatttgggtcacaaaaattttaagtgaataaaacagttaaagttaactattttagtgtatgttctgctttaactggtaaacatcaacatgaaaccttgactcatcctttgcgttttttgtttcttatcaaactagttgtgtaagaaaatatatttatttactcactatttaagattatgtttttatggaaaaatcagagtctgaccttcctaggttaataggttctcaacgtggccgggcgcggtggctcacacctgtaatcccaacactttgggaggccgaggcaggtgggtcarctgaggtcaggagttygagaccagcctggctaacatggtgaaaccccgtttctactaaaaatataaaaaattagcctggggtggtggcgtgtgcctgtaatcccagctacttgggaggctgagacaggagaattgcttaaacccggaaggcggaggttgcagtgagccaagatcgcgccactgcactccagcttgagcaacaagagcgaaactccgtctaaaaaaaaaaaagsgttcccaaggcaatccccaaatgtcataataccataatggagatatactatctgtgattctttaacacctaataacaagtcagaggttttctgtggaaatacacttttagagttccaccttaaaatgctaagaactcatttagaaagacagagtgacatttgtgaaatgcattgaatctggagcccaaagacctggttttcacccttgcctgagctgtgtttattatcattgtgactttgagcagttctttgacttgcgtaaacttccgttttttaatttacaaaatggagataatacttttcccaaacactttttttgttatgaaaatcaaatgaaataatgatcccgaaaatgtttgaattctattctgtagctgtaaaccctgaaatctagtccaatggcaaaatgaaataatgatcctgaaaatgtttgaattctattctgtagctgtaaaccctgaaatctagtccaatggccgtggaacaagtggaatagtgatttggcaacagataatagattcagatttgaggatcttggcctggatgtagactataggaggaaggattcagtcaaaattgggattgacagggtagagaggctccaaggcctttatgttcagtaataacatagggttgatgtcacctattccatttytttcccttcctcccgccctcaaattggatactagaactatgcaggaaaagcgactcagtgaaacaaaaaacataaggtcctcaggaagcaccaggatctgcagaatcagggactgaaaaacccttattgtacasaaaggattattgcttagtctgcccagcaaagttggccatttttgtactgggcatatctaaatcaggcagaagtcactgcacgccaaacctgaaagcttgtgatgggattataactgttttttttttttattgcaaagaattcatactaaaagtaaatatcagtttgctctaaaatgtttgggattgatttcataatttttctgttcctcagaacttaaaagggaaaagaaagttaaatttcttgagtaccttcagtgtcttaccgagttaaggaaaaaactacagatagttatattcctaaagtaatgtaaaaggagcagtgagtggtacatgctattccttaataacaaactttttttgtttcctatatacctctttaatacaaccaaggatagtgttacagtaattcacacgttctataaaataatgaagtatgccgggtgcggtggctcacgcctgtaatcctggcactttggaaggccgaggcgggcggatcacgaggtcaggagatcgagaccatggtgaaaccccgtctctactaaaaatacaaaaaaaattagccgggcgcagtggcgggcgcctgtagtcccagctactcgggaggctgaggcaggagaatggcgtgaacccgggaggcggagctagcagtgagccgagatcgcgccactgcactccagcctgggcgacagagcaagactccgtctcaaaaaaaaaaaaaaaaaaaaaaaaatgaagtaatgctgtgaaaaataggctcggcaggaatttgcacgtcttgcatccaagtatgtctcttccttgtgtcrtattctgtgctgaagaaaacattagcatgccatgaactgaagccaaatatcagtgggttaagccatctctcatcttgttctttgccttctcttctttaagactagggaattggttattggataatgctcccaagtctggccaataataactcaagagtaccctgaatcaacatctatggcttttccctaaaccctgatcttagggccatccatttgtattttgaaatgatcaagctatcctttactccagctgaaaacttacttacctgatacttcatcaggtctgctcacaggtgtatcaaagagagacggtacctttggtgaaaccattgtttagctggttttcacttcatccagttaccagccaatcaaaagtttttccaccgatcatattttcrtaccattgattgtattaacctagtttaaatcaaatctaaaatatgtgtgcttattacaattattgaatggttgcatgtgagggttgttgggttttgtaaaacaggaagcttatttttaaaatttttaaagtggtgaaaagtaggcttctctaaaaattagttttaacagtgtgtttgcaaaaaaaaaaaaaaaaaaaaaaaaattggaggcatacccagtgggtatttcagagagtaatttggaaatattcactctagttgaataatgtattctccatgactcactaatcgatgtggctacacatgaaaacatgcaagaatgttcaccgacacattgtaagagcaaaaaaaaaagaaaaagaaaaaaaaaaaagaaaattggaaactacatctatcactagaatagatacataaattgtrgcatgcatatacaatggaatactgtgccagttgttaaaatgaatgaactggaaatacctgttagacaaatctcaaaaacaatagtaagaaacatcacaggctgggcacagtggctcacacctgtaatcccagcactttgggaggctgaggcaggcggattgcttgagcccaggagttccagaccagcctggtcaacatgacaaaaccccatctctataaaaaatacaaaaattagcagggcatggtggcacacacctgtggttccagctactcgggaggctgaggtgggaggatcacttgagcctaggaggctgagattgtcaagagccaggatcgcaccactgcactccagcctgggtgacagagtgagacctgtcaaataaataaataaataggaaaattacaaaagaatacataggaagccatttgtagaaagtataaaagtatttagaattatttaattgatggatgcatacatatgtggaaaatgtttaaaaccatacttgcaactggcgaacaccaaatccaaattctggttacctctgatgccagaagcaaaaaggaaagcaatctgggatgggtatacttgtgattgtcattcagatktttaaagttttactcatgatgctcgatgggggagggatgttggattttgtttttgttttaatctattctttatacttctttgcctgaattattttatatacaggtttttataaatgtgagctacattaaatatatactaaaatccaaagtataactaaaataaaactatcaatagtacacttaatacttgagtccgggttttgtgcttccaaattctattccttttcttccatatctttctgctttcctttagaattatatactaaatcaatctttgtatataccgtatgtkgtaaactccttagaattatttaattaatgaactgcatttatatgtcctgtaaaatsttatttgctccatggtaggtcttttgcttcttagatggtgcaaacttagtccatccttcattccatgcttaattttcttaaattctcaattagagttcagattaatgagggttttatttctgtaaaattcttttgtaaaaaagaaaatgtcttaagattcctgttccaaggaattatataagaaaattgtaatgaaatagaaatatttcaaccctttagattttatttcaaaaaaaaatgttaacttatgttagccatgtagttgattgtggatggtacctttttaaaaaacattcagtaagaagaattgacagtattctaacatgagtttaaagcaggatttgcctttgrcaaagccagacacagatggtctgactttcagatggtggaatactagctgtattacttaaggcttgcattttgcaatgtattcatgaatatagtcaataaaaatttgcaatacctaagagctttcatatctgaaatctgtaaggcaggtaacaacacatgttcccctaatgtttatgttgttcatagataccagtgagattctctagatatttgcattctaacatacatgcagactgaaaggctttattatagcttaatttcatttacttaaaagctttattgaacacagtatgactaaatcactatgctaggaattacagataacaggttaataaaacatagtcccttcctaagggagctcacagtttagtgaatgaaaaagactagaaaacttcattataggagtacagacaagggagcaagtaattctgcaaagagtgcctatcaatatggacttggatagcgatatttgtgttgggtcttggagaatgattgagtttaccaacagggaagaagaggagatgcgtatttcagcccagggaatggccagatgaaagagagaagataaaatgtatattatgtttttgccaaattctgtagctagatatagctagtgtacaaaatgtatgttttgggggagagagaagtagctactggytgaaagccatattgtgaaacagttgaaaggagttctgaagattttagagcaggttattgatagtgatcagatctttgttttataaagttgtgtgaaagattaattggataggaagagaacaaaggaagaatttggtaacttttaggtagataactgagatttgcaccggaatgattatctggatagtggtacccagttaaccaagatagaaaataaggargaggaaaggacaatgacattgaaattttctttggaacatgttactctgaggtgcttttggaacatcaagttagagatgtccagtaagaaggtaaaatccattctggattttagtgaaaaattagggccaactaattagaatacaagcatgtgcacatgtgtgtgcatacacacacatcctaaagccatcaggttatgggtaatggtttaaggtaggggaacagaagggaaaccttgtgggtgagaagagacaactgaagatggaatcctagggaacatcatgctttagaagacaacaaagaaaaaagccaaataaaagcagtgaaagaaggaggtgagtcatagagcagcgtgttatgaggaaactcacaggttactgagggaaatagtcaaatcattaatgtagtaagtgctgaactagagacaaatccaccaagttctcctgggtgacaaagatctcttagagaagatatacatatgtaaccttggaactgagtctggaagatgagtttgcctaggtggctggagtagaagaatgacgctcctagmagaggaactagtatacctgaaggcttggggtgtggaagaactggagtattgctgaaacagtatttcaatgtagggtttaagtataacatgtgtaaccagatctgatacttgagaagtatgttggtgacgcactgtcatgggaaaattgtagtaatgattccttaacttgttttccaatctttttgtgtgccggtacatgtagaaaagtggcaatacctgtaatgcattctagggtaaacaatgctgaaggaggttggaggcacccagtctaggagctccagctaccacagaccccagttggccttggggattcatggggggcagtatcgcagcacacctctgacccatttgtggcaaattagtgagggagctctgacttagctaccataaagataacagatttgatccttgtggatcacaaaccctaagtggaatttaattttggacagtacaggaaggctcattaagaaaagtgatcatttcaaaatgcaaaagtggtacactgaggaatagtaaggaatttcaagaacaatccatgaaacaaacaaaaaggcctaatttgttgttgtatgcctcttggaggtagccaaactcaaggttaaaggcacagtcctccagactaagttggcccaagatttctgacaccarctgtaactttacggatttcccaaaaccactctctagttcagtaattttctagaacaactcagagaactcagaaaagcactgtgcttaggattacaattttagcaaaatgattcaaattagaaccagccaaacgaagacacacctagggcagattctaggagggttccaaatgtgaaacttttgggttaccctactggcatgaaaatctggcaatatgcatggactattgccagccagggaagctcactgaaccttgacatccagagtctttattgaggcttcatcatatagccttgattgtttgaaatattgccacatggttgaactctagccacatagttgaactcagtctccagccctcccctgtctctagaggtcaggctgatattaagtagctcaacgccccaaccctctaatcacatggttggtctttctatcttggccagccttatcctgagttatctccttagcataagctatctgagggacctgtcatgagtcacctcagtggcataaattatcaggtgtggtcccaaagggcccaccatgaataacaaagacacttttatcactggggaaattccaagggtttagaggtcgccyctcaagagctaagagaaagtcctaagcctctttaggttaggtcaaattccttactacacatatgccaattaagtgttttattcatccaacatgtatttattcagaccagaatatgaagccatggatatagtggtaaacaagatgggaaagcttcttgccctgagaaagtttatagttgactgggaaaataaagaaaaattgcctcaaagtatgtaattacagtataccaagtgctctcctttttgtaacagttttgcccatttggaagtatccgtagatacaagttgtctttatttgtcattatttctctggttatgaacataaacactattatttgatatttgctaaattccacatttccaccttttttcctctgtaccattataacttaaaacctaaaagagttactttcaatatttgacacagcttaagatttagatayctgaactactcttctcctttagcaagaagtagaaggatgattttcatagtccgtactcttcgccgtttgctttccttgaattaccattgaggaccatcactttgtcacttgatgaccatgccagggtgaagctagcatggaatatcagtagctagcatggaatttcctatgaccagcaaaaagatgacgttaagtttggcagcatgaccaagaagccctgtactcatgcccctcagctccccatggatttataggccgaaggataggaagaagcaaccccatttgtaatccacttgaatttgggcacccagagtggtacaaagaaaagccacaaagcaaatgtagcttcygcagtttttatcatttgtcctatcaggttccttatcaaaggaatatgggaaattggctagcaagtagtcttacggatttttgctattgtcgaaaattggcagccagtggagttacaactcttccgtgagttagggataagtccctgacccagtttgtgttgtaggaactcaactgggaaacagaagactcttatcaggcctttcctttgttttggtatggaagtcactctgttggttttaaaacaataataagaaaaaaacaaaccataattcatgaagaagtatctgattcactccatctgaaatctactaaaacagtatttggaattattaggataattgtgcattataatagtaactattgtgattgaagttagttgcattgtatttaggatttcagtttctcttgagtagtcttatcttagatatatcctccccaaccacccccctaccagttctcctcactctcttttaattgctactagggtattttagttttgttttccaatstcttatattggcagagtgctagacttttttcaagttggtctgcaaggagagattgctttgagggacgtctttgttgaatatgtacgtttactaagttatatgccagacatttcatgaatatgtgatctcattcaaaaaattatatgataaagtttttctaatatagtagaagaatcatcttttttttttgagacagggttttgcttttgttgcccaggctgcagtgcagtggcgcaatctcagctcaccgcaacctccgcctcccaggttcaagcagttctcctgcctcagcctcctgaggcatgtgccaccacgcccggctagttttgtatttttagtagagatggggtttctccatgttggtcaggctggtctcgaactcctaacctcargtgatccacctgtctcagcctcccaaagtggtgggattacaggcatgagccaccgtgcccggtgaagaactatctttaaaaaaattttttttttccattttataaagttaaggtatattcaggccccaggctaagagacaagtccagctaagatcaaattcctttgagtttggaagagggagaaattgtaagtcaaaattaaaaataattttgtcattttaaatttaggaaaaatcctttatttgttctgatgaaaatgtcagtagtcatggaactgtggtaaaaataatgaaaaatcactggcctgggtctgcttcaattgaaaacatttttaaattaaagtgtgacagtattttgtgcttccattgcctagccatgccccatcttattcttttattcaattctctgggtatgaggttgctttaattcttaaattaaaccttaaggtatgtcatcctgctgcttgatctttctatttctatgctacttctgaggtactcataacagaccattttcatctctccttttcctagattactaaaaggagctactttttaaaaagagattgttattaatttttagttggaatttttttattgcaaaatatttttaattggcttaagcaaatatgtgccagtttgtcctaactggcggatagtactcataatgttagttgttagtattttagtaaaattccccacagtgacaaatcygctgaatcagatgctaattatagttattaatgaactagcaattatttgtggcaaaaaacccaggtcacccaaaaaaacaaaggaaacatgcacacagatctgcaagaaattgaaggattaaagaggttgtgataaagaaagccttaggcctttcgacttcccttcctcctcctttgtggtaagtagttctgctggctgtgagttcacttgtttcagagctgagagttcactgaacatctatccacttttccctaagattatgatttttagcttttaattattattattaaatataccacagtaggaaataagatgatttttaaaatataatttatttaaaaatgtaatatgtttttaaaagattcatcttttatggcagttttgtcatcttcggtgaaaatatgtaaataaatgartttctgaaattctatcttttaaaaaacagttcatagtctgaaattatgcatttaaaaaaggcagttcatagtcacacaaatttgatggaattttgtgtgactatgaattgctatatttcaaattttgttgctactgttgaattgtggtattgaaatgaaaaatatagtttttaagcattatggtatcttagattatgcattggtcaatcatatagcaaatattatttaattacatgtcagccaagttaacttctgttaccactgttccccttaaaaacagtgccaaatttttttctgaacacagggcagggcatggtatggaaattaataattcttattctaatagtattaaatctcttaacatgagaaacctgacctaaacatggaagatgttatgatatttacaaaacctttatttctcttcgaaggaagagaaacgaatttagctgtagratacatgtccaatgaacactaagaattgattaccactgacaagagagtatggagtaaaaacaagtacagtatataaccctaatatcaaagaaaagtaaaaaccacttaacttagaatatatcagacgtgggctgggcgtggtggctcacgcctgtaatcccagcactttgggaggccgaggcaggcagatcacgaggtcaggagttcaagaccagcctgaacaacatggtgaaaccctgtctctactaaaaatacaaaaatttgccgggcatggtggcttgtgcctttaatcccagctactcaggaggctgaggcaggagaattgcctgaacctgggaggtggaggttgcaatgagcggagattgcaccattgcactccagcctgggtgacacagtgggactccatctcaaaaaaaaaaaaaaaaaaaaaaaaaargaatatatcagacacattgttactcaaatcattcagggaatataattatatacagcttttataagcctatcagtaagtgtttttccttaaatttgcagctgtttttcattactgaatttatgacttttcccctccaaatgttaatatggaaaatctgctttacacctctgtacaaataatactccccccaaaaaacaaaacagaaaatttcagcaaattccaattcagaaggcatatacctttagattaagagagatttaaaagcgataccagccaaatgtgttcatcttgcttgaattgtgattatctctaaaatgatatgcgtgaaatggccaaggaaatgtgaatactgtattttaggtgaaattagaggaatttttgttttatatcatttttagatgtgataatattgtatgttttctttcaaaatctttatctgttacatatacaaaccaaagtatttactgatgaaataatacatggaatttgcttttcaataattcagaagttgagtaaaagattasattaaacaagattggctaatgttggtaattttgaaatttagtgctcagtatctagttgttcatcatatcagtgtccctgctcctgtatacatttgaaaatttttcataatgcgtttttaagtgcgtaatttcagaaactcattcatttacatattttcactgaagatttgacattcatgcttcatagaatatgtgacctgacaaaatatcttgtaaatataaactagtacatcaaagtttacattcakttcaggctgttagctatgaaattagggaacaggattctagagtcccttccagctctaaaatttctagaaatctaaagaaagtaagtggagagacttcaaatggcttcagtaaacatcatcagcataggggaagggttgccttgtcttttacattagaaatatagatgtaataatattggagtctgggtttctggaagatagaacaggacctttttttattcccagtgcttaatacataataggtgctcatcaaatgtgtttggaatgaattaacccttcctattttccagagtcatcagtatagaacccattaacactgctgtcagtttaaagaactccattggtgtttgagtgtttatttatttttattttatttattttaagttccaggatacatgtgcaagatgtgcaggtttgttacataggtaaacatgtgctgtggtggtttgctgcagtatcaacccatcacctaggtattaagcccagcatgcattagctatttatcctgatactccccctcctcccgtgccccctgacagrccccagtgggtgttgttccattccctgtgtccatgtgttctcattgttcagctcccacttataagtgagaacatgcggtgtttggttttctgttcctgtgttagtttgctgaggataataacttccagctccagccatgtccctgtgaaggacatgatcttgttcctttttatggctgcatagtatttcatggaatatatgtaccatattttctttatccagtctatcatagatgggcatttgggttgattccatgtctttgttgttgtgaatagtgctgcaatgaacatatgtgtgcatggatctttataatagaattatttgtattcctttgggtatatacccagtaatgggattggtgggtcaaatggtatttctgcctctagatctttgaggaataacctcattgtcttccacaatagttgaactagtttacatttccaccaacagtgtaaaagcattcctatttcttcatagcttcgccagcatctgtcgtttcttgactttttaatygccattctgactggcatgagrtggtatctcattgtggttttgctttgcatttctctaacgatcagtgatatggagctttctttcatgtttgttggccacataaatatcttcttttgagaagtgtctgttcatgtcctttgcccactttttaatgtttttttttttgtttttttcttgttaatttgtttaatttccttttagattctggatatcagacctttgtcaaatggatagattgcaaaaatcttctcccactctgtaggttgcttgttcaccctgatgatagtttcttttgctgtgcagaagctctttagtttaattaaatcccatttgtcaatttttgcttttgttgtagttgcttttgacgttttcatcataaaatctttgcctgtgcctatgtcctaaatgatattgcctagattttcttctagggtgtttacagttttgggttttacattttagtttttttttttttttcttgagatggagtcttactctgttgcccaggctggagtgcagtagcgtgatctctgctcactgcatcctctgcctcctgggttcaagcaattctcctgcctcagcctcccaagtatctgggattacaggtgtgcaccacgatacctggctaatttttgtatttttagtagatacggggtttcaccatgttggccaggctgttcttgaactcctgacctcaggtgatccgcctgcctcagcctcccaaagtgctgggattgcaggtgtgagccacggtgcccaatcacatttaagtttttattccatcttgagttaatttttgtataaggtgtaaggaaggggtcyagtatcaattttctggatatggctagccagttttcccagcaccttttattaaatagggaatctttccctattgcttgtttttgtccgttttgtcaaagatcagatggttgtagatttatggtcttatttctgagttctccattttgttccattggtctatgtgtctgtttttgtaccagtaccagkctatttgggttactgtagccttgtagtatagtttgaagtcaggtagagtgataccgccagctttgttctttttgcttaggattgtcttggctatacgggctctttttggttccatatgaattttaaagtagtttttactaattttgtgaagaatgtcaatggtagtttaatgggaatagcattgaatccatgaattactttaggcagtatggccattttcatgatattgattcttcctatccatgagcatggaatgtttttccatttgtttgtgtcctctctgatttccttgagcagtggtttgtagttctccttgaagagatccttcacttcccttgttagctatattcataggtattttactctctttgtagcaattgtgaatgggagttcattcattatttggccctctgcttttctgttgttggtgtataggaatgcttgtgattcttgcacattgattttgtatactgagactttgctaaagttggttatcagcttaagaagcttttgggctgagatgatgggttttctagatataagatcatgtcatctgcaaacagaggcagtttgacttcctctcttcctatttgaatactctatttctttctcttgcctgattgaccagaacttccaatactatgttgaataggagtggtgagagagagcatccttgtcttgtgctggttttcaatgggaatgcttccagcttttgcccattcagtatgataattggcagtgggtttgccataaatggctcttaattattttgaggtatgttccatcaatacctagtttattgagagtttttaacaggaaggaatattgaattttgtcaaaggccttttctgcatctattgagataatcctgtggtttttgtctttagttctatttatgtgatgaattatgtttattgatttgcataggttgaacaagccttgcatgctggggatgaagctgacttaatcatggtgggtaagctttctgacgtgctgctggatttgatttgccagtatttaattgaggatttttgcattgatgttcatcagggatattggcctgaagtttgcttttttttttgttgttatctctgacaggttttggtatcaggatgatgctgtcttcataaaatgaattagtgaggaatccctccttttcaattgtttggaatagtttcagaagaaaggttatcatctcctctttatatttctggtagaattcagctgtaaatccatctggtcctgggctttttggggttggtaggctatttattactgcctcaatttcagaacttgttgatctgttcagggattcaacttcttcctggttcagtcttggtatttacccatttcttctagattttctagtttatttgcatagaggtgcttatagtagtctctgatggttgtatttctgtggggtcagtggtaatatccccttcattattttttattatatctatttgattcttcctcctgctcctcctcctcttccttcttctccttctccttctccttctccttctttcttcttctttctgctttcttcttcttcttcttttagatggaattttgcccttgttgcccaggctggagtgcaatggcatratcttgacccactgcaacctccacctccggggttcaagcgattctcttgccttagcgtcccgatagctgggattgcaggcatgtgccaccatgcccagctaattttgtatttttagtagagatggggtttctccatgttggtcaggctggtctccaactcctgacgtcaggtaatctgcccactttggcctcccaaagtgctgggattacaggtgtgagccaccacaccaggcctcttttcttctttattagtctagctagtggtctcttttattaatttttttcaaacaaccagctcctggattcattgattttttttttttcgaagggtttttcatgtgtctgtctccttcaattctgctctgatcttggttatttcttgtcttctgctaggtttggggtttgtttgctcttggttctctagttcttttagttatgatgttaggatgtcaatttgagagctttctagctttttgatgtgggcatttagtgctataaatttccctcttaacactgctttggctgcatcccagagattctgttacattttctctttgttctcattggtttcaaagaacttcttgatttctgccttaattttttacccaggagtcaatcagtagcaggttgttcaatttccatgtagttgtgtggtttcgagtgaatttcttaaccttgaattccaatttgattgcgctatagtctgagagactgttaagatttcacttattttgcatttgctgaggagtgttttacttccgatgatgtgatcgattttagagtaagtgccatgtggcactgagaagaatgtatattctgttgttttgsggtggagagttctgtagatatccatcagatccacttgatccggagctgagttcaagttctgaattatcttcttaaattttgtgtctcgatgatctgtctaatattgacagtgggatattaaagtcacccactattatcatatgggagtcttaagtctctttgtaggttctgagagcttgttttatgaatctgggtgctcctatattaggtacgtgtatatttaggttaattagctcttcttgttgaattgagccttttaccattatgtaatgcccttctttgtcttttttgatctttgttggtttaaaatctgttttgtcagaaagtaggatttcaacccctgcttttttctgcttttcatttgtttggtagatttttgaagcttagtttggccagatatgaaattctgggttggaaattcttttctttaagaatgttgaatattggcctccattctcttctggcttgtagggtttctgtgagaggtctgctgtcagtctgatgggcttccctttgtaggtgatctggcctttctctctggctgcgcttacactttttctttcatttcgacattggtaaatctgacgattagtgtcttggggtcgatcttctcacggagtatcttactggggttctctggattttctgaatttgcatgttggcctgtcttgctaggctggggaagttttcctggatgatatcctgaagtatgttttccaacttcttccattctccccatctcttttaggtaccccaatcattcataggttaggtctttttacataatcccataattcttggaggttttgtttgttccttttcattcatttttctctaattttgtctgcctgtcttatttcagcaagatagtcttcaagctcagaaattctttcctccggttggtctgtttggctattgatacttgtgggttgcattgtgaagttctcatgttgtgtttttcagttccttcaggtcatttatattcctgcctaaactggttattctggttaacagctcctgtagtgttttatcacggttcttagcttctttgcattgggttagaacatgctcctttagctcagcaaagttcgttattacccaccgtctaaagcctacttctgtcagttcatccatctcagcctcagcccagttctgtacccttgctggagaggtgttgtggtaattgggaggagaagaggcactctggctttttgagtttccagcagtttttcattgattctttctcatctttgtgactttacctccaatctttgaggctgctgacctttggatggagtttttgtggggacttttttgttgatgctgttgttgcttgatgtttgtttttcttttaacagtcgggcccctcttctgtagagctgctgcagtttgctggggcccactccagaccctattgtccttgctccctcctatacctggaggtgtcaccagtggaggctacagaacagcaaagatggctgccttctctttcctctgggagcttcatcccaaaggggcaccaatctgatgccagcaggaatgctcctgtgtaaggtgtctagcgacccctgttggaagatctcacccagtcagggagcacaggatcagggacctgcttaaggaagcactctggctaacccttggtggaggggttgctctgtgcgggggcgggaatcccactcatccagactgcccggattcctcagagctagcgaggggaaggactaagtgcactgatccaccaagaccatggctgcccytccccagagtggctttgttccagggagatcagagttctgtccctaaacccctggctggagttgctgaaattcctgcagggaggcccagctcagtgaggaggaatgggtccatgttcactctaaagaagcagtctggccatgatctgccacagccactgtgctgcgctgtggaaaattcctccggggtccaaaccgcccagtctccccggcactggcaggggaaaacggcagcctggagctgcagtgatggctgctgccccttgcccgggagctcggtggtcttaggcagcaggcagccacagtgatggcagctgccccccttcccctgccaaagctcagtcatcttaggcagcaggcagctgtatgatgatggctgcccctcttgaactcacgagtctcagggagtctccagccgaggggccactgagagtctgcacagctgtgcttgggacccaaggccctggtggcatgggctcacgaggggatcttctgatctgcgtcttgcacagatccatggaaaaggcgtggtttcctgggcgggatagtacaatcactcaccacctcccttggctgggggtggaagctcctcttgccccatgtggctcctgtgtgggctgttgctccaccctgctactcctcactctccgtgggtcgtgccaaccacctagtcagtcccagtgagagatacctcagttgccggtgcaggattcactcaccattttcattcttcttggtgaaagcctctgaccacagctgtttctagtcagtcatcttggcccctccccactggttaatatgttagtttattacattactgagagaattattcccatcaagcccatatctagaaagtggttgtgctacttacacattccttttattacttagcatgtaatatttaagacagtaaaatggggattaagttattgctttaaattatttgactaaacgtagcttaatattccattctttatatttcttaaatgctctctctaaaaatacagcatggtaagctgaaaaatgaaaaataacattttgattttatttttctgtcaatagagcagatctaaaaatttaaagcacatctttctaaggtaacatttacctcctcacatctttagcagctatcagacatgacatgggacatattcattgaccctaaaaattttcatcagaatcatgcactgaaagggggcagccccagccagacaagaggctcatttcaattttaacggctgtaattaaaggttaattcactgagtcaggattaacaaggaaagtacaaatgataggcaagcagctgcctttataatacaagattagaacaatgcaattacaataagaattagaaaaaatcaacttccagaaagggtcttttaatgaatgaattaaattgtgatctctaaacatgcgtatataaggtaatgcttcttaaggaatcatataaattgatactgtatatctaagcatattatgttaaatgtggaaacaacagttaacactaaaaactttcattattagtaagttgcccaaaaatgtacttgtatatatctgtacatgatctttttaaatggcaaaattttttccctacttcatgctccttttttttttaatgtccactgtgtttacctgaattgtaattgatctttccctcttcctgcccgaccccccctgcaagtacttcttatgtttataccttaaatccatttttcttatagaacgtattcctaaaactccttttccacctagtgttaattagaaagttgacaagtgtcattttcaactttattatgttwacatattttatcatttttwaaaaaaattaagctcagtactatattttatgcagatcctgtttattttttatttgatgtacactttaacctcattgatccaagcttttataggtgtcgtagattgctagaaaactactagactacgtattatattaaacattcctatgtgaaagtcttttcatagtgaatggcacatagtagggcttcagcaaatgttatcacttcaatctgtttttgtgttactgtgattgaggccatatactatttaagaatttgttggatcctgcattcaatcaaatatttaccatgtgtcataggattcaaaaaagaagatgtaggcacttaggcttatagatgtaaagaaaataattgtccatcatgaatgcaggctgtggaaattgttcctcaaaaactgaggttccataaaaggagtttacattttgtcaattgctgttgagctgatttagtataataaatctgtatgctggggtaaatctgagtattgatgcctagaagctaataatccagtagcatcgttcctgaaaaaatatatagtgctatttgaagattatgtagcctgtgatatgcaaaactataagcaccgaactgctattactgtggaaatgagytgtaggtataatatagatttacttgatgaaatgatctttattttgttgttaagctgacaagtgctggagaatttgctttatgtatacattgtgggaaacctgaggaaaattgatagtgtttcactggtatttacattaacccaagcattgtatttggagtgggacagcatgctgttttgaacaatattttgacattaagaactctacaaaatagtatttaagccccctttggtgtgggcagttgataacttttcattcataattagctcatagagaaccgagagacatttcagggaaattgaactgtcagtgggtagaaacaagcatttgacctcatcacattgagtggggcccatcataatttgttcatttggtgcccatcagcccagcctcatctctcatacggcacctcgctgaccttccctctccaattccgctcagttcagctttaattatgactctgcagacctgaagaaatattgcagcttgctctcaaaaaccctgaactgccactcaccaaaagattggtttttaacaggtaataaatgcccagaggaaatggtgctatgtccacaaagagaactgtggcttcttttgagattttgctggctctcaagtgtgtccctgttgcctagtgaaatttttatttctaacacagtaagcttatgactaaattcactgctatacggaaatgtcatgagttttttaagtaaacttttatctattcacagaagaaattcttagttgcttggttacctagtgaattcacctattgaaagttgagagacaactttaggtcttttagataaagtgttagtaattttagaatacttcatttttactttttaattttaattactttttgagctactggccaccccaaagagataaaatgagaaattataagtacctcttctagcaatataattaatttggattcatcaaatcacttggcagaaggaatcctgctgagttaacaatgttgtctccactaacaaaaacaaaaacatgaagtttaaaataaacattcaggttacctaccataccacatctaactaccctgtccacaccatgacggtatttttgcagagaaagttgatagcaatcagagactgtgtaggaggaaaatacaaagcttcaaaaattataaagctaaacttttgttctcaaattatatccctaaagatttcactgcaaataaaaatattgaaaactgtagtctcatactgtgtatccttgtagtgagtgttaaactgtcagcaggattttcaggtcatttgacaaaaaggatacaggtgcagtagctagcagtgaaggtgactgctggtttcatcaatcactttgcctttctttaagttgatacataatggaccccttcaatcagcttccttgttctttgtcacttgtttggaaagaagaaaaagaagggtggaaaggctggatggactctaaaatcaaggttaggaaatgaattgtaagttatttactcagggtacagaggatgtmagtgtgaaagaggggctcttcataaaatgtcgagtttgtcaatgggtgataatatgcagttggaagcttcatgccagccttgcgcgctgacagtgctgctgaaagcagtgatcctaaatatgagtttgaaattaagaaattgtgttgtggcagagacatgttttataccagaaaatgttcacaggttcattttacttctaggcattacatcaagtgcttgatcataccagcatcatatagatggtgaaaacatgtcagccactgacaacttagtcttgtaccttctgccatacttaatgtgtgtcgtgtgtcagaattttctcaaattccttgataagaatttgaaatttttacatagctttatttactagaacctgtagacataccactcaccaagtttgaatgccttgctagttttaaatgctcagggaataggtaaaacagttgaaaggaaactatcagaaattaatgtctgtcttttttttatctggttttctcttagaaaacaataccttttcactgatttttaaaaaggatacatacctagagaaggttatcaattcatcagtcttttgatcaatgagggatgtgggaaatcataagagaagtgtttttttttttttctatgtttgaccagattatttgtattctgagacccagcggtgtgctttctggaagtatgtttatggatatgtggttcagtacttcttttttcaaaggtatcaaccaaagggtgccactatatgtcaagaggtagtgtgatgatctgagcaggtgtcagattaaacataaaaattacataacatgattgtttgaaatttctctcttcttagtcctccaagaaaaatttgggtagaatcgtggatataggttaatgccctttattttctttgcagacttttatccatggatagagcaaattctcttttgctttctagtaaaactttagggattatggtacttgtgatgaaagatttttttttttcaaaaacctgaatatttctgttaataagcatggatggaatgtctactacattctgatctttggtatgagctgtggcaaataaaaaaataagtcatgatgtcagttttgagtcctatcttatagtcttatggaaacagaaatcatgtaaacacaagagttcagtagcgtatgagtcgggctgcagtggacgtttacataaggtgtcttgggatcatgacagaaggaattactaatgctgccaaatacacagagaaaacattcttttatatttgtaatatattcttgaattataatgtgcatgccttctataatatgatttacccatatggaatatccacaaagaaacattttgtccttctacatgtgtgtttctatcagaccgatacagactgaattaaattttttctgagcagcatttgcttatatgttttgtggttccacttttctcacatagacctgattgcataagcgttcactggtgcacctgtatttattccagcggttataatgggttatagacaccttaacttgacacaaatggttgcagaatgcttaagagtcctcattcagagactcggtataacttttataaacatctgactttttgtattgtgcttattttagagagaggtaactctagacaaaaatagcacattttagagttttcaggatttccattcttttttgatacctacttactattgatatttttctaacctaggtattttattatcctgaacttgttctgccccacccagaccccctcatgtttttgttttccttccttttccccattgaaacatgtctgtttgtatttcttcaaccaagtgtctatatctatcactactacttctaataataatcccctttgcttatatgcaaaatgcttctttatgtgtattttaccagaaagattcatactaaataaagggggtaaagagggagtcttagataataagcagtgcattaaattgaagcctcaatttaatgatggcagttcatttttatttttttcatttgttgccagcacctgtctggcaactacagatagatcaaaaccaacccatggcgcttattgaaagcatagaaggagtgttaggggaggggagtttttttaaaccagctgtctaaactgattctgacaatttgagagccactcaaatttattagtgtctataatagttggagtttaagttcaatgagaaaatactgcggagttttgttgcttctcagatcacagatcagccattgaaaaagttgcatgcatacaaactatactataaactctgaagataggtttcacaacataagaattcagaacagkggttttcaactaggcaccgcagttacctttattagtttccagtcactgatgtaacacattaccacaaacttagtggcttaaaacagtgcaaatttattattatttttcaaggcgtcagcatgaccatgttccttctggagctctaggggaaaatccaatttggtttttgttttttgacttttccagtttgtaaaggcagcccacattccttggttcatggctcttttccaccttcaaagccagcaatggccaattgagttgttttcatgctgtatcactctgacactgaatctcctgcctctctcattcacttacaggatctgtgtgattacttgggccctcccagaaaatccagaatgacctccaatctcaaagtcaacttattggcaacattaattcccttttgccacataatgttacatattcattggttctgtggattaggacctagacatctttgaaggggctgtttttctgtataccacctcacttatagaacctgtgggaagaaggaggtgactcagatactcatgtctcaccccaaccctatcaaattgcagaggaacaggagggcagggtgatggcactcatagaggccatttccatgaagagcagaacccggcaccacacccaggcttgtattctctggtcatgatgttgattgtaccatggggataactcactagtcatagagttcagatgcagccctgctgtagagattatggccatctgcctaatgaagcaattcgtatttgaggcagttctgcttaactacagttaaggaaattaagagaaatttgaaattttcagatcagtcatattaaataaagtgtcatatcttcctagtactgtctctttgatgcttcaggtcaggaaatttaacacttatatttaaaaatttttacttactttactttagaatcagaattataataacatttttttttttgagatggagtctcactctgtcgtccaggctgcagtgcaatggcgcggtctcggctcactgcaacctcygcctccygggttcaagcgattctcctgcctcagcctccggagtagctggggttacaggtgcctgccaccacgcctggctaatttttgtatttttagtagagatggggtttcaccatgttggccaggctggtctcaaactgctgacctcgcgatctgcccacctcggcctcccaaagtgctgggattacaggcgtgagccactgcgtccggcctataatagcacttctcagtgaaacatttatctcaagataatggagatataaatctcaaatgaaatgaatttttatcgagatgttttaaaatattttaaaatatttatttaccatcaaatataattacaggcacagataactaaccggtgctattaaggtagtagagaactaaaaagtaatttacatttttcaaaaatcatgcaaaaacatgattcgcatactgtgattatttacctggctaattcttttttgtttggtatgaaattattatgtaataaagaaattattcttatctaggcttagcactttgttagttacatgggatacaagattacacataaagttagtgtgaaaattaaattataacatgtcaaatggaatatggttaagatcataatgggctggagtagggccaggaagagttgaatagataaattgggacttgaactgagcattgcattgtgggtagtaatatttaactaaatatgatttatgatagtagatcacaagtaaataatgatttactgtgatttaagtaaatcatagaataaacaagtgagttctgtgtgcaagattggcaaaaagtaaggggagcactaaaatttaggattaaaatacagtgtgtttagagggctgtacatttagatgttttraaggcttattttttcatcaaagtgttatggatctatgaaatcctgttcttaaaatgaagggacacttttctgaaaatacccagctcaagaagagacgggaaattgtttcatatcatatgattatctccctggctagttctttttttcaaagattactgtctatcagactttgtgtcttaaaccaaacgggcgacttcatttttcccctccctgggaactaagtrtggaaaggaaccctaagkgtccactgctgtctcctagtggaytaaactaaaatgagaggaacagtgggaagaaatagattaataaagactacagaagaggagctaaaagttagaatttgccataaattggatggagagttcactgaagcaaacctcagtygattgtggaactagattcatgccgtgggaaatctcggaatgacttagccgtgacttctttcctgttggcatggtgtctttttcagtaaactcctaaggaaaacaaacaaaaagtactacaagttgatgataaggtgggtgggcaatatcctgtataraaatgaaactatgttctagaagagttggatttatttctggacaccgacctttttaaaagcaatgcatcattctccatccaacaaatgctgccatagccaataatatgttggcttgtccattttcggcttgtagtacaaaataaatgaaagccaaggacattacaattgggagggaaagaggactattatttaaaaggcttttaaatgatgtcactatatattcttttaacaacatcctctaaaagcctttgaaaaaatagtcccttcctccctcagttgttaacaaagaccatactggggactgctctttaaaaggctgttaaatggtgatactatattttttaacatcaacatcatttagaaaccttttagagaacagttctcttcacccacaactaacagaggagggaaaaacagatgcgggggaagggattacttttgtaaaggcctttggatggtactatcaataaatacagcaatgttgttataaaagcatttttccaatggtgattcagctttttgayatgtacttttaatctcaggaccctgcgttatctgacagattggtgttttaacgtgggctgaaaactcaatttactaataatccaaataatgccttttattgaactttctgcagtttaaaaatcagtttcacatatatggtctcatttgatcctcaagacaactcagtgaaacagacaggatatgtatgattarccccattttacagaagaggaaaacagaagctctgaggttgtggtttagctaaggtctcaccatttaatatgtggctgagttcaaactataacccagatcatttgacatctggtctcataccccatgcagtttcctgagggtaccttcattgctttttttaaaaaagtggtattcatcattagtcttttcagcatgtccaaatactgagttaattccttacaattagtataaaagtgggattctgtcattttggtactgaaggtaggtatctagtagaaattttattaacaaataatcctgaggargtaaagaagtgtaaaatattgtctcaaggtgtggttgtcccctgtgatgtagcattcagacttscccttagattcctttgccttatgatrtatgcttatgaaattatcacttgaaatccactttcagacatgcagtttattaaataactgatattttaaagacaattctaatctcagtttatggatttgtttttaaaagttatttgttaaggatactgattataattaagatcacattcaaaaaagtttccatgctagttctttccacytctctccttgaaggagagaaaaaaatctccccatgagcttgcrtgactgacctttactttcctttatcataaggaccattttgtgtttattgaaaaaggaattatagcttattgcttgacagaaatgacactgaagaatattacatttcaatcttagctctgccactattttttctcttatgctaataaacattgtctttaataataattaaagaaggagactttcaccagcaacacactgtcacatgcagtgtcacactgactcctcaaaagaatcctatcaattagatacaaatacaagcacagagaagttaaatgattttcttctcatcaaatagcttgaaggtcttctaacttaaaatccagtgttttccttcgtaccactgccagctgtaattctgcctcatgagaaggaaactaaccattcttacttctgaggaaaaatgtttaatatgttaaaaatacgtatagcctgagaagacctggccagtgccacagtgcaggagtgaggctcaatcccaggacttgacccggaacagccatgcagccaggtgcctttgccatgaagaaaaccaggccttatgtagtaaatcacgttctctccatccccacctccttactgaaaattttaaaatatttacacacagatcaaggggaataatgtttatataagtaagtgtgtgtgtgtgtgtgtgtgtgtgtgtgtgtgtgtgtctgtaggtctgtctgtctgtcttatggtctcagggaacccatttccccatcctttccctgcatcaggaaattttcagcaacttgtggtacctggaactggcatctaggatgtatgaggatccttttcccttctgtcagattcaaagaaagcatctgtagtttaaaatcactatacccataataaaattccctttccaatttgtacatctcctaagacatacttctttccttatcgccaggacctcttctaggtgacatccgcatccttcatcaaggggaatccatgtccctaagtcacarttcacttaaatgcaaggcaacacagccagcttttagaggccacagtcccatctctgaaatatgtagaacagcttacggtttccctcatacamttttgtaaggttcatggcctagcttttctctgggaatctccatttggatcttgaagtcctgttgtaaatctgttcagcatggccccattcataatggctgataattctgtcttgacgaaatcatygttactaccaagattgtttgtgtgaagctcacctgttccttttaggccattctgttttcatcctcattttccttcctcttatggggcccattccatcttcctattccttcttcccctccttgtcattcttatctttggatctcttaatcacttatccatattcagtgaagatcttagtatttcatacataatctctctggcccaccatcatcttggggaactgcagtgttcatattcataacctgtgcaacatgtaacctcacagtctcttgatctgttcaattctaataacttcacctccactgaacttcagtttttcgtcctttcaattctgaaatcttaactcactcccttacttgtgcctatcmtgctcctcaggcccttcatgcctccagctgtttatgtttagcctagattaaaacaaccctgaaagataggtgctagtgtccccatttcacagacttgaaaattgagatcccttcagcttcagtaacttttctggtgttacaaggctagtaaracatgtgctatgtataaaaccaatttcagctcaaatctgtatagtttcaaagccctgtgtttcccacsacacctcactgctgagtgtakgaaggagttacaactccaagagaattattttgtgtagcagcttgtggtacagctcagagtaaaacgaacctaatgacgggggcaaattagagagacctcgtatagtataagcaagagaagtcataagggagcaaaagatcggaagggacaccaaattgttatggttacctgagggggacttttcttttctttctttttttttttttttttttgagayggagtcttgctctatcaccaggctggagtacaatggtgcaatctcggctcactgtaacctccgcctcccaggttcaagtgattctcctgtctcagcctcctgagtagctgggattacaggcatgcgccaccatgcccagctaatttttgtatttttagtagagatggggtttcaccatattggtcaggctggtctcgaactcctgacctcgtgatccaccggcctcggtctcccaaagtgctgagattacaggcgtgagccgctgcacccgactgggacttgacttttcttatattttcatactatttaaattattttcaataaatatataatgctgttgtaatttgaaaaaaaagatttaaaagtattttcagtgttaatgaagacttgaattaagctggtggtagagggacagaaaagaggaaatgaatgcaggagacagtgaatttgtttctaattaatgtgagggtgtcaaagataatgccaaggttctgagcttggttataatgggagaagacactagcattttcttttttatattatgtttttaatcttgtgaatgaaaaagcagtagaactgctaagatcacgtaattatcacatctttcaaatcacagcttaacaatgcataattgttttgggcttctgtaaaatgctctgggttctaaagaaatttgttataaccagttactgagaacttcatgctgaacactttacaagtcaaattcagtctgtttttattagtactcttaagccaaaagtcagaaaagaaatataaaaagaataggagaacatatgtatgaatagtataacatatcagtattcatggttctggtgctatttaccacgtacgtgatatataaaacaatatagacattattctggctttcagatatatagaaaagcagtaagtgtattgatagtgaagtttattgatctgtctttggggaggagaaagaatgggatattaatttccttatatcaaaaccattgtaaattgaatatatcctataccagggatcggcaaacattttttgtaaagggccaggtagtaaagatgttcagctttgcaggccacaaccactcaaccctgccattttaatgcaacagcagccacagataatacataaataaatgagtgcatctgtgttccagtaaagctgtatttatagacactaaaatgaatttcatatcattttaatgttacaatcatattacttttgatttttcaaccatttagaaatgtgaaagtcattattagtgaacaggcattgcaaaaayagacagtggaccagatttggcctctaagcatggtttgctgktgcctgcttaataccgagcatgaaataagatgctcattaaatatttgttcattatgtgttcamgtatttccacaaatatatttttaatatatattattaccaaaataagaggtgagaaagtcttgtgtgctttataatgtatagtgattactaaaataaaatatgagaaattatcataaatttgtatatcaaaatttatatacataaggaagaagttatctttagtattaaaaaccatttatttgaagtaatatttsctggaagattcaaatatatttcttcgagtctgtkcttatatgtaagagttaaccaaatttgccstttacttttttaaatcytattctaggtcaatactaggttaatgctagcctcaatgaaatggattgaaggtaaaatcaagacccactttctacagtttataggataaatgagacaatactgtgactttctgcattacaaatcttatcaattgagacatacattggttttaaaagtactaattttaaagatgaagctgtgcctctgtttatagctattttcttacctcgtcatttttataaattatatatcaaaatagatactgatgtaaagtaagccaaacaaaactagatacaaagagcattttatatactgcagattttcatatctttgaaattcaaaaacagaatggattgataatacttaatgactgggtaactaaatgtggattaaagcataaaaggctgggaaacattgttttcataaagctttacgtggaaatgtcatctttgaatagtaatgtggatgctgaacaaggcttattccaaggcacttacttgctattccatgttttatttttcgaatctcattttaaattttataattcaatcattttgaacagctatgttcaaaagaagttttacaactttaatcttaataatctcaaaaaaaagcagacatgctatgtcataaaataactattagtgactagtttgtatcctataaatctaacttgagttgataatatggtccattaccagctaactgcacagagtatttttcattttacactcttcagttactttttagtgaagtgttaaaaaatatgaagcttttctcctctctaaaattgcacgctgtctgtctgttattagggagataacagctcttataaatgtttcagtaagcgctaagtagacagttatgtgcactctcattccacgcttatttgcttactgtaataaactgataaaatatrtgtggtttgtctctgtgtatctacaggcatcatgagtcacatagatttcctttagaaataatgttgtgtctgcagaattgattgcttattttcataaaccatctaaaggtacacaaacgacttttattatttaaacatatgctgtgtaaagatttgtagaggattatctcattgttactggatgctttttgttctgttaactcttgggggaggcttgttattttacagttactgcagttactgaactaattacttcctcacgagccatagtraagatgacctatatcatttgcttataatgcatctaagtttttaattctttgaatgttagtcgttaaacaattaaatcaaaactaatgttttcaaactttgtctttcatactcttgtttatataagttttaataaaataatacacttataagtagacatttcaagaattagtgtttgaattatagaagtccctcaataagctgttctttgtgcatttaagaaatgtacttctttatttgttcacaattttatgtaatagaaaattcaagttatatcataaaaccaacaaatattaatatagaagatctccacatatcaccacagtgtgttcctataaggctgtagtatttttaaggacactgttataattgagcactcagcattaaataatgtatagttatgaccaacactagaggtatattatttgcaaatttccataatcatttaaaatagtaaaattatgctttgagttctgagaaagggtaaaattaagtttaatacattgagcataaaagtgggaagtagatgggaagacaggtaataaacataacaaaaaagtaaattatatattgtgttagagaaggtattaagtgtctataaaaaaggaaaaaggaaatcagaagggagggatgccaatgggttaagccttactaagatrgtaatatttgagcagacatactagagctgagccatgtgggtctctggagaaagtgccttccaggtagagggtcccagggaataacctatagtgggactgttactaatatgcaaaaggaatagcaaggaagtcatggcgatgagtagaataaacaacgagttcaagagtaataggaaacaagatcaaggaaatggaacaaggatcctggccattggcgggttttgagcagaggggtaacatgatacaacttttctttttcttttaacttttattttaggttcaggggtacatgtgcaggtttgttatacaggtaaactcatatcacggagtttggtgtacaaattatttcatcaccccagtgcatgatgtaactttaactgatacattctagctgctgtgttcaggatagactaacatagcaattcagtctatgttcaataagatgcaggggtaggaacaaggaaaccaattaggaggctgttggaataatccagatgataggtggtggtggctcagaccgggctggccacagtggcagtagtgagaaatagccagattatttcattaaaataactgggttttcatccatgatgactccctcaggtgtcagctatgacttttgtgttcttctagcctactgagcctgcttctgtcatgacatttatcacactagttgatttactctgttttcccaggctaaacaataaacttcttgaggactaggatactttggctttgtctctgtatcatactccttagcacagggctggtacaactcattgaataaatgttatttacatgaaagaatgaattaataaattaatggtgagtaatgattaatgatttgtagttactttgtgtttgaaataacggtgttcttattggacagagagctgtgaaatacctaattcttgcacgttaccacctttctccccaagatgcccaagggagacatagggtcagaggacaaagaaaggcaaagccgtactttgttgttattgtgggccttgctctctaaccgcaatacagaactccagtgagttaggttggcccacatcaaggactcaaagttcttttctattaaaggtagaattaagtagccttgatgcaaaacaaattattagttgagtcacatgaaattgatagtttgactgtttttgacctacagatatggcagatacatatggttcagtctaatcaaaagccttacctgagtctgtgatctcctggctccatatctaccaggactttagagaaagtgggggaasggggcattctcccattacaagcttatttccccttctaattagtgtcctgaaatctgactaatcccaaccagtagtagagtgggggagatagatgatagaatcccaatttgaactaggttaagtagtaaataaataaataggaaattacagctacagttcagagaaaacaacttcagcaaggacagtaatgtgtctgggcatcaagaaccatccagctcaaagttaccagctagtttctctgtctctcatctatgcttttctttgaaatttgctttattatttttttttctcactgaacaatgtggcaggaaatgtggccacagacaaaattagagttttaaatctcagaattttagctgcttgagagagtctggctcaaattactaggtaccaaatccaaaaatcctaggaaaggaactcattgggccaaatgtccatccctgaaccagttaactgcagccagtcatggggaggcataagaacttgccagctccatcatgggctgaatgtgtttctagaaaatagtagggcatgttgggctgacagtctcatacataaccactatagggtaaagaagcattgggggcaaagcttcctcaaaaggccagcacttagtcttgaaccaaataaaagcaattctgaaacaatgaattcttattctgcattgtcattggacttactcaacactttgttgtcggctatcagaacatttctgatacttcagaaacccacaggaataattaaagtcataacatggattttcataaaggaaatccaaaagaaaaaagtaacctctactttgtraagttgtattctgattagtaaagccactagcctgtatggcaccattgcgcagattccaaaaagtttcccttgaatgtaagctggattttagctcctattcaccctttcagtcagttgccactgcacagatgtatatggtggtctaagtgttagctgtttgaaataagcggctctgggaattgttaaattattttttttaaatcaagcatcaagaactgtgaagagtctgagatgttaccctacttacaagctaactagttaatttgcaacaatttcatgaatgctggtagaagacacaagactcctggtcagagacaaaggacagtttgttaaagcaatagaagtagccagagtagcatcatttgcatcacttctctgagccccacatgctgaaggctaggtgaagcctgcacatgcattgtgttgctttacaggagaggaacctgatcagagtaaacagacaacctacagaatgggagaaaaattttgcaatcaatccatctgacaaaggtctaatacccagaatctacaaggaacttaagcaaatttgcaagaaaaaaaatcaaacaaccccatcaaaaagtgggcaaaggatatgaacagatacttctcaaaagaagacatttatgtggccaataaacatgaaaaaaagctcatcatcactggtcattagagaaatgcaaatcaaaaccacaatgagataccatctcacaccagttagaatggggatcattaaaaagtcaggaaacaacagatgctggagaggatgtggagaaataggaacacttttacactgttggtgggagtgtaaattagttcaaccattgtggaagacagtgcggcaattcctcaaggatccagaaccagaaataccatttgacccagcaatcccattactgggtatatacccaaaggattataaatcattctrctataaagacatatgtgcacgtatgtttattgcagcactatttacaataacaaagacttggaagtaacccaaatgtccatcaatgatagactggataaagaaaatgtggcacacatacaccatggaatactatgcagccataaaaaaggatgagttcatgtactttgcatggacatggataaagctggaaaccatcattctcagtaaactaacaggaatagaaaaccaaacaccgcatgttctcactcataaatgggagctgaagaatgagaacacatggacacagggaggggaacatcacacaccagggcctgttgggggttgggggagtaggggagggctagcattaggagaaatacctaatatagatgacagggtgatkggtgtagcaaaaccaccttggcacgtgtatacctatgtaacaaacctgcacattctgcacatgtatcccagaacttaaagtattttaaaaaaaaaaagattctaggcttttataaggggactgttagcaaatctattcagcctttgccccagagggagattttgtctttctaatcctggacaatgaacaaacaaatctatcacctgccccagagggaggcattacctctgtcttccaaaggctgtttgctgtggaaacatctttgaaaagagcttcagaagcaaagttgctaatgtttctgctcagaagacgtgagacctgtagagccctttttggcaccagggacccgttttgtggaagacagtttttccatggaccgttgggaatagggggatggttctgggatgaaactgttccacctcagattatcaggcaggcgttagatgctcataaggggcgtgctgcctagatccctcgcatgcgcagttcacaatagggtttgcactcctatgaggatctaatgccactgctgatctgacgggaggcagagctcaggcggtaatgcttgctctcatcagccactcacctcctgctgtgcggccggattcctgacaacccatggcctggtacaggtccatagcccagggactggggaccctctgctgtagagaattgtttccaacaacaagggaagggaagtggaatggcaaggatctaacatttgtgcccttagatcgggggtcagcaaactttttttgtaaaggtaccagatagtaaatgttttaggtattacaactactcacctctgccattgtagagtaaaaaagcagtcaaggacagtatgtaaatgaaagaatatggttgtgttccagtgatactttttaaaaataggcagcaggccatatttggcttgtgggttatagtttgcaacctctgccctacatgtattgtgtttagacttattaaatcttccctttttcttaaaccctcattttcacagcccaaatctagatcactttataattatgttttatctttttttgcatctaataaaatcattgttgtctataaaatatgaagtcaagaacgccatttgcaatgttgagcatcttagaatataagcagccacagatctcatatgtatttctggaatataggtatctggtctgatgtacaaaatattgaactaaagtctaaatatatgttaatattaatataacactggattaaatgtattatatgtggaagtagtcgaagtatttatggaacccactcggtttattgaacaaaatatcacctatgtattttatctagatgctggagaagtttggcgtaatatgacttgtataaacttaggaaacaaggttaaaaaagtaatcaaacattttctttttctttgtgktttttttttttttttttttgagacagagccttgcttcatcacccagacttgaggacagtggcactatctcaggtcactgcaacctccacttcctgggttcaagtagtcctcccacctcagcctcccaagtatctggaattacaggtgcatgccaccacgcccagctaatttttccatttttagtagagatggggtttcaccatgttggccaggctggcctcagactcctgacctcaagtgatccacccatcttggcctcccaaagtgctgggattacaggcatgagccaccacacctggctatgttttcatttactacctttctgtagttaaacaagtatatattattaccacgaagtgtcatttatgatcctgtttattgtgaaagagtgcatagacctctgggaattatcacagataacctttggaggttgtaagggagggcctttttagacggtgaattcattagagaatgctttttaccttgaacttggttgaatgtggaaagaatgagtggagagaattatactgtttttctttctttattcatcccttaacatattttttgataattataataaagctgtagaattttgagacaaagttgaaaacacaaaataaatgtttggaccatgcatcctaggattagactgagagaaggaatcagtgagtctgccaaggcttgatggctcttaaatgactaaaggcatacttctaaccaccttgtatgatatctacagtactgattcctggccgctgtgaaccagacctttgttctgttctgctctagtcccactcctctacccttgcctttctccaactttcaaatagtcttcccttttacattacagtttcagctttctttccccgatattatatgtaggccaactttttatgaatttccacagagataaagctggctacatcaacatttatttaatgatttgataacaaatatgtttgtggaacaatgtagaataaaagtaagacctgtcactgtctctaatatgcttatcattaaggaaataaacatgtaacactgaaaaatataattagccagataagagcttatatttaaggttgattatcatagccttagtagcatgggaatttatggcaaaaaagaaaacttttgctgagtataaatctataaatataaaatatatagctctggagtcatcccagtacagccttggtgccatgtgcatgtcggagagtcccagcccaccttgctctctagtacttgtagcctttttctttcgagatgcctgagaaagtgcacgtggagcggaggagctggaaacttgcctttcaggcagatattgcccaactcatgtctctcgtcatcaataccttctattctaacaaggagattttcyttcaggggttgatctaatgtttctgatgcattggacaagatttcctgtaagagcctgacaaacccttccaagttggacaatggtaaagagctggaagttaacatcatccccaacccatggtaatggttcccaaattaggagatcagccttggtcatgtcaatgcctgtgtctaccaaagtcagggtgtattccctggtactaaaggatttatggaggctcttcaggctagtgtagatatctccatgattgggcagtttggtgctgcctttttttctgcctaccttgtggcagagaaagtagttgtgatcacaaagcacaacaatgatgaagagtatgcctgggagtctctgctgggggttccttcactgtatgtgctgaccatggagagcccattggcaggggtaccaaagtgaccctccaccttaaagaagaccagacagagtacttagaagagaggaaggtcaaagaagtagtgaagagcacttacagttcatagcctatcccattaccctttctttggagaaggaaagagaggagaaaatcagtgatgataggcagaggaagagaaaggtgagaaagaagaggaagataggccaggcacaatggctcatgcctgtaatcccaggactttgggaggctgaggtggcagatcgattgaactcaggagtttgagaccagcctagccaacatggtgaaaccccaactctttaaaagatacaaaaaattaggcggtcatggtggtgygcaccttaggtcccagctacttgtggggctgaagtgggaggatccaccaggaggtggaggttgcagtgagctcatatcacaccaccgcactccagcctggacgacagagtgttacaccatctcaaaacaaacaaaaaaaggcagatagagatgatgagaaaaagtccaagattgaagaagatgtgggtgggttcagatgaagaggaggacaatggtaaggataagaaaaagaaaaccaacaagatcaaggagaaatcattgattgggaagaactaaacaagatcaagaacatttggatcagaaactctgatgacattcacccaggaggagtatagagaattctacaagagcttcaccagtgactaggaagaccatttggcagtcaagcacttctctgtagaaggttggttggaattcagagcattgctgttcatcccttgtttggctccctttgacttctttgagaatgagaagaaaaaaagaacaacaaactctgtgtccatcatgtgttcatcatggacagccatgatgatataagagtatctcaactttaatccttggtgtggttgacttgggatctgcccctgaacatctctcgagaaatgctccaacagagcagaatcttaacagtcattcacagaaacattgttaagaagtgccttgagctgttctctgaggtggcagaagacaaggagaattgcaagaaattcaatgaggccttatctaaaaatctaaagcttgggccagttgtggtatctcacctctgtaatctcagcactttgggaggccaaggcaggaggattgctggaagccaggagtttgataccagcctgggctgcaaagcaagacaccatcacaacaaaaaataaaaaaaattaacccagcatggtggtacacacctgtagtccaagctacctgaggcaagaggatcacttgagcccacgagttccaggctgcagtgagctatgattgcaccactgcactccagcctggatgacagagtgaaacccctatctataaaaaaaaaataaataaaattttagaatttcaaaaattaaaatctaaagcttggaatccacaaagactccactagccagtgacgcatgtcctagctgctgcagtatcacacttcccagtctggagatgagatgacatctgtgtcaaaatatgtctcctgcatgaaagaggcacagaaatccatctatagcatcactggtgagagcaaagagcaggtggccagctctgtgtttgtggagcaagtgcagaagtggggctttgaattagtatatacagccaagcccactgatgagtactgcgtgcagcagctcaaggagtttgatgggaaaagcctggtctcagttaccaaggagagtctgcagctgcctgagtgagctgagatcgcaccactgcactccagcctggcgacagagcgagactctgtctcaaaaaaaaagaaaagaaagaaaggaaacagaagagttttgaaaatagtttttattcaaggaaaagaacctaaccttagaagtgaaagtgctttgaaaacttaaaatactagattgttatcatcatcagaaggcttaaatagaatgaataggccagtagccctattattttatataaccaaaattttaaatttagctaattgtttattatattttacaaataaactatcccataaatttttatgattattattttattattattattttttttttgagacagggtcttgctctgtcacccaggcgggagtgcagtgacctaatcatggctcactgcagcctcaacttcctgagctcaggcaatcctcccacctcagcctcctgagtagctgggactacaggcgcaatgcaccacacccagctaattttttacattttctctagagacaggatctcaccatgttgcccaggctggttctcaaactcctgggctcaagtgatcctcctacctcggcctctcgaagtgctgagattagaggtgatgatttttttttttttttgagacggagttttgctcttgttgcccaggctggagtgcaatggcgcgatctcagcccacagcaacctccgcctcccaggttcaagccattctcctgcctcagcctccagagtagctggaattacaggcatgcgccaccatacccggttaattttgtatttttagtagagacagggtttctccatgttgatcaggctggtctcagactccggacctcaggtgatccacccacctcggcctcccaaagtgttggaattacaggcgtgagccaccgcgcctggccagaggtgatgattattttaaattgcccacattttttgttgcacttttagagaaagaatactatgttttgatgatgcttagaaggcatgatgtagcattttgtatatatgatatttaactcttggatttttgtggaactttaaatcattactataattgctacgtttgtaatgtcatcaggtgtacacggcatagtgaaaatgtttaataggttgatatatactctcagaactataatagakaatctagttgggagacaacacttgtcaggaaaaaatcttaatcaagcctgtttaattacaaattgattttttttttaatgcttgcccatgtcaggtcaagcctagtatgcaatactgatattttgaatggaaagaaagctatcacatggttttagaatggacagtgtttcattatttaatatgctgcctatgatttcaatgaaaatgagattgagggaagaatttaattaagagtctaatgttcaatagaagggtaaaaggtgatttaccaagaaaatattcggagggggaaataaggaaatatttgttttaccaaataattgaattatattgtaggtctacaaaaaataaaacaatatgggactggtttaacaggacaatcaaggcccagaaatatctcctagtacataaataattagaatttttgcatttaaaatcattgagaaaagactattcattagctcatgtagggacaattagttcagtatctggagaaaattaaatatggagtcaatatatcaaaatcaattccatatgaattaaaatttgaaaccatcaaaggtctggaagaaaatataagtgaatagttaacttgatctcaaagtagagatcattaaggcaaaggaagaagccaccttatcctgggggccatggtcttcagtttacagtaaaagaaaataaaaacaaaaaaacagttcaaagagtcaggattggaaatgaaggtccagacgttcattttggtagttggctaaaacacccaagaaaatcaattgacaaactgttaaaaccaataagaaagttagcaagatggccaaatatagaggatctagggaaaaaaactaacaaaaaagtttataaatccctgccccccagcaaaaaaaaaaaaaatgagtatgtttgtaatattaatatatgcttggaggttacagaaaaatttcttttttttttcttttcttttytttttttttttttttgagacggagtctcgctctgtcgcccaggctggagtgcagtggcgcgatctcggctcactgcaagctccgcctcctgggttcacgccattctcctgcctcagcctcccaagtagctgggactacaggcgcccgccaccatgcctggctaattttttctattttgtttagtagagacggagtttcaccgtgttagcgaggatggtctggatctcctgacctcgtgatctccccgtctcggcctcccaaagtgctgggattacaggcgtgagccaccgcgcccagccgcttacagaaaaattttcatacagttttgagggcatttacttctttgtatcatttctgactaatatctatgtgtgtgatatcctactaatgtttgttattgtagttcatataatactgtaggggaaccaagaattaaatgtcataaatgtttgcatattttctaaaagaataattatattcactaactcatctttttttctttttgccgtgtgtaataggtcagtactcctgcatttgtaccaacgaaaactcacgtgctgcttcatcgaatgagtggaaaaggactagctgcccattatttctttccaagacagccttgcatttttggtgataagatggtctctatacaaataacactgaataacactactgatcgaaagatagaaaatatccacataggggaaaaaaaacttcctataggcatgaaaatgcatgtttttaatccaataggtaaatattaattctcatttaaaaccttaactatatttgatcactaaatatgttcatttwaaaagtaaagtagaatactttttagtaaaatagtaaagtagaatatgattgtattgacarttagcatattcagtttatatttgctttttcttgttaaactgaatttatcatataagataaatacatttctttgctcttagtgaatcaggtcccagtaatagtaataccagtagtgatggaaggctaggtctgcagagtcaagattgccatcatgttttacttacctgtgtcacctttccccatctctcctcctggtcagcttcattccctgcataattttaagtggtttattgtgtattaaaagcaagaaaatcgctctgcatttctgaatacaatacttctcgtatctcgagatcctttcctgtttcccttcacttttcaatttatgggaaagtgaagggagtgaagactgagaggatatagaccaagcttgaccaacctggctcaggccagctttgaatgcagcctaacacaaattcataaagtttcttaaaacattatgagatttttttgcgattattttttctttagctcatcagctatcattagggttagtgtattttatgtgtggcccaagacaattcttcttccaatgtggcccagggaagccaaaagattgcacacccccgatgtagactagtctgcttatcttcctctccatgtatagaatatacagtagcctagaggatatcactggtatttatccacatccaatttttacatgttttcaatctgttgccaccatttaaaaatgaagatgcttttacattttaaaaaatgagaaatctcacttttcttggagcagagcgtaaaatatggcagtactggccctttatccccacatgcagcaaccaatgagtgggttgctgagcagcggctgcccccagctttggctcgcactttccaggttgcttctgtgcccaccgcatcctgttgtctctccaacaaagtgtcagtggccatttttcatcccctttgcattttttaagtattttgctaaaaatataccctttaaacattaaatgtaacaattgtgtgtcttactttgaaatttgaaatagtgtaatatttagaatgtctatctctttctttttggtttttgtaagtggagataaccctaaggtttagttgagagaagcttcaggcaaaacctcaattaaaagtaataaaaggtttatgtcattgtatcttccaaatgttataaccagaatgctccagagagctcctttttataatacttaagataaacaatgccttttgaccaggatcaagtaaaattaggtaattgtaccttctttactcattgtttcacataactcttccatttttctttatctgagctctttggcattgctgaattttctcctctggttttcatgaatctttcggtaaagaaagtcattttgtgtgtgtgttatatttttacacaaaggaataaaataatttttgataaagcctggtaaagttttataagcaactagagcaaagaaagtggagttaaagtaagctgatttcaaaatccacttaatttttaaaaatattttgataattaagacactatttaaagaacacaaagtatcctaatttttattatataatgtgtgacattaatatattgccaaggaattattgtgttatttttgttgcttgtaattcaaccttttttacctagttaaaaaaaattagtttaggaagtgtcaagcagctgatacatgaattgtctgaaggttgagaatgttatccaaaggttaaagcagtagaacagtattaatttttctttgagctggcataatgagttgatgagttgacctttagttggcctatgtagaatagaagaaataaatataataaatttcatagtatgactttaacagagaaataaaatatgaatgtttaccattgcctcagtattggttgtaggcttttctttgtcattcttagacaaatttttgtgactgtatgtttcattcatttggttggcatttattgaatgccttcaagatacagagttcttttgtctgcagtatgtacttgtatgtaacaccacctggatgacactattatcaatagattgtagggttaaggaatataatatgtctaaattagtcctccaaaaacattttaagaatgcaacagaaaacaaatactgtattttagtgttttagtaaaataagggaggtaagctatttgttttatttatttttaagaacgtatacacattaaggagtccgcagttttcttatttgccaccaatctggttttgtctgtaatgtgcaatgacttttttttctggatttcactctgtgtttggcatgaaactgtattccttacaagaatattaggaataatattccattttccccaaagagacccagtatataagagggttttttttaagacacaaagaataggttaagctctctttactatattcagtggctttatgttagtggttgacaaatttgagttcagctaagattttaccagttactgtacaactgttacatcaaagtaaatggcatcctatatgatttcaygtgttgatattaatgttgtggcgtaacagagccagtgtttttcagccacttctacatagccatctcaaatatataggagcaaatctagaaatggtgtccaaacagagacacctaattgggtaagctttcccagtttagtcggctccaagtattataaaaatccattatttgaatgagtttatgctgatcattttgctcctgaagcatccatataataaaacatgccattgatcatggactgtcccccagaattagtatggcactaagctcacagttaattatcttaagactgaagacagtatcaaacagtgtcaaagagtgctatcaacaaggcatcttgagagctgtcactttgtcaaatgacatgcaaagatacatgatgaagggagatctaaatcatgaaagccatcaagttttggagatgacggaatttgctactaatgtgtcagataaaaacaagaccaaaccccaaaatagttatggcacagaaggcattaagaattcactcaagaatagcctggagcagcgtgtgactgacaaagctctaaactgttgacagcacatagctttatgagaaatgaaaaaaacatatgtatcattatagttatttaccctacagtaaagcctgtttgctagagatttagggagcaagtcttctagtatttgartggcatcctggaaaatgttaggtttgtaaacaaatgaaattcaaactagaatcagcaaactaacatacataccactgagcaaatagcattttaattattactttttttatttttaacatacttcctttgcctaacaaatagcattttaaaatcagcattgaacaaatactctcttgtaatgcttactcctcattgagcctatgagatataaacataatacttaataaatgaagcttattgaattattattttatcccgactgtaccatcatctctgtcgtggttagcattcaatggcaaatcatacttaccaagaagccctagaatagtcacagtctattgaattagaagtgtgcttgctaaaatataactacgtgtgataggatgtatagagaatagataaagctaaatataaagtgattgtatggtatagctgcaattatacagaatactttgagcaaagtagaaatcaaaaatggacagtttctatatataaacaaatatatacatatttatttaagatcccctcaattattctaagatatagctaaactttcaaatcataagcagaataaaattttgttcttgtttgccttaagttttgtcattgttaactgaaaaaaaatactgtattgtatattggtatagttatttcctatacttggttagttgatagatgaagcttctgaaattccaaatctatcaaatgtcattttattttttgttttataaagataatctaatctgccacaaatttttttgagtatttaatgcaattagacttaacattttggtttcaatgtgagatctcttaattaatttctgagtgcatcttaatttcttcttccaacttgatttacattttttaatttaggatttttttcattgaaaattttggacattgtttaaaatttactttttatatctagaataaacatgccatagttttaagtacataacctcttatgaactcccaaagtccattacaggtatgcgaaacaagaacacatttatttccttctcattttcagtacctatagagataatattagaaaacatgacatttctcaggaagatatgtatttctgaaacaaatgggtataatgygttcattggtgtatgcgcagaattaatttgtgaaaaagaaaaccttgaaacagaatagttaggttactttgtaatttgctttaatattcttagtttgaaatttttaagccatcattacatttcacagtttcaaccaagctacaaacattacctaaattttcagtgtttagtttrcctctttttcacatcctctgtgttttcatgtctaaattatcttatttcytagactctcttgagcctgagggatccattacagtttcaatgggtattgacttttgtgattctactcagactgcyagtttccagttgtggtaagttcaattgttcttctattttttatataacctgtaaaggatagcagatcaaaaactaagctttcaacagcttttgtgtgtgtgtgaaagacaaaacatttaaacaaatatgttttgctttgataatgtttagactgccttggaatagttgtacaaattgtgtgtagtatatgtatttttagcattcgttacacacctagccattacaacctgccatatgtgattgaaatccatggtttgttggttaaagaaagaagctactactaagtaatttttaacttatcactccagttttagaaaatttatgagaaaattcatgaggaaaatccaggagaaattaaaagcattaataatattattaaatagctcagagaagatatcttttgagatatacatacatgttatcttgagattcttaagtggaatattattgatgccatcagtacctaaaactcacacatttttttttycctttttacatccatttacaaactgctttgataaaagtcaaaagagaacatttatgcagttggcaaaggtttcatagctgaatgctgttcagaagagcttttttaggattggattttgttgttaatgtttttctataatgctttatacatttcttgtgaaattcagaggctattagcaaattagaacaaagccgtattcatgcatcattgagaattatctttgaactcttttctttttctgatataaggcccaattggctattttgagttgaagtttctttgtttttattctaaaaagaattgagacattttacctacattttagctagcttagaacagaatttgttatgatttaaaagtcttgaagttttagaaatagacattttaaaataaatgtatagattaaacatagtgaacttttcattttcatataccttttcagtttaccagtaattctggcctaatgttataccttttattgccgagaacctgcaatgataaatataagcaatgtagcataacacattgattttatgcagatcatcacctttatgttttgggaggtctgctgtattagtgatatataaaaactgattacttttcccaacattgcctagtaattgtttattatttttctattagacaaacaacacagatcaatattactgaacaacaggctatgagtaacatcactctaaatagatttgcctctgacaccagaggtatattcattttaatgatttggacaatgtgaacccaatgacaaagctcacgtaccaagttagaccaaaattaagaactaaaaaagattcctttttcttatcaatttgtataaagaaccttttgattcctatgtaattggatttttttccccaattttatttacaaagacttcctttatagtctcttgaacaggatttgcattttgtctttcataattaactaagtctctttaaggatggatatatatgcaggtagtatttgatttttatcttatgccaaggagtgtatgtgaataatattttttctaaatttctttcaaactaacattaggaaaataattcatgtatttcacatagaaaatgttcttgactattaaaagcatttacattagtatgttttgttattataaagatacaaattatttattttagattttgttaagcacaacagcatgctagatcaaaaattttgtgtgtgtgttccaaaaagagcactttgtcttgcatcaaatgtaattgatcctgaagcagtgtaatcacaattactcactttcttgattggcctgcccaaaatcagaaaatggaaaccgatcgacagtgtttaaatcaatagcttcatagtaatgcttgtgggggtagggagatagtggtaatgggtagatcaattggtcttagatgccaatcactgactgtgccttttgcatagtaaatagcactttttgcttagtgatgtgctgtattagtcttggtagttcaataaaaagaaaaaaagaaacaagaatggctgatattgaattttttccttgaaatacattatacaaatcgatacataaaattatgggtaataacagcayatttgataagaagccttcagaaatgctgggaacatggaccaaaagcctgtcagatactcttttattagttagaataaaaagaatagagtaaaatgatcctactttagcttctggattaattctatatcattataattgtatctatggataaatagatatagacagaactgttaaattaagccatgtagttatatgtatatctgataagcatttttgcctcttttttgcttggattttaaatggtcatcaaattaagttcttgattaaatttattgagatcaaatatgtgcgcaatatacataaatatatctgtctaaaagttagtgcagtacataaacagatcctcatcccccacaggcatgcatgcattaaccagtgtgggaagtcacacagcttagtgctagttagagaactgagcacatgtttttgtccaaagatccattaaaaagaaaatacattctttaatagtgaatgaacactgaaaatataagaacagatgccattagctgaccagaaattatgaggcattattgacagaaaacaaataggagcagataaacaataacagagaaaataaaaatcacagggtaaaacactcgtgggggaaaactaccataatggtaagaaccaatctggcagaacatcaagcacagcatgagtaggggtcttaagacagtcatcagggaattaactgcttccagccccttagttccccaatcttacccctgacagcaggcaacatacacatttaatttgagacttaagaataaaactgtaaagagaatgagccacttgcctgggaaagacgttttggtgtggatgtggggacctacaagaacagagcagggtttgagtttgtgtgaaggaagcaaggatggtcagagatgagatgaaatatagttttatccaagagagtatccaaaatattctcagatcctcaccaccagggtaaagccagtgtcacgtttgctggtggggaggaaaggccatttcctacctgcctgcctccaacttcatgtccacataaccagttagtatctcgtccacttataaaaaataaaactttagtcagcccacccaggggagaggagacccatagtaatgatagttgctaactcagtaggtgaataatggaatggacacagctgaatactgatcgagtgttctggaagaaagggtcaaggaaatcaactagaatacaaagcaaaaaggcagagacagaaaataaggaaagttagaaggatcagttcatctcataggagctctggcaggaaagaaaagacaatgaagggaagaaataatttagaaaataaattatagaggaacattttctgctggatgtggtggcttacatccataaccctagcacgttgggaggccaaagcgggagaattgtttgagcccaggagtttcaagaccagcctgggtaacatagcaagaccttgtctctaccaaaaatcaaaaagggttagccaggtatggtggcacacacttgtcatcctagccacttgggagactgaagtgggaggatcactggaacccaggagttcaaggctccagtgagctatgattgcaccactacactccagcctaggcgacagagtgtatccctgcccgtaatgagtgaatgaatgaacatgtgccccaacaaaagaaacacgcaagccttcagattaagagggccaaacagggtgaatatgaaaaactatgaaaaagatcacgtcctggtgaatttttgataaggagaagaatatcctattatcttccaaagcagagaaaamagcagtttacctaaaaatggacaagaatgagaatggaatcaaatttcacatcagtactcttatcagttctggaagccagaaggtaaaggaaatgacctttaaaattttgaagataccaaatagtcatttttcagcgaaggattcaatcagtttaccacctgcacatcttttctgaaaggattactcaaagatatgctgtaatagaatattttcttaaatctgagacagaaccaggcatggtgatgcatgcctgtagtcccagctactcaggaggctgaggcgggaggatagcttgagcccaggaattagaggctgcagtgcgcgatgattgcacctgtgaatagccgctgctttccagcctgggtaacatagtgagaccttacctcaaaaaaaaatcagagacagagaaaaacatagaattaataaaacagtagtgagcaaagcattctacgaaatttatcaacgtataaaaataattgttgayataatgtgaaaaataaatattaacaataaattggaaccaaaatccccacagagacaagtgcaaggaggagtgatggtatactagggttcttgttatgtctgagaagagaattgatcgatggcaaaaattagtttaaatattgtttaaattattaaagataaccactaaaataatagaaatgtgatgtattataacttctaaacagctaaaggtaggaagaaagggagtaattaaaacctgatcagagctgcgtgtggtggcttatacctgttatcccagctctttggaaggccaaggtgggaggatccctcgaggccaggagttcaagaccagcctggccagcatagcgagaacttgtctctattcaaaaaaataataataatttaaaataaatgtttaaaacttggtcagtttaaccaagaggaagaggaaaaagcatggcaaatataaaacaaaaaaaggtggctggagaggccatgcacaccacacatactagttttcacaattcacgtcagagattaaatcctrcttttactaaacaggtaaaaaacaaaatttaacatatgctatttatgagaaacctccctaagagagaatggcacagaaaagttgagattagatagatgaagtgtgtgtgtgtgagcgtgtgtgtgtgtgtgtatgcatttatcagatagatgtgctaaaactagaaaaattaagaagtattttaggtaaaaagtaataataaaatattttgtgttcattgtaatcctccaagaaaatacaattgttacaaaccattaaaccatgcacttttgtaatttataaagcagaaaacaatacaaatactaggagaaattgtcaaagccataatcatagtatattttaacatgcacatcagaaatggacaaatcagagagtaaggttaaataggtatagatacatacaggtttaatgatttaattaacaagcttgatctaagatatatatgtttacatagaattccttgtttcctgtgtacagaaaatactcattttttaaaagaacatataggatgtacaaaaaaaaggaaaactatgggataatatgattaaagaaaaaagacaacgaagaaagattagagaggagaaagatgacaaagcacagagatcttttaagttacaaaataataccatacagttctacaccagtaaattggagtagttagatgaaattatttcctagaaaaatataaattaggaataaaaacgattaaattgtatcagaaccttaaaaaagagaatttttctagaacaaaagaaacggaaatcatgccatgtcattctgtaagtctaacatcaccctgattttaaagcccaaaaggataacctatgaagatggacatcagttgtagttataaattcaaatgacttctggcccgtacaggttacccatagccacatgaaatatcagaaacaatctcttttaagtcagaaaagcaaaacaaggatgtctgctcaccacactatattccacattataatggaagttccagccaatacagaaaggcaagtaaacgccatttgcagtataaatcctggaaaagaagagacaaaattataatttttttttttttttgagatggagtctcgctctgttgcccaggcgctctcagctcactgcaacctccgcctccttggwtcaagcgattctcttgcctgcctcagcctcccgagtagctgggactacaggcacgcaccaccatgcccgactaattgtagtattttcagtagagacagggtttcaccatattggccaggctagtctcaaactcctgaccttgcgatccgcccacctcagcctcccaaagtgctataatcccattacaggcgtgagccacagcacccagccaaaattataatttttattcaatttaattattttctttttttttgttgttttgagacagagtcttactctgtcgccaggctggagtgcagtggtgcgatcttggctcactgcaacctctgcctcccaggttcaagcgactgtccttccttagcttcccaagtagcttggattacaggcacgcgccaccaggcccagctaatttttgtatatttagtggagatggggtttcaccatgttggccaggctggtcttgaactcctgacctcaggtgatctgcccgcctcggcctcccaaagtgctgggattacaggcctgagccactgttcctggcctattcaacataattattaacccataaagttggaatcaacagaaaatctattatttaaactaatgagtttagaaaggtggtacaaatacttatgtagagagaaaaaaacctggaactttcctaaagggcataaaggaagatataattaaatataaagaaatataagcaaaataaaaaataaatatactgtgtttttaaatgggagacagtattgcacctcaaattaatcttcaaattcaatgtgattctaggctaaatgccagtcgactttttcaagaaacttgacaaacttctaacattcagctggaaaaaaaaatgcacaagaaaagtcaacatttttagtgaaaaaagtctttctctataataatttaaaaatattccttaaagccacaagaatatttttattctgtrtaattgatattgacacaagaaccaatgaaaccagagaatttagaaatgtagaaattttgtatgtcataaaggtgacatttcaaatccgtggggaaagaayagaccatgcagtaaatggtgtgaggaccattatttggaaaaaatcaaggtagcttcctcccacaaattataccaaaacaagttccatgtggatttattatttaattataaaaaactataaaagtatttaaatatagtatagataaatattttcatactctgaggacaaaagtcttaagcaagacacagtactcagaaagatataaaggaaaataactaacaggttcttctattaaaaatttaaaacttctctacaagtaaagaaaaagtagacaccataaacaagataatgagaaagcagtgcagcttatttggcagaaaaaagtttaaaaaccagaacgtgtagctctcacaatcaatgaaaagggaatccagtagaaaggtaaggaaaaggctaagaataggcaatttacaagaaaataaatgcaagtggccaacttgcatttgaaaaagatgttcaacatcactaatatttagggaaataaaaattaaaacattttacccatcagataggcaaagttttagaataacttttgtgtctggtattgaccaggaaggtagagaaaaacatgtactcttgtatgctgtttgtgggatcttaaattggcaatatctgtaaaatattcatacttttcaattcagcaatttcacttwtagtgtatcaagcctagagaagtatttgtgcttgtacggaaatagatctagccaagtataagcrttgtttataatggagaaaaattggaaatgataatctgtgggggaataatgaaataatgatatatccctattacatatgtaggttttgagtacttcctgtgcattatttcattttatttcctttaatagttaaaactagcctgcaaggtaaatgtcactcattcatagatgagaaacttgagtctcagaataggctgcttgcccgtttctcttacctacaaactttaccagtttggatcctataaaggaatccgtgaactgaggttacatgtactacaagaatatatgctacagttaaatgtgtaccaagtagaatcttgccttacattaaacttttatgccatctggtcctatgtagctcggctatttaaagctaccctaataatagtgcttcattgatctggtaactgttaattctgataaatttacatctatcatcagtcattttcacattccctatccaagttgaggcagttatgtgtagaaatggagataatctgtctctcccctgtttaatcaaaggggttgtgaagaaaaaaggaaaagaaaagctacatggagagagaaataaatcaaaaagaaggcaaaatggtagaaaaggagatgcttataaactggaggacatcctagaacactcatgtaaatgaaagtaaattttcccccaaataaagaggaaatgttccatcttagttctattataagccacgccttgcttacaagatgaaactggcttacaaagtgagttatgtactggttatattggattttgtatttggttgtgtgtaacagaaacccaactgcagtggcatgaccaaataaggatttattatcctcctagaacaagaactgcaggggttggcagttcagagctggtgcagtagcttcccactgtcttcaggacagtaaggtcttccacctttttgtttcatgtgctaattttgttagcaaatgctggtcaacttcgtgatcacaagatggctgctccacctccaggcttccatctgcattccagacagaaaaaaggaaagaaatgacatggagaaaggggccaggtttatgtcagaaaagcaaaactttctcagaaatatctactgaagttctgtttataattcattggtcataactgggtcacttgatcactcttagctacaagagaggccgaaaaatatgtttcagttgggctctctaacgccttgcttgttgcgaggagggacatttcaggatcgctttccctaccccctgcaagcagctagacattcatagatgccttagaaggcagatctcctgcctcttctctctctgaacaccccacccttctcccttggcatcattgctgtcaagccacttttaatcgaggagtatgtggtgtccttcaggagtgttgggaagaagagtttctattaaaaagaataaacaagtaattcaaaagtgttgtaaataatgatgtaactcagtggtyccctaacttttgaaattgtttacctctattagtaaaaatattttgagtatgtactctgtagaagtttatttgtaattatatatgtgtgtgtatatatatgtatgtgtctgtatttcttactgtgctaacatgtatttttactaaaacatacaaaaatagaggccaggcacagtggctcatgcctataatcccacaactttgggaggccaaggcaggaggatcacttgaggccaggagttcaagatcagcctgggcaacatagtaagactctgtctttacaaaaaaaaaaaaaaaaggccaggcgcagtgactcacacctgtaatcccagcactttaggaggccaaggcgggtagataacttgaggtcaggagttcgagactagcctggccaacatggtgaaacctcgtctctactaaaatacaaaaattagcccggcatgtggcatgcacctgtaatcccggctactagggaggctgaggcaggagaattgcttgaacccaagaggtggaggttgcagtgagccgagattgcaccactgcactccagcctgggcracagagtgagactctgtctcaaaaaaaaaaaaaaaaaaaaaaattaaattagctaggcatggtggcatgtgcctgtagtcccagctatttgggaggctgagataggagcatcacttgagcccaggaggtcgaggctgcaatgagctgtcatcacaccactgcactccagcctgggtgacagagctgagaccctgtctcccagaaaaacagaaccttaaaaggaatgagaaaaaataaatataattaatagggtttttgcctatacctcagttgattgtcttgtgcctctgactttggagaactttgtatacagtgacttgaagctgaaattttaaatttcatactgagttcatttgtaatttatatatatrtattccatgtatgtatacatacatcttcttctagtccttcaccagtgtttacatgtttctcttaatgtgactgtgtcttcccctccatcaggtttggtctcattcttcgagtagcctaccctcaatcctttctctcttaagcactccttttcggctgtttccaaagaagtatcctactcctttctagagctaacccgctcacctcattcttgtgctcttcatcccaacctcttttacctctcctaagaccttgctctaccagttatttctttgtttcttcttctttactggctctttcccctcagcctctaagcatgctcaggtttctttaggtgttattcctttgcttcttcattctcaggaagcttctgctttctgttccttcttccattgccaatcytcccttcacccttcaactcactgcattgtgtagtcttcctgcaatctgaacagccttgctaagattaacagttatacttctttttatcccttatcttattctgcctccctgcagtatttggcacacrccttttttcctgaccactcttcctccagtctcttctgcaagttgcttttcttctgtttttacttaaatacaggtcttcaccagwtttgcgctttatcctttttgtggtatcctcttttcctatatgatttttatctactcataaggcttcagctcttccctacaccatttacaccattcttactgcttccagactcctacatactgccctgtcctctctcctgattccctttcttttttcttttcttttcttttcttttcttttcttgatggggtctcactctatcacctaggctggagtgcagtagcgtgatcatagttcactatagtctcaaactcctgggcttaagcaatcctcccagctcacgctcccaagtagctaggactataagcacctgtcactatgcccagctagtctctctccagattcttgatttgtatttccaattatctgctgaatatctcttcctgggtaactcagtactcaaaatataatgtggctaaagccaaatctttttctttaagtccctaaactccttcagcacactgtcattcacccagttgttcacattagaaggtgtgaagtttcttccctccattcatcaccaggtgtgtcccttctgttctagaatatccataaaatattccatcttccccttgcccagtgctacccaccctggggaagctgtatattatagtggaataaatgtggactttgaagttagatacacctgggttcaaatcccagtgctgtcagttactagctgtgtgaccttgggcatattgttcaacttcttttcagttttctcatcagtaaatttgaaataacagaagctgtctcttaagatcctttttaggctttatttaagtaaaaaacacacagtaaatscttaaaaaaaatcaaaatcctgcctagactattaatttagactcctaactgatgtatctgcctttgatttctcccttactccaccttacatactgccactggagtttctaaaacataaatgggaccatttaccttcctatgccaaaaatctctagtagtttcccattgcttcaagaaacactgaaacacctttgtcttagttatataagtaaagtaaccatatgctttatcacacatatcaggacactttagagagtgaaaggaggcaccagctggacaggattccacaacaacagccataaactgggactattcctgggaggactgggatgaatggtcatactatatatgatactctgcaatgttcccccaacctcttctgttgacatattaggctgctcatcattcccaaagtacaggcctagaatgccctctttctcctcttggaagtaaacttagccttcattcctgcagaatgctttccacatacctaaggtagtgcctgccattccattataagtgtaatttctttccctcccgctagacttgtgagcttcaagggccaatctcacttggctttaaatccccagatattcacacactacataggatcaaggttgtattcagtgtttattgaattgataaataaattgkatttattggtttgccttcaacaatccacatatggaaaaaatataaggccacttacaagaatacaatacataatagcataaaataaaagtcgattttatgttctttttttatattatgtcatttgtctgtacccacacatgaataaattcaagtgtttcttaacctaatgtttagtatttcttatccacaatccctgtttctctagctaccatctcacaggctgtgggatccagttctaacatgaaggtagaagtccctctatgggacttcctgaaagcttttgcttttgtaataaaaaggaacagatttggttgacatagttactcaacactctctcatcaccacccttccttcaatggaatgtaaactaggtacctggagatacagcagccatgtggcaaccatgaggatgaaagccaacatagtaaggatggcagagggaaagctagaggaatctgggcctctaaagggttttttaagccactgaatgagcctgtgactggtaactctaagacttcttgtattataaacgatcaatgcctttttctcaaaaaactgttagtcggattttctgcttatttgccatcaaacacactactatcatttaggatacactcatcaacctacccctaaacatctaactttaaaaaattttttagacaattttagtattttttattgatcataatatcatgagacttaggtaaatgcacttattgtttttctatctgatattagaacaaacaaggttggctttcttaaattcttcatatcctgtcatttgaaataataacttttaccatgttggtcaataatgtcaatgaatagcactgctagcaaataagggctttttttttattttaggaaagcaagtttgcagatgagatattactttattagcacctatctaaacacaatatggtcactctattttcttcttcatttaaaactaatatttttaaaaagatatcttaactgtttcagactaaagcatttcatcttctatactttaagatgtatgcaaactagagataaaatattacttctctataagctgcatgaagtgtttctcttggtggtagtggttatatacaattactgcaattttttaaagttctttttcaaatgggataatttactatacctgtgtagttttgttttttaaaaaatcttgattgagataacagatgtatttttctgcaagtaatgttgtttgtttgggaaaatgtttaaacctttttagctgtgatgtttaaaccaaaaaggtcttatactgtatatgctagcataggctttcattgcattgatttaactacttagtattaagaatgtttatttatgaagcatttagtcagctttgattgtttttcttcagtaccaaggatgattgcttcaatgttaatattcagccacctgttggagaactgcttttacctgtggccatgtcagagaaagattttaagaaagagcaaggtgagagatgtctacaacttactagaaatttacataccaaataatatgtgcttattcctgtacagtctctaaaataaattttcataggtacatagccattaacagatattagtgcacaatcttccaatttttgttaatgctttgcacttacaaccttaaaaacagatgtttgtctatattcctggcatacttgaaaattgattaatatgtctttaaatgatacattaattcttaatcaccttttcaatgctgagagttgttgcttgtcaacctgatgatatactaatgggttttgtattattcaaagtgccaggaattggggactttaccgatgtcctaccactataattgttatgtttctgtattttttcactatagaactgtttttttatgtcttactaatgtatttgtccctgcacacattaaactaccttatccttcaaaataaactcctaattatggcattaaaatacttctagtttcttttgacctaattctatattaaagaaatgctgtgttgtcagaacctattagaactgaaacatttttaaaataagtacttaaaaagaaaatattttcagcaaaatgcaagtattaatatctgtagttggcccagagtcaaacataccttctaataaaaacgaggtggttttttttcgtatgtgaataaggggagataactgtctgattttatgtgtttaattaacgataacatttataaaattaaggcatatttaaatgctatagtcagcagtttttacaactttatgtgaatctaagccattttttcctgtggagggtgttatcaaagatcccttcattttgaggtagtaaatcatacccatcaaacttccagaacgtactaggcacacacaaatacctacacctaagaagaggggcacgcttcctggcactctgctattgtgctgaagatactgtttttactctaagcctttgcaattcacaatgtcaaaaagaaaatctcatacaagtccataaattaatagtaatatttttgctgggcattatttaagcaataaaaaagaacgatgaaatctttctttggatttgcatttcttggaaagttgattattgctatagaggaaaattatctttgtgattttatttttctattgacaaattgaattgattcttatatttgctattcttaccctttgctggctaaagcctgcctctctgctttacatctgctcagcaaaccaaggtgagtggcacacggtgactgaataaggctttggcacatttattgttaaggggatattctttttttgaaaagtgcagctaaagtatatctgaagcagcagattattatataccctttcactccctcagcttttggttagaatacttaatatttcgatcaaattttttgtgctctgctgtgactgagggatttttcgctgactagccatacagaaccttaagtgcatgagagaggtgcacttggagaatagctgtggtcctctgtggagttgttgccaaaattcctttttcttctgccattttacttctatggttgttgattatttgtctgaataaatctggcagctgtttgctatgtttaatagagcagaaaggctactctgaataaagctatttgaaaatttgtttatatgaagtatttgtaaatccttgcaagtctcttggcatttctgtatcattctttctgtcttcctgaattcattctttgatgtggaacttgatgctggcaaatttagcacaggtttaaagagtcttttcaatagcatctttttagttatagatttcagcaggtttggtaatagaggtctcaatcctcaactttacacatgtatttgttatactactctagtaagagcttagcttatttccacaaaagatacctagaaatctctcactaacggaaaagcctaaatcagaataaaaatcygtttcctcagattttatcaatgcaaaattctggaaggtaaaatgcaagtaaatttaaggggtgtgtgtgtgtgtgtgtgtgtgtgtgkgttacaccagctttaaccgatttttctaccttgaataaagtggatttacataattaatatcttatttcatatgacacattttaaaactcaagaagtatgttaaatgtgttaattaaatttaactgaaaaaattataaataaggaacatggggaatatggttctattttcattctaaagatatacgtaactgaaaagtgtacagtattaaataaaagtggttctaacagagtattacattttagattaatattttttaaaacaaaagttttatttctaatatgcaacatgatctatcactttttctcagttgtgtttagggtttcatggctaaacttttttatatatatataataagattggtagtcaaagtggtaaaygaaagattagattattctacgtattgacggttatgtatataagcctccatcagaagcatgatttattcattgctatgagtttcaagcattgcagaattagttaatgatctagctgtgagatgctttcaataagaaaataacatgggatctattttttacttaaaaatatttaatttggtttcttcacgcagttttaatttcaagagtacgtgttccgagataactcctcttattcattttcttcttgtgaattaaattgcaaatgtaaaacttagaattttttttgaatttttattcattttcttcttgtgaattaaattacaaatctaaaacttagaaatttttctgaatttttttatgttatttggtttgccttttagyagttaattacagctgattagcctaaagtaagtgctatctactgcyttcaccaaaatttagatagattctaataaagccacaaattatttagcctacagtttttaaatattttcccagtgattttacctttattatatatgaacaggctctacagtgttttaaagtattattttttaggaggaacttttaatgaaacctttgcctatttttctttcctgttaatttgagaatacctgatatagtttcatttagaaaaatctctggtttaagaaacctaaaatgtttacttaattttattatgatttatgcatctatcttatgagttcctagctagcaagatgctaattctttaaatggtcagacatttactattttctggcccttaactaccataagcaatcatatttgatgccccttaattagagcacctttttttctttccaggttctttttccacctcagcaatcgagacaatacatttgcttaccrtgctgctctcctaagtgttcttttgcatgtaaattaatcttgattcagtttacactgtcatgctgagtggtacaaattgcctataacaataaaacagcatgagttaaaaataaaggggggtgggaaggcagattgaatgtgtgccttgataggatgttactttgctttatgccaatacattagctgacgataatgaatcttctgttctgaaaagcatggtttagttgatttttttaattttacttcaatggagcagtaccttgtcttttatagaacaagttagacaaaccattaatgacaagagtgttaaggttaaatatgaagcaatgcattcacttctctgagtgctatccatctttccatttacaggagcttgacaaaagtactggctttgtacaacatttcctttaattacatgctgcgggaaacaggcttttaacataaacatagttgcattcatttattcagcagttgctcttcaatagagcttaatggagaaggtttaaatcctaaatgagtacacacatctctcagcagtgttatgtcagccactgtgctttacttaaaagcagtgtttgactgtttgtatagtttttaaagcttttgcctaatattgaagttaaacggtctaagacagaacatagtgttcccagagtttgaaagtggttagtgaaaaatgcttgttgttagaagctagatagttctattttctaactgacggcaaaagtcttttcacaatgttaggctttagtgttttcatactgttaatcgtagggattcttttaaattttagttttcatttgcaataaataactaaattaaatatatatgccagacggtgcagagtcttttgaaaacatgaaatcagatttttactattttcatcaattttgtaaactactgtgcacatatcaaatatctcaaagagttattggttctaatagataaccattagatgtctatgacttatatcaccgatccaaatagatggcatttgttgtaattaatttgttttttaacccgggcactaaatttcagtatttgttccaagtgtttggtatgttgttgaatttgttcactgaacatttttacaggaggtctggatattaatggcatgtcttgcattaactctgtatggtttttttcatgcttttgcttaacttaatttctctcctaaatattatttgaaatgtccctgggatttaagagttttcattctcattttttctttcattttcaaagtttttgcttcaggagtttcaattagtgtttttgtcagcaaaacactttccattcactagacaagtacttttagctctaagtatagcctaaatacttgtgcattttcagtgacttccagtcactgttgagataacttcgatctgtcatactgaggccatttaccaggtattgctgctagttatcctggaattactttgatgtgttctcaagcagcatttggcaatgagagatctttgaatgaatagaaaaaaatagcaatagtaacaaatacatttatatattattaagaagtaaaagcttactagtttacataaaccccagattgagtatactttaaagagactgaaattgatatttcatatgtgtgattctaagtttttatcctatcatacttaaaattagatttaagtgattttttactgaatttttacacattttcctatacaatgaggattttaaaaaacttcgaaacaattgcattttgttttagttttataattatcttgtaaattacatcctaaagtagtgtttcttttgttgaaaaaaagttaaaattttggccatgagcttaaaattctgtaaatgtaattttcaaaaagaaattaataaaagggagccttcttttgcttttacaggagtgctaacaggaatgaatgaaacttctgctgtaatcattgctgcaccacagaatttcactccctctgtgatctttcagaaggttgtaaatgtagccaatgtaggtgcagtcccttctggccaggataatatacacaggtaggttcactaacacacgatgtggaggtgaagatgacttgaatatgtataaatatataattttaaattcattgttttctttggaaataataacccctaaacatatatatatatacacacactcccttttttttctgatggtatagttgttgattgctttgcattaaggctgtctttcccatctcagagcatccttatcatactggcatggtctttcctgaaagatatacagagcatattcacattttataatagcttggtaatttataaagttaccctttttgaggtggttgagagtttatcttatttcaccagattcagtagatgtccaggaagaactattctataaagcagtatagttggacttttttaattgaaagggaggacgtttgggtactacatacagatttccttttgatagccatcccctgagactgcttccagtaaataaagagctgctagatgaccaacatgggggtaaatacagcttctgtttcttagaccagtaatattttctatcaccaagcatctgaaatatgagatccaagttatttgtcctgaaaggcagcagaaaatgtgattaatgtttgccctcttgtatttttatgaattccagtggctttaaatgaatgtaaagataaaaataattatctcttatccatttggtgattgcacagtcctctgtgagcttaagggaattcgttgcaaaccatctcatggcaggcatacttctgccattaaaaatatctacacactrtatatttagtgtgccctttcttatataattatcaatcatagaaaacaaatttagcatcaaagggaaggcctgcagaccttaaaaaacatttttttaagttaacacaggagcaagagaggccccatatgaaaaatgctacaggtgatttgggttttagatctaactctgccactaatgggcttggtaatcttggggaagttataacttcttatgtgctttacattccttatgtgtttggaaatgggtggcaggaagaaaaagtgaggtaggattgaaatgaaattctgtgatagctatgaaagaacattagatttgacttcagaagagctgacctgccattactgtatccgtagttgcctaacttcactgtactaatcacggcggaataaaaactgcatgtactagttgaaaaatagatttaccttgtactgttttttttttttttaagttgctcaagaggtctcatgctttcatttcttttttgttgttgttgagacagtcttactctgtcrcccaggctggagcgcagtggcgcgatctcggctcactgcaagctccgcctcccgggttcacgccattctcctgcctcagcctcccgagtggctgggactacaggcacccggcaccacgcccggctaattttttgtatttttagtagagacggggtttcactgtgttagccaggatggtctcgatctcctgacctcatgatccacccgtctcggcctcccaaagtgctgggattacaggcatgagccaccgcgccyggtgtctttcatttcttagtttttgacaagctctatctatctcacataggatggtgataaaataagaaaatggatgtaaggtcatgatacagaccaccacaaaaatacaacttatttatcagttaatgttgttcaatagggaaaagagtaacaaaagccttttcagtgaaaataaatattttgagttttcctgttttaattttattctgctttaaatacttcttttcactttcctaggtaattttctctaacagaaactgttttgttttatttatgggtccttggaattattgaatttactaaaacaccaaaatgctgtattatcaagtataacttcttcagtatgaaattttacctgaaacacctagtatccagcaatactgcagtcttgttttaatatagagtagccactgtttatgctggaacatctagtttagttttgttttgtgtataggttgttttgggtttcttttttttgttaacttttctgaaagcaatggcagctgtctagatttttgtttcttagaagaaaaaatgtcaaggctgggcaaggtggcttacatctgtcatcccagtactttgggaggctaaagtgggtagatctcttgagcccaggagttcaagaccagactgggcaacatagggagaccctgtctctacaaaaaatataaaattaaatccggcatggtggcacatgcctgtagtcccagttacttgggaagctgaggtaggaggatcgcctgagcccatggaggtcaaggctgtagtgagctgtgatcacaccattgcactccagcctgggtgacagagtgagaccctgtctcaaaaaaagagaaaagaaagaagaaaagtgaagttacaaagccacataaaatgaaagctatcttcctattgggagatagacttagagggacccttagcacagttgtataattcttattaaagatagtttgccagtaacttgtcttgctggtttggaatgtaatacctgtaatacctgctcaaatgatttaaattaaaattacaatcaattctcaattgtccatgctaatacagaggagacacacaactaagaaccatttatatttgactttggagtgcagagattgaacccaaaacttaatgttcgtggtcctcatactcatccacagtgtcttgaggcttttctgttctagccgtatcatcagtggcctggtgtttggctctgtaacctgggggagggcccaagttactacagggtcaaaagtcaataaaatacctgtagatacttaagaatagcctgtgctgtcttaacttgcttctcaagtcccatcatactgaattgaaaaatatttcatatttgcttttatagctaaagtatgactgtaataatgttctaaattttagaaagcttccaggtaacaaacacctaaagttatttttattttttatacagatattgacataaattattatcctgtgtatgtaacactttttctcattctttttgctaatagcaattaaaacaaaaataaacaattgttaataaaacgtacttttgtactttttttttgcttttcttaatttcatttaaaatgaaataggaattagtgtttacattataataatataaattaactgtttaccactttattgaaataaatgtttttaactatagtgttccatattatattaccctactccatggaattaatacatttctatatctaagtttatatattatttaattgctaatgataaaattgaaatccctatgagattttgaatgattcccttattcttttgtgatagttacgtttttgagtttataaagagtaggaccaaagccactctaatatttattaatggtaatcagtttgggattatttttaaaaacaccaagtatgaaaagcatttttactactagtattttaagagattaaaattttcaatatgataagttactcttggctggcttatgttctatttaatttttcaggatcttttctttctgagaggacttttaataagaattagtgtattcgttctaaccctttaatgaatagagtttccattgcctaattttggaatactttatttctactactcttcaaattttatacatttttacattaaatgccaggtaaagaaatacttagtgtaagaattatctaaggaaaagtgaacctttattaatgtggagtagtatgtaatggtataaagtacagattttaattgaacacttaatagaaaatgattcctaacacagcaacagaaaatggccctcattaagaaaagccaattaaaggcgcacaggttttatgaaatacacttcaaaaaccagagacattttttatttcgttaacacttttaaagatcaattgagaaagcagctctactgttagattatatgatttttagttgtaattttctaaatgagtgataggatcagagccaaacagtatactattgagagactcaactttatcttcatttctgtcgtacttacttgaaaaacctgctcttggagaacaaaatcatcttattgagatatacagagtggccgggcatggtggctcatgcccgtaatcccagcactttgggaggccaaggcaggcagatcacttgaggtcaggagttcaagaccagcctggccaacatggtgaaaccccgtctctactaaatatacaaaaaaaagtagccaggcttggtggcaggcgcctgtaatcccagctacttgggaggctgagacaggagaattgcttgaacccaggagggagaggttgcagtgagccaagatggtccactgcactccatcctgggcaacagagggagactccatctcaaaaaaaaaaaaaaaaaaragagagatacagaattatggtcattgcgtcaatctgctgttttccaaattacagttaacgcatgataaggagtattacaaaaatgagaagttccatcatcatcaaaaagcatttattaaatatgtagctgaatatcttcacttcctgtgtaagatattcaaatttattttaatgagatatacattgtgaaggtcttaatgcatattacttaagacaatactagtaaactaatacataaataaagtgtatcccaagggcaaaatggacagcattaaaccagtatatgaatggactgcaaaggtgaaagggcaagacctcatgtgttcgaaggtaggagattagaggcgttagctgtggggatcccagtttcattcagggccaggaaaactttcatgtgattctctgtgaaatatccaggaagggtttaggaaggaggtttgtgttcaatgtcgtggaaactgaggtgccttgcttttrttacattgcatgtcctctgataacagcacttatgagtaagtgcagtggccaaaaagcagaaaacaaaaaacatgtagctccgaaatcgctaaggtttttctgtacaaaaaaatcatgtgtgagtttgtgtaaaactcagatttctggaacccaccccaaaaactcagcttcagtaaatctgagaaagagcccaggaatctctattttaggcagcactccaagtggttggaaggcaaatgttccgaagtccacagtttgaggctgcctggaattatcaagctgtaatgccacatgacacatttcaaaatattttttcctatgtttatatgttttattttttactgrttagtcagtaagggatgccagtagatgagatgtttggtttaatttttcttacacatatcccagagtgctccagcaagacagtgtattgtccattacgggagtacattagagcagtgtctataaaacagtcttagaccataactgtgtatgtctttcagcagtctcagccatctcacattttcacccatagtcagaaatcctgacatttgtatacaataatattgttgaaaaagttgtcacacttacctactcattttgccttttcatgaaccgcaaattaaccctctgaggagaaaaggtgatatttgattgaagacagaacatcctgtctctgccatgattctattttagttcttagcttattcagtaagattctggagcaactttcattattaacttgtattcactactgatattccttcccctctccccctcccccacccccccgtatatcttaattagtaatttggattttgtttatcctgtcactttttaaatttgcaagcttttaccatatgcaacttgtggataattacaatcctagtcgaataaatgttggtttactgttgtcactaggtccttaactattaggaaagtctggtgctgtgagtgaaacagtgtatccattggcaaccaagtagtcaactttttaatttatcaacacacataaagacagtttatttcaggtttaaaataaaagtcttattatttaattcaagtacaggtaaagaacaacttgtttcatttctttttttttttcttttaagacagggtctcactctgttgcccaggctagagtgcagtggcacagttgtagctcactgcaaccttgaactgggcccaggcaatcgtcttgtctcagcctcctgagtagctaggactacaagtgcatgccaccatgcccagctaatttttttttttttttttttgtagagacagggtgtccctatgttgcccaggctggtcttgaactcctgggctcaagcagtcctcccactttggtttcccaaagtgttgggattacaagcatgcgccactgtgcctggccaacttgttccatatctaggccttaaactcacccasttaatcactgttattgcatacctgtttgaaggttgttaataggggaaatactggtacacattatttttggtatcctaaaaagatctataatgtgtagctccttcacttagtatttttttggagacctttgtgacagattttgctggtgctagggttgcaaacacaaatggcaaagacacttcttgatggggtctctaatatttccctttctctattcttagtttgattaacttttgagttactgtttttgtttgttagttgttttcttctctgttggtaactatatgggatttgaattctgggtaattttggagaatttgtaattctccaaagaatttttgcttttcaaataacattggacatcttgttgccctaattgtataagccctgatactactgtcaaccttcttcattgtataaacagaaacaaaattttgtataaatagttttaagtataaaactatcaggctcaggtcttttctacaatatgacaaattttgagtctcaaacaggactgaagatttgtagaacctctttagtaatcaaaacagttctttctcaggttggtggctgtccactagaggacagcactgcatttttatctgactgctttgaactctgcaggccctgagcatcagttcattgacaaacaaatgcggacctcagttaattttcacacagaaagcatatttggatatttcagaagtaaccaaactgcacagctgatttttactttaaaacattctctatttaagttttatttaagttcaccatttaatgtcctctaatgcaacaattttrctaatgggaatctgtaactgtttcacgtaaaaatgaaagaaaggtattcttgatgcttttccttctggtttgacaattttgtaaggaatcaaagagaatggggtaagaatgtatttgttttactattagttttcccttgttaaccccatctcaccccacccccaccagacaaaccagaaatgctctgaaataactgggatgttttatgtcttctttaagcaagggcacttagattttttagctttcctatataaagaaagagaatgcatcattggcctgatagtgtggggaataatttttttataccatctctgaagattagagtaggaactagagagtcctaaattatggtggttgtttattttttattttaacttttctcatttgaacgttagaggaaaatactacaatattgttaggtgattttttaaataactgggaaaaatacattgctttgtgtaaattctctaaaactaaatcacgtgtaaatgctttttttgtccttcactattaattcaatagtgtaatggtttaactttaaaatgcaattttatagtcaacaaaatagaattttttacaacttacaaattctctgcctgtttaaaatgttctactataataactcaaggtaataaagatttataattttaaatcctttggcagatagcgctccaaatcactatactttggtattgatgtttaggaggcttattccaaccagtatttcttacatataatgatcgtgcgacttcattacacatttgtcaactttggactaattatttttatacagctagggcagggcactgcatcttgtgatcgtctttcttactaataggattctgtctgcttcagcaggcagtaattgaaggcttcatgtacagagtacaaaaaaaaaaaagttttagcctgagtgggtcattgtcacagcttctggtaaccagtagaacagaaagcmcaagaaaattgaactcagaatagaaaaatcagaaaccaggaagactatccaagagaagaaaaagcatgtcttagagctgttgcattaagtatagcaaatctgattctgtgtaaaaaatgttatgtttgtgactaccctggagactgacgcagcctctcagataaatacttttaaattcatgctgtaccgttaatgttaattgttagaacaattgaattataggatttcttttccttctaacaaagaacatgtatgatttatagccagtttgttacaaatcttaaaaagtatagtttaagtgcatggagaataaatctgtgtattatagatattagatttttttcaaatttgttgttgctatttggtctgtttttataattatgactatagttaagacaaaataactttttaagaagaatgaaacttttttttatttagctttgacaaccagcttattctgtctttttcgtaaatcttaagaattcctataggcttcaaagattaaatgtcaattgctggagataatagacaaagacatttaataagatgaaatacagatatagccaaacagttttaccttctcagttggtgattacaaacagcaagtggttggtgatagaatgaaatgaaaaatatctagatggtgtccttttaataacatggagcccgtcatacacaggcaatacatctttaactgtcatcgcacttatttgttctcatttgtggtgttactgcttttcgaggttgattggtctccccgtagtccctccctgtgttacagctccattcaaaaaggctttgtatttttcattgctggtgtctctttagggagaggagagtaggggatatttaaaatgttttaaatctttaaaggcagaaatgtaaaatatatgaggaatcaagtccgcacgctttgaattacgcattactacaaaatcaagtaaacaatttttgaagagaggactcttccttcttaatgtttttggaacaataatagattatgtgtatattaggtaaatgggaaaaactttatctgttgactgataaaaacaaattattatgggtgcatttttgtatatatgaagataatttgtgtgacctggaatcagaatgcttgggttcagatttctgctcaaccagaaatttggtgtgtggccctgaggaagttcttcaacttctctgggcctcgcttgcctcatctataaagtgacctgcctcataggattaaatgaaataattccagtgaagcacttagaacccactgccagaacacagtaagtgcttaacaaatgatagctgctatcatcattatagtgatcaaaaatttctcatgccttttgaaaaaattttgtcacagtgtgatcttagttcaaggccaagcacagaggttctgatgtcagccattaagtttagtatgtaaatatctgacccacgctgactttataatcaatgtttctgacatcccaaagctagctatttattacttatgaattagtactctttccataactattttttgcatgtatgttgaagcatagcctgtgcaggagttaaatgatgaataaatctggggtagtggtttttgccttccgagggccaaaacaaaccaattttgatcatgctgtgttccaattaaatatatcctttctgaactgtgaaatgagaatgtcagaacatctgatcttctagtcttccgctttaaaacattgcttccaccatttgtgtccactagaacatagagacctagttaataaaggcagtagcttttacaccagctagcagattatgttgctaggatgatttgcttagtgtgtttccattgcagcgtaagcagatgcctcttttctttcatacccctattctttatagtactgagacttttgtggcaataggatttcaaaaatatgtccaagatactaattctaatttctgtcaacatactgacaccaaaattgacatttgtctctgccaactttatattaattgtaacattaactctaagttttttaatagaaaagagacaaaatgtgccttggggctgtgccaccctgaaattcaaacaacagtrcttttgtgttcctattcaggcataatctccttctctatggtcccaaggcacaagtgttaagtaaataaagggactaataagactattgtttacataattataaccctgtcagaaatagggacctctgttgaaatatttgttgagtgaattacacacgtgatgaccgaatctgtgggaaaagttgcataaatgaatgggaaaatagagccacctcatatcctttggtgacgtggttttacaggaatatagaaacagcattctcctatgaagcagaagagcctgaaaaatttagacaaaagaaatgcataaacctgtgaggagccttagaaaagagagatcattttagggctggtgatctttatgtttctcaaagatgaaattgaggtacctagttcataatctctcatgtgtacgtctgaaaagcagatggatgtgtgtgttaagaggtttataaaaacctctttaaaaacattggtatgatttatattcctaaactggttacttacaattgcttctctcagtaggaatactgctctgtcagattccttgcaagttttcagcatgcttgtagagtgcacaagcaaatgcctaggaagattttctaacatattttgttgatagcccattagctaacattttaaaacacaacttcaaagtgtttataatatttgaaatttagtaaaattagcatatctgttttggtttggatacattattctaattattgttggacaacctagttcatgattttatttgtccaaaaatggcttgtttggttttaaaaaaattaatgtgttatgagatcttgatgttattttttaaaaaacccaaaaaagaaattacttttcatttaaagagaatctgcttcctgcttaagtggctaatattttaattaagtcgggagtgaagtttttctgagtgtctcctgataaactccctcttttatgttgatggtaattaaacagatccctgtggacaccgtgggctctgtgcgaggcccatgctaattgtcagacatgagacactgaccagttggtttgctcttgaatagtccgcagcgtgctgttagcgcggcagttttatttttatgtattgtgagctgttgtcagggctaactgggtgccattgtggctgaagatgttgcgcaaattgaggcagatggctcagattcagacacgtgtcatatagaaaggggcaaggggattggccctgcaaagtggggtcacagcaggtcacagacctgctctacacttgttagtgttttcaaaagctcatgtgcagcaactttgtttttctccagtcatccctgcaatcaaaccccctcccccaaaaagtgtgtggaacatgcttcatgtggaaaagggaggcttgggaggttcctgtcctcttccttcatgaccctgaggctcaactgtgcatgcagaatgaattagcaggattgacagaagttcgttatgcctgcaacggcttttcagtcaattgcagtgcttaaaaggctagttttgcttttagttccgtgtaatcagtaggttcttcatgtcttggaatttagagttagagctttagacctccagtttcctctggaaatgtttttgtttacactctacagaaagaaagatctaatgtcctaaacatttcaaaacaaagaaaaagggaagcgtgaggttgcacttagctgtcacgtgattttgcttcatgtcatcattaacattagagatttaatttgaatattgttacatgagtgaattcattgaaacttagtaagaattttataatgtacgtaaaattatctaacttattacataatcattttcagatatgaggagttaaattttgaagctctttgagaaaggtaccttttcttaacatgttttaaaaataaaaatacaatggcttatttaaaatgtccctatgcatggtgaaatgttaaataccaagtggatgaatggttctcaamtatattgtaatggagaattattcacatgcatctattgtttaaactaataagtaaaatagacttcctttttctgttctgttttaaatgtgcactaaaattacctgcttgtggttagcatgggctggacagtttattgatttttcagaagaatgcttggctttgggtttttggcaatagggagcctgcagcaaattatttcatttgacaaaaaagagttattttaatcctatttgaatgtatgctatctcctttaccctccccatcttatgataaaaggtctctcttttttctcttccaggtttgcagctaaaactgtgcacagtgggtcattgatgctagtcacagtggaactgaaggaaggctctacagcccarcttatcataaacactgagaaaactgtgattggctctgttctgctgcgggaactgaagcctgtcctgtctcaggggtaacctgcttacatctggactttagaatctggcacacaacaaargtgcctggcatccactactgctgcctttcatttataataatagcccttccatctggcagtgggggtagaatacactcttgacattcttgtctcctgctttagaatgctagtgtgtatctatcatgtatgcaatactttccccctttttgytttgctaaccaaagagcatatattttactgtcagttgtctcaactcttgaatccatgtggcgttttctctgtcctgctgcttcttttggcctcctcgttttccttctctttttcgacaatggtagacatgaatgagatatttaaagttcattggaaatcttcttccctacagcagtaagcaaaaattagcaaagagatagtctaaatggcctctcagcttkgtatgtgaaaatgagatcacatactttttaaatccaaatacaaaagcatagtctctgcaagattttgttctttgaatttcttgatattgtaattgattattgataactgtcatcatgaaattatctctcaataataagataaataaactagcatatgaatcatatttgtctttgcatttttaatgagaaactattaataatcctgaagttcatatgctaaagttttcttattttaaagcaagtattttgagtgttacattatgcagagaagcaatgtggtttagttagcgaaagaaaaaccacttccaaaccaagtaaattttctacttatagtttactccaaggaaaaaaaattggtgtatttaataacaaaaacaaaaatcttcatattgcaaaataaacatcttctaggtagttttgatctattagtagatatctgattatgtggcctgctgaataaattctttgaatctcatttttccttatgcccaactttggaaactaactagcataaacttatagaaatgtttaaaactagttatrtgatcaacctattagcatcttttcctagagtatttgttttatttgctaccttaagttactgttttcaaggttgttctataatcagagaacttttctaatactttcgtacctttttaaaaccagctgaaattttacttcctttttgaagcaaggtaatggactttcaggtagtataagctactcagttctttttgtatagagccacatacataatgatttttaaaaagtaaaaaggaagtgactgtacattgcttgaagcattataggaaggctgaaaagaaaagaatggaattttcttggaacatacatattgaaaagaacaaaacagagtcgaaaaattatttaaattttcaagctggtgggatgacaagagtaaacaaaattgttaaattttcctgctccagaaagaaatatagccctgaatctccgggaagagaatgtacagaagtgcaatgtacagaagccacgtgtacattttgtgccaattccgtaccatgtgtacattctgtaccattctgtaccaatgtatggaagccacgagttccacttccctctggagcctgggcgctgtggtaacacacccaaaagcccctttgtaatcgcaggtcgttggcatttccatattagccttattgctcagagcttcataactttgaattttaagtcaataactttttgaaatgtcagacagaatttgacaggtttaatacctgttttctgaggaagaaaaaaaaattatatccatgctgtcttcaggcagagggaaagtgcatgttgtgattgagaaaggtcttatttttccttaaattaggacactcatctttaaaagatagttcacacatttgtatttttttaaactaaggaaatttaattagggctttacttttgactaagttatttttggctgctaacttttaaaattatggtaaatcaataatataatgtagtatgaatcagtgaacagtatgtatcgattgtaatgtgcgctaccagttgaaaccattttaacactagtagcttaatatcattaaaatgtttttcacgtaaaacagaaaaacgaccaaagccccaagttaaaggtttggttttttttcttttgtggtgtggtgattcagagttccttgcctcatatttcctttaactttgtcataatccatgattatctttaaattgttccattgagtcgagttagtcaatgttgaattcttaattctagctatattttttcattttaatgttcacttaatgggacattttatgtacaccaatcttgaagaatggctctcatagtatatttcagactaagcctcatttttgatatcacaatacatttgctttatttattatgagagtttttttattctaaagagactgtaacaatgcatttctcaaattaaaatactgtatacttgtccttctcgataactatttgcaaacgtatgaataactttatagcttacaaaacgtttgcccttataacctgtgttcccgttgttaagaatttagatgttagacaagataagaatccagactgatggaagatttcaaaaaaagaaaagttggaccagctaaaagagaacctaagatctttcccctgacttgttccctctctgttgtctctctgaccttctagggaactttgtttaaagggagaaaggaatcctgttttcacaaaatgagagagaaaaaaagagcactatgtttgccagctgtggtggctcattcctgtaatcccagcgctttgggaggccgaagtgggaagattacttgaggacaggagttcaagaccagcctgggcaacagagcaagaccctgtctctaaagtaatttaaaatctagccaggtgtggtggtgcatgcttttaatcccagctgctggggagtctgaggcaggaggatagcttgagcccaggagttggaggctacagtgagccgtgatcatgcccctgcactccagcctgggtgacaaagtgagaccctgtctcaaaaaaaaaaaaaaccaaaaaaaaacagagcctttctattccctttttgctgaaagactatatctactgtgaatgtggagaactacagtaaacctcatcaggggtgtagtaaaatataagttatgctctgtacttactcaaaaaacgtacaatctaattggcaataaacaaaggaatgaccatgtggacctccctaagttagtgagccctggtttgcaaataagtgttgcttacatcctaacacaggtttgcctccgccccacccacacttccttcaggtgccaagtcctgcagcttggcagccccagaggcctgctggccccagcttttcacctccatggcctccttacacaggtgaccgcactggactggccggccatgggggacacacttttgttcttccatcagttggggttgattaattgaaagacaatgacttctcgactgtgcttgtttatcttcttaagtcctcttccccgccggctcccgtccccctgctttctaacctcaggaaacattttcatgatcaattcattctcttgtatcctactttggtaacatgacttttttttttctaccgcttttcagctgagttgtggagtaggcagaactttattatctgacctgggaagctaaccactatgtgatactgttttctgaggaaaatatgttagattccacatggtaacttgacaaacaaacttgaaacatggctgtttgaaagctgagatggtttgtgagaaacattgtgaggcagtgtggcgtgattaattgtcagataacaccagtaagtacctttgagtttaggggaagaagtgattagtggctagagaggtctgagaaggttccactgaggcaatgaaactagctagttcttaaaagtagggtggcatatagaagagaaaacagagtttctaggcatgggagaagggcaaatatgtgattctcagctgaggctgtatcttttaaaatgttttgaaaatacctttgtacagaaagcaacactggccacacctaagaaagcgatgcttccmctccccctccttgccctcacttctctttcccctctcacacagtccctttctctcaaagccattccccatgtctccacctcaatggcctgtggtagtttagagcaggggtccccaacccctgggccatggaccactaccgtggcctgttaggaacctggcccacagccagaggtaagtgacaggcgagctctgcctcctttgatgtaagcagtggcattagattctcataggagcacaaaccctactgtgaactgcacatgtgagggatctaggttgcatgctccttatgagaatctaaatataaatgtgatgcacttgattcatccagaaaccatcccctccatccccatccatggaaaaattgtctttcatgaaaccagtccctggtgccagaaaggttagggaccactggcttacaggagaaatgaatggttgagatatcatggatgggagtagcctgcacttgtaaatagtgtagaggcagaaaaaaaggttgggaaaaccttgaactagatagagatcaggagaagccagcattgtttatgttactcttctgcttaaaggccaattttagatatttccttggggattttagttatttcctgtgcctttgcaggttctaaaatgattcttttcagacttagagtcaaagtagctaaagaatattaaattctggctggttgcagtggctcacgcctgtaatcccagcactacgggaggccgaggtgggcagatcacgaggtcaagagatcgagaccatctggcaaacatggtgaaaccctgtctctactaaaaatacaaaaaattagctggatgtgctggtacgtgcctgtagtcccagctacttgggaggctgaggcaggaggattgcttgaatccgagaggcagaggttgtagtgagctgagattccatgccactgcactccagcctggcgacagagtgagattctgtctcaaaaaaaaaaagaaaaagaaaaacatatatatatattaaattctagccaggagtggtggctcacgcctgtaatcccagcactttgggaggccgagtgggtggatcacttgaggtcaggagtttgagaccagcctggccaacatggtgaaaccccgtctctactaaaaatacaaaaattagccaggcgtggtggcgggcacctgtaatcccagctactcgggaggctgaggcaggagaatcgcttgaacccaggagacagaggttgcaataagtcgagactgtgccactgtactccagcctgggtgacagagcaagactctgtctcagaaaaaaaaaaaaaaaagaatattaaattccattactatctatttactggttcagtgattgtgagctgaggtgatattaaaatttctaatcttcccttgtgtttgtctttctctggggccagttttatgtacatagtcacttgtgcatataattcctagctgattcagtaaatatgtacaactgaagactgaaccctcagaaactgacatgaacctgcctttaataacagtctaagacactgataacagtctaagacatctgcaatcttgagggccagagacaccaaagatccaggtgtaactcaagaaacatctttatcctgagatctagagatgtttagaaaacctaactggtagataattctgccagtagactcaaccatgtcaggccttggatcctgcagatgatgcgtgggcacttgaagagagcagggaaacctcacctccaccttcctcattcactgccctggataggaagggagggagagtggttgccaaggagaaagtatcagaacatagtgggggaagagataaaggagattagctttctcaaacagtgccccaccaagattcccgtttccccccgccactccagaagagcattttctcaccccatgtaagaaccacatattttttttctttagtgatgtgatgaatgagaagttttatgtcatgatagggtcaaccaactccatggatggtaaggaattgttaagaccatgacctatgaaaagaaaacttaaattctgcttttgcaragtagttaagaaaggtcgtatgaaggtaggcccttcaagctacatttaaacgtcgtttctaatgagttcatctttcgaatgcttatttcattttgtcaataaaccatatataaaattaggaatggcaaccaagggtaagatacgaactcaagcatgctgataaggggggcctaatgtagaaatttggcggacacaaaaagcccttccaacttaaggtttgatttttgagtcttaaaaaatgaagccagtgtgaaagggcctcttactggcatcacacagaaatcctcatcatccaagagccctcttccttgaccccaaagtctttgttttattcaggactcatcaaaaccatagggcctaaataaaaatattttgtaaacaaagttatggacagcccagttttctaattgaaagtcattatgatttctgtgctgtggtgtaattacctaaaaaaatgttatttgatgattaagattctggagtgaattgtgttctttgggctcctgcaccgttcctccatcagggacttggtttcagcggtgtgcagctgctggagttgatttacagtgctgcggctgtggctggtcataaataaatcctcttatatagttgttatgaacacctgttagatcatctgtcagcaaagcgctgttcacatttatcatggtgcgggagttattttacctcaatccatttccaaccgactcggcctccatcgctggattactattaccacaccataatcgcttgctcccactccatgttacaacttgcagataaaagatttcactacttgg

SEQ ID NO: 9877 - DNA, 14018 bp, Homo sapiens
gcaagctttctgaaagtacagcctgaggctcacctctgatgaaaagactggaggcaggtccagaattttcctctctacaccttccaatcttcagatagtctttgggaaccccagtttaaatggctggacctcattctggaagtgtagggttaagatccagggttgagctccaacagggaaatgaaattataaygtaatgctgctgctttgggagagctgtggatgcaaatgctgctgacgctgctttgcaggtatagtgctgggaccccaaggaggatagataaggtgccctgaatctttaaaaagactcatcatgtagaaaatgaacccagaacatctttcctttttctcactcattcatttagctaacatttcctgagttatactactaagcatcagacatcgttcgtggagattttattgtgtctaggggagaagataaaaatatcagcaataataacaaaataccagatactaacaccatgcagacttgaagcaggaagatatgatagttcyctgggcagctatttcagagaaggcctgaccttcagcaaagttcttgaaatttaagatgaacctgaagtacatggccatgtgaagatcaagaggaaaacatctcaggacatggacatagctggcctgaggtgggaatgaatttggcatgtttgaaggaaagaaagagggccattgtgactggagtagagtaggagagcagaggcagggacacaaagaggcaggggagaccacccggcacctgactgcatatagtttgtgggccagagtaggaagccagttgaagggttgtcagggaagtaatgtgatctgatgggcattttaaagctgccctctggctgctctatagataatggattgtaagggaatagaggttctaggaagccaggaagccatttagccaaccaggttggaaatgctattgtcttggactctggttgtggaagagatgataagtacttggagttgggatcagttgcaagtcttaccmaggttattgaatgttgcagattaaaggagaccygcctggtgccttgattagcagcctcagattttgcctttttagtgttggctcaaatatttttggatcatatctcatatgtaactcctaaattctgacttcacttgaaaaaaaaaaagagtatctggtatgctgagcatgaatttgcatatagtgacagaggttgggagctgagtggttggcttctcttgttaaggatgggtgtaccctggtttgcaaagcctccacctgtccccatcatcttcttgatggtgaagctatagttggttgccatttatcatcaacttatcctattatttttcctatatcacgcccaatcaacttacttagcatattctttaagcctttcaatttttggatctcacctcagatagtctgaacatgaaagtgggggaaaaaaaagctttggggtacctaggaaccttcgttcctacatagctgtaaaaacagcctatttagcaacttattaaacagttaaataatagcagtctctaaaaccaacctatattgttataagccagggattaccctggagagcattgcctagaaacacaagaaaggtttctagtgtgctagtaatccttgattkcttgatctggtaatatgattgtgttcagtgcaaaaagcaccgatgtacactcatatatgcactttatgtacattatgttccaattacaagtaaaaattaatagcattcttgaagaagagttttaaatatagatgtccttaggttgagtgttgaggttttgacaagttgtcttgctctttcagccaagccaaagccatgtactcctgtaaagcagagcacagtcatgagctttccttcccacaaggagcaatattttctaatggtaagtatgtcaattccctctgcctaagtttgtcatcatggggaggatgaaggaatagtatggtggtatgagtctaaagtagaagccagaagcctcagattttatcccatgtcctgcctctcataacgggcatgcatgaacacatcaaatccctctgggtggcatgcatctgtagtcccagctgcttaggagggtaagcccagcccaacccacaaaataaataaataaataaataaataaataaataaataaataaataggccaggcgcggtgactcatgcctgtaatcccagcactttgggaggccaaggygggcggatcatgaggtcaagagattgagaccatcttggccaacatggtgaaaccctgtctctactaaaaatacaaaaattacccgggcatggtggtgtgcacctgtagtcctagctactctggaggctgaggcaggagaatggcttgaaccagggaggcggaggttgcagtgagctgagatggcaccactgcactccagcctggcaacacagcaagactctgtctataaataaataaaacattttaaaattccctctggattcattcctctcctgcaggcatttgtgtgtatgtacctgtttgtacatgtgtgtgagacagagagattgttttatttgactatgtgaatgcaaaggacattccaactttagagggctgtgacattgttttgtttggacgtttgagttgagtgtatagttggaccctctacattccagaatttttgcatgcacactttaaccaaccatggatcaaaaaggttggaaaataaatagataaataataatacaaattttaaaaatatatagtataacaactatttacatagtatttacattgtaaaaggaattacaaataatctagaaatgatttaaagcatacaggrggatgtccctagggtatatgcaaatattacatcattttatatcagggacatgagcatgcacagtttctggtatccacaaggggtcctggaactaatcccccacagatactgaggactgacaatccgatgtgggtgtttaacccatctgtttatataattatttgacactaatgttgactgagtgctatttatttatttattttrccagtgtacccatcagtggaaccaggatggttaaaggcaacttatgaaggcaaaacaggactagttccagaaaattatgttgtcttcctctaatactatttagtggatggcagtatcttcatggtatccatggtaacgaataaatgctatgattttatctgacacagatacacggggatcagcccactaagtgaaaacagtcaatttctatcaagttcttcaccagcagactatgtagctccttattaatggaaaaaaagatttaaattgttggccattcttttttggttggtttcttattttaaaatatcttacttgtgaaaaatgtgtttttggataatatgtaactctccacwatgtcgcttccgtagcaattgtagagtttcaaatactgtgttaaatactgtatcccagaaatttggaaaccagaaatctgctatatggattttgagatctgtcctttactgcctggcattctctgaggatctctgaaattgttacttaaaaatgtaatttaaattgttcatttattgttttttttttcttagaaatatactgcttttatatatgattgttttgctggtcctaaacatttcaaggatgtaagtctttgttttaatataactttatttgttttccaagtagatgataatattcaaaagcawtaatgtatatgatatctataaaggaagcaaaattaagtcatacactgattccactgtaaacaatctgtccagaattccagacaccttcagcaaactttttctgtaaaggcctgatagcaaatatttttgtggtgggttgaatttggcttatgggttatagtttgctgacacctagtttagagggtgtgtaaaactatcttcataactttgagatttttataaaattttacatgaaaatatactgataaattatatgcacayattttctaccagtagcattatagtggcatcatagaagaatatttaccaatgatggggaaactgtaaaactacagtatcaaggcatacaacttaaattccacttggaagattgtaaagtgtcaaagtattttaatgataatttaatttgggcttttgaaatgttcttctacaaatgaaaaagatgtttaaaaacgttacaagggaagctatgccttctgaagtctrtccttagttgaaacagaaaataaacacmaaggtacaagatccttaaattattttgaaccacagaggttgaaattgttttgtgatcttcagcagaaataaaatctgtacatgattttcttttatgccttttagtttacagtctttattagcaatttcagtgaatttgtagagcatagtaataggtatttactgtccacttatatatatcagcatctggtcatgcacgaaccattaattctatatttctatttcaataattctaatatattatttctataaatgtaatatctgtatgtggcaaagagcctttcttctcaagatcctgaaaagctggttacctgccctttgagtgccacagtcctgaactgcttgttcttgacatcttgcatattacttcagagttccccactgtgcagactctcaggtattaactgtaaaaaactctttacatgccattattatctgtaatctctatctcttctactttaaattaatgtttctagaattaataggttaaatacacatacacacacacaactatgcctcagaaaagttaggcttttacaaataaaaagaataagattagaattaacaagtagagagaataacggtaggcagagtcagaatcaggaataaatatcagtgaatcaaaagaatgaaaaatattatgtaataaaaattakcaatgtaatgtaaacgtttgataaaagagtatctttttcttttatctcttactgttgacctctgtgcactgtaataaggtgtgttgctggatcttcttggtcgaggtccttggtgaccttagtagtaataacagcattgctgacaccctaattgccctctgctggaacagaaggtagttttccagtgtaccagtcccttagtctatacagcacccttggtttaagcacacttgccatcatctggtatcctgctagactagaatctcttaaaagcaaattggttttctttcaaagaccaacttgactccaaagagagattcagaatcctacttctcctgctgctgcataaagaatctcaaccttcattttatttgaacacggaccaaagtgttcctgcttctgagttgtctgtaagctaattctgyagatgttccattcagatttaaagcttttttactgcataggatgtggataggaagcctaactattgtatctgatggcaaggcatatgttgcagccacagtactggctatggtccctttgctgaaacaagctacagaagcactgattcaagttgtgcttgtgcttgaacttttaatcttctagatttgtgaggatggctctttttccttcataatggattacaatgtaagcaagtcatggccatatactggagacgggctaaagctgcttttcccttaaagtaagtttcctacagataaggtatttatgagcactgagaaagtcaggacatgtactctaaatcacwcagaatgttaattccacaggaaggcaatgccagacattgaaagaggatcacattcaacttttaatagtagttcaataacaaaaccttagcttttcaggaacaatgtgaagatacattagaattgccacatccatatcttcaaaacacgcaacctctgcaccctaataactgcttacggtataatcagtatgatgatgagattgagggggtctaaatttaagttccttatctcctgagttatgtgaaaatatccctcartacaaaacatttgtgtgtttcacagatgactctcttgttttgccgtaatgctaccaagtttatggaaactagtcaactgaaggatttttctgttgtgttatgtgtaaatgtctgaacagtaaaatcatctgtgtattcctgtaacattcacgaagtatgaggaagtgggtttctccttgtttgatgtgagtggttttgcttgttgcatgggttccctgtgctttgtaacttgcatgaacacaaccaggtttctcaacaatgatttgtctgctgactcttttcagagatagtgraggaaaaaaaatgtattaaaaccccaaattatctaggtttccaagtaggaaaaataaagatacatatgacttttattattattcgatgataattagctttatataatgtggcatccttcataaaaattcactatgttgtgaggcaaacagatttctcactatcatccagtgtaccctgctcaccttctcactcctagcaccgttcttctggtctgtgttgaaaagggtatcattcatgtggtttcagtttagaagagtccctcagagctttgcctcaagcaatttcaaattgtagtgataccttaaatcatgtattcaggatgccttctttagcatttagaaccccaactagacttatactttgactaaagtcagaggcagaccaatttagggaacagattttgttctttgcttttatgatacatttgtaactcacagctgttagcatgacctcacatcactgcgtaggacccggaaatcacatctcctggtcaggtcacgarraagaacacaggcttgactattgtccagaagttactttccccttgactaaaggtttccccttagggtacacattgctatttaactttgcctcctacccttttttgttaccttccaaaatcaagacacttttaagaaacaaagatagttttctgaacattctgtgtcctgcctgtctcctgttgattcgcagatgtaatatcgagtattcatcaactggtctcmatttcctgaacacattcactgtatccctcattgtmaccgttatccccctgcttcaaaatgtgccagttccacttggtaataacgttgggaaaatgcaggtttatgaatgatgtggacttttagaggatcaaatcaataaattggattttttattttttgagggcagctgccctcactgttttaaataaagaatcttacataagaatgttgacaacattcacagtaagccattggcagaaaattgatctgcatgtcctagaccaatgattacaaktctgtgggtctgtggtttarggggcccakcccatcattccttttccccttggcactcatgagagagaygccaagttcagtgtggatttttcttggtgctctatggagaaatggagtctgtgtgcttactgaagagtcccaaaaascagagaccattttcatttactgccatcataaatattctccaccattcaagatgcctgtgtacacggctatttgggaaacttaagtgttggaggaggcaggggctgaaggtgtcaaaacctcctcagtaggataacccctttctcccctttggaccatctgccatctttcatgagtgtttcccatggtgtttttgcatccagagttgacaacaactcaattttgccttgaatttactcagtcttataaattaaaaatgtgcattttatataaagatgcattttatataaaaatgcacacctttaatctctatatggcagcatatacatatatatatataaaatgcacacttttaatctctatatggcagcatttttgaggctttatatctgcccgtgtaccctcaactgcctcctttttgcagagaacgatccccacaggaactggtctaagaacactgtctgcacatgattgatgcttaaaatccaatataccaccacatatcaaaggttgggattttcagagtccttcttgatttctgagctgaaaccttaacaaatagggaatttggcagggaagacacctgggtttttaattcagaaccctatttatatactgttaaaatttgaggtactrtagtttatataaaagtcggatgttaagatattatatttcagtactaggagcttctttgcagtcattaacatgacaaattaagtaataaatataaaagtgattgtccataaattatcattgaattttttgtttattttgtagtgttctgtatttatctgcactttgtgtatatatacacacatacatatgccaacatgtaaataacctcatgtttattcctaatctaaattgccacaatatttttaatgtatggttacactgtgttttaaattactttaaaaataaactttgtaagcagattttaatttagtctttgtacttgaagacccactgtgttggagggcaattgtcttggcttcatgtagagaaaaaacaargtttctggtactgtgagtgatcactttggtatggctaaatcatagcagaatttggtgaccttctcctcacaaattggtattctgcaagctttggaaaatgttaatgttgataacctattaataatgcaggtatccaccgaggggagagggaaatgggccatatgcaaaatactaaatataacaagcatacaggcttacctgaaaatatatatgtttataaaagtttccaagtgtactatggaagaaatatcagcgtacaaatacctcctgtccatttttattagtcttatgaacctcttggtcatgacttgacttctaggtaaaactttgcttcgctgcatcaaaaaaaaagataatcgtgtatttcttttgcattgctccatagattattagagtgcagcaaatcaccttgccaaagctaagcctcacaggttgaccattggacaacctggcttgctcacataggttgtagttttcatcgatatcagaggaaaagagataaattcatgacacaacacctgttcagatataaggattaatgttaactccagtatagttaagcaggaaaggactattaggttagatattacagattattctagatgagctactgtttaagaatgttggttaagactgttggcctggaatcccctataactgatattttagaattaaaaatgaattaacttccagtggccaaagcyggaatgatttgagcaacaaaataatgcagtattgaatgattggcttataaaacaaagtataaaatgaatatccatgaatccacatggatatcaatgacaataaatttcacttgtgtaaaaaaatgagggagaagagacaaatctttacaaaaatattccaaatcataattggagttatagttacccttccctctagcaggtagaatttaatcctctcctgcttaaaggtgagctagacttagtaactcatttccaaaatttagagtatagaaaaccgtcataactttatagaaaagaaacctagtagccactgtcttaaccaagtggtaaaacttaatatcagtgatatcatgtggttgacttacaccccataatatgtgatgtgaagagcaattcacctctgtggtattctttccccaaacccataattccagtgtaaccattagaaaaacatcagacaagcccagactgaggacattctacagaaaagatctcagcccagtactcctcaagactgttgagctcatgaaaaataggtaaatactgagcaaatgtcacagatcagaggagacttaggagacagggcaactaaatgtaatgtggaaccctggrctggatcctggaacagaaaggagaaaataatagcgggcgtggtgcctcgcgcctgtaatcccagcactttgggaggccgaggcgggtggatcacctgaggtcaggagttcaagaccagcctggccaacatggtgaaaccccgtctctactaaaaatacaaaattagccgggcgtggtggtgcatgcctgtaacccagttactcaggaggctgaggcaggagaatctcttgaaccatggaggcagaggttgcagtgagccgagattgtgccattgcactccagcctgggcaaaaacgagtgaaattccatctcaaaataaataaatgaaaaaaaataaataaataaataaataaataaataaataaaagataagctggtggtgtccaaataaggtctaaactttagttaatagtttaaaaaacaaggtaacaaaaactactcaaaaaatagtacatgagctggggatacttatatcattttgggaatttaagtgactttttcaagaattaaacattttcacttgttccccattaaattttgatctgtgtgtgcaagatacatctcctattcatcagtcaatctcagrctttagaamagagttgggcatrcatgaatacagtagagtaagcccctttcattaaatgaacaaattcattagcaaaggaacaaacattrtaaaccctttaataatttaaagaatacggttgtgggcttgtgtttttatgtctgtcaattctcccaggaacagtgaaatcattcttcaacatccatgaatatatgaatctactctggagccatttatatgttaatggtgtaaacaaacctttacacacatgaacaggtcttaagggcagaggttaaacagattttcttctgtcattaccagacctagcaacacttgattgagctgtataatttgggggtgatgttgaagaattcaattttctaaaccattaaaaatattccaaatttggaaaattaagctatattaaacttgcagttgaagtttttgagccaaataagttgtgttgttaactttgaaattgtgtatagcccaaaactgagaagacaaaattcttttcaagtttccaacatgacagttcttgctattaggggaaaaagggggggagctatagataagaacatgagttatagatwagaacattagaaagtttttcraataagataccctggggaatgcaaatccccaaaatactggttgacatgcttgcaaatgctgtttctgggtatttggggcaaatgagccaagcatagcatttagctagactccatttgttgacagaaataagttatctggaatattctacctttccaaatgccaggagccagtctgctgaaaagcattctctggatcagcctgtgctagagggaggaaaacaaaaatacgtatttctaaccctcatagatgtttatattcatcacatcacctatttacagaccttttttttttttttttcaaagaatgggtgcaattacccaattcaaatagctttcaaaagtatttttggagcaactggaacagaatcattttcttcgaataaatcttacttggaaccagttaaaaatatgagtcaagctgctagcctcagtgcctacatgtgtgctgaagaatggcctgcacttcacccatgcaggtccacagctgcttttttttyytttttttttttttttttttttctgagacagtctcgctctgtcacccaggctggagtgcagtggcacagtctcggctcactacaacctccccctcctggcttcaagcgattctcatgcctcagcacccccttacaggtgtgcaccaccacacccagctaatttttgtatttttagtagagatggggtttcatcatgttggccaggctggtcttgaattcctgaccttaagtgatccgcccacctcagcctcccaaagtgctgggattacaggcgtgagccaccgtgcccggccaggtccacagcttctggcatctccatggaacgcttaragcttttcaragcaaggttaccaaataattcagtccaagcctctcattgtgctaattaggaagctgaagaccacattaacatagtttcagcagaatggtgagctcttatctcctctgtaatctgctaccaatttgtggatgtgtggggagggcagcttctcatagggtttgatctttgaaaagtttatctggaaaggatatccttcgagaaaggataactttcctggagggtacacacagaacaggaaggcaaaaggttaagtaagacccagctcaccttggctgttataatgaagaacttttttgcgaggaggagatatataaaaatttcagaaaacaggtatgaaaggtctagcccggtgccttgcaactagtaggtgttactggataacaattatttttaaagacttaggggtttgagtgtgcagctttctgatgcaaatgctaacagaacaagtgaaatttttaagcttcgttgaaagaaattaaataatggctccagtgtatatgatacatagccattaatcaagtgtttcccatgcactgtgtcacagcaaactccagtcctcccaactaccagataccgtcrctggatgtctcctctgctctttttatttttccaggaaagaaaactaaggctctgacaggtgaatttatctggcttattcattatcatatcattggtatatggtagaggttagactcaaacccagatattctggcttgaaacccagtactcttttcattgaaccacctctttactacaccaagtggagtatggtaagctttggctaccagacttgaaagaggtatttggcaaactcgaccttctccagaagaaagatgaagatggtgagcgccttatcgtgtgaataagtgttagacctgagcgtcattactcaaygagtgacctttcgacctcttaaaagctgtttagttgcagaatctcagamcttctgaatcagaatctgcatgttaacaagctccccagatgatatstataaacgatgaggtttaagaagcacaggtttagcagaactatgaacgagttctttggggctacctgagggcaattttgagatgtttgagggcaagatatgtccaactactccaaaagccaaagatcactgggagaagtcacaacaattgagatttaggttcaaaaacataattatattgccaagtcttccacaaacggaactcaggaaacagctttcaatcacaggcagtgtttgagtgggtctagatgaccgcttgtcaaaatttcacagagtagaaaaattcagtaggcatctgaacgcatgaaaattattgtgcaggacctattcaagtcattggagatcctgagaaacttagatatatttcctcttttcaagagatccatggtttattggggtaacgtacagatcaataaaatataatactataaaatgctaaaaagattaagcattgggtgtttaagagcctgagatagggcactattctgaacctgggaaatagcagaaatgatggaaaagataagaggatacaaagaaagaagtgtggatgattttacctgggtggatggtgttatcagccaaccaaattttggcagaagtgaaaggccaaaaggagtaagaccccaaagccaaaaggagcaatcccaccccaagacaggtgggattccacattacacaagggaagaggctactagaggggttggggagagggaggcgatagagtgggtgaaggaagagttgggatgagctgcatttactctttcaaccaacatagtgccaaacactgttctggttgttaataacttaaaagaattagacatggtttttcttcctgaaaagtccatagctcaatgagggagacagatatgtaagttaaagaccacagtacatgtatttttgtacctattaacctcttttaggatgactacagttaacaataacctattttatttttcaaatagctagaagagaatcatcccagctagaagagactcttcccagcataaaaaatattaataaatgtttcccctgatttgatcattacacattatatgaatatgtcaaaatatcacatgtaccctgaaaatatgtacatctatgtatcagtaattttttttaaactcacagtacaaatgaggtaagtatgatagaggcacaaagtataaaaggggcacacagtaacccaagtttagagaggaaagaaagagaggattagagaaggcttcacacacaaaaggaaccatcctaactagaccctgaaggacagaacaccaacagaaaacraaggcagcaaaggcccagagacttcaacagagtttctgatggattaaattaattctgagtggccaggggtttggctgcttgctcaagcatgttggcctgt

SEQ ID NO: 9878 - DNA, 100396 bp, Homo sapiens
  misc_feature (89449)..(89449): n is a, c, g, or t
gctcaagtgatccacctgccttggccttccaaagtactgggattataggtctgagccacagcacctggccaaaattagttttattataagagatgcaactcaggaccagccaaatgaagagacagtgaagaagtaatgctgatggatcacacctggtgggggaaggmggacagctggggccaggagcaggagggacacctgcagggctggaagggcaggggaggtgggcctccatggtttgtgtttattgcataaccatttttattgtctacagtgagcaaagttatcctataaacaagtgtcagggaccattgcactaaagaaaacaaaygagagcattttggaagctctaatttcctgatcagtaatgggtagactaattcccagttatatttacctgttgtaaggtgaaaggttcttcagaggacctctgtcttggtgttrtatgggcttttgaatgtactgaaattaaattccctaaaaatctgtgattcagacttcatactaaattgtacagcagtgcccagcccaaggccttgcatttctatttgttgttttctttactctctaagtgcccaacactggttttacctgagtttcagaactgcccgcttttctctgcccaggttgtaagtcacccagtccacaggtgtcccctgctttcccactggccactgatttggggaggcagctgtccatgtccccagtccacatcttagcttctagaggccaggtggggtgggctgggctgggcaagagcrgctgggccttctgggccagagtttctcttctttttccattctgtgcacgcctcttcagtacgggttactgtctctcctcacacagggggcgtgaagcttggcctcggggacttcatcttctacagtgtgctggtgggcaaggcggctgccacgggcagcggggactggaataccacgctggcctgcttcgtggccatcctcattgtgagtggctggggatgcgtccarctgcctcgtggtgggggcccccagggtcctcattgtggtgggggcaggtctcaggatccctagggatttttcatttcttctcttccctctgagggacaagagcagggagcggggctggaagggtcagcttgagaccaaggctcacaggaggtgtgctcgcccctaggtgggctccagcctgtggaggacagtgcaggggagggtgaggagtgtacckgccccagcgtggctgagcacacagcctccaggccgagsacccagctgacagctttgcgcagtgatgataccctcgaggtggttgtgatgacatcagatttgcagaaaagaaaattgcttaagggccttgcccatgggcgcaaagctagtgaggaccatgttttccccctcctccatgccattgggacaccacagggtctgaatctggggcactaggggtggccccgttactgtgaaccacagcagtgaaatgtggaggccctgtagtcagttaacgtgrccagatacacataatggggagacgtcctgccgtgacttcatctcagagatttcgctgtcacgttagaggaggaggagcgtctgagccgtgcrcttggcrtctgccccttagtgaaaaccctgggcatggcatgattaaggttgatgctccagtgtccagaaggttttctttttgcccacaagtatatcagggatgggatggtggacccaggctcctccaccaccagactgccttacmtgagccctgctggccccaaagatatagaaggcaccctggttccctgtgctcacctggaccactgcctgcatcagctgggtcaggggaggatgggcagcccccacacctgsttcccaggggcaggttgcctggcggctctgatwcccttggtgccagctgctgagaaccttactgccatttcagttgagcccacctagctctcatataaatacatgttccctgagggcatcttaccatcccatgtgaccactccagccagacaggggaggcagcacggcctcggggcacagcactgctccaggagtcaggaggcctgccttctggttcactcactaacaggtgaggtgatctaatgggggtgagaacttctgcccttaacacctcaagagctgttgcaggaccagggaagataatggggtgtctagcgccgttatccgactggtcctcgaacaagctcctgtgcccagggactagaccatgactcacagctcctgtccacaccagggatcaccacgctcaccctcccctccatgtcctgcagggcttgtgtctgaccctcctgctgcttgctgtgttcaagaaggcgctgcccgccctccccatctccatcacgttcgggctcatcttttacttctccayggacaacctggtgcggccgttcatggmcaccctggcctcccatcagctctacatctgagggacatggtgtgccacaggctgcaagctgcagggaattttcattggatgcagttgtatagttttacactctagtgccatatatttttaagacttttctttccttaaaaaataaagtacgtgtttacttggtgaggaggaggcagaaccagctctttggtgccagctgtttcatcaccagactttggctcccgctttggggagcgcctcgcttcacggacaggaagcacagcaggtttatccagatgaactgagaaggtcagattagggyggggagaagagcatccggcatgagggctgagatgcgcaaagagtgtgctcgggagtggcccctggcacctgggtgctctggctggagaggaaaagccagttccctacgaggagtgttcccaatgctttgtccatgatgtccttgttattttattgcctttagaaactgagtcctgttcttgttacggcagtcacactgctgggaagtggcttaatastaatatcaataaatagatgagtcctgttagaatcttggagtttggtccgttgtaaatgttgacccctctccctgcatcttgggcacccctgggataacttgtgctgtgagcccaggatggaggcagtttgccctgtttgaaggaacttttaatgatctcgcctctctgcacacatttctttaactagaaagtttcctaagcaaaggagttaggagagcagggtggcctgacatctgccagccctgagctgtaaggctgtggatgctgagcaggtccctggactcagttgtgcacggtggcacagacactgccaggtggttgccaaaacatccagtggttccttcagcaagtgttcaccctctgcagaagcctgtgagggcctgagctcagaaaccactctcctttccttctctggctttggccctgggcactgtggtgggagagtggacagtttggctttgccttctctgtacatcaatcatgggttgcaaagagaatctcagaagtgcctcttcctgagcacagtggctcacacctgtaatcccaatacttcgggaggtcgagtcggaaggatcacttgagcccaggagtttgagaccagccggggcaacatagtgagactttgtacaaaaaaaaatttaaaaattagccaagcatggtggcatgcatctgtagtctcagctactctggaggctgaggtgggaggatcacttaagcccaggaggctgaggctgcaatgagcsgagatcaagcaggtgttaggtatatcagacagctgagaagacgcaagtgtgccctggggttcaaactggtacccctgtctccctgttccaggaataacatgagtgccgggacaatgcatctttattatgagaggaatgagaattgtgtakcttgacatttgacaggagcttgctttcccccaggctgtttgaggaagggcagaggaaaatgtggtgccctaagaaggaaggacagaggaggccgaacactggcgggtggaatcccactgattagtagtgcaggtcagagacctgggatggggggcattgccgtcatggaagccacagcggggagcgggtaaagcagacagggatggtccctgatggtgacaactcgcaagaggttaaggggaaagaaaaactgaaaagcttattcaatttggcaattatggcagtgtttatcttcagaagagcagttttagggtggggtttccaaagatgggattggacatatattttgaatcattaagcttgaggtctttcaaaggcctggccaagggttgctgggtggagaccacattcagaggtaaaggcagaaattgggggcccttaagtagacagcgagggaggaagaaatgaaggggcctggtgatggttagggtgaartgttaagactgagaaaacaaggacatgtgagaagacgagggaagagcattggagagaacaaagacactggaggagatgctacttggaggtccccagagagcagggagacaaatgaacccagaacacaaatggcaaagaagaaaaatgagagaatttgtaaaagacagcatkcgaacatgccgaacaagagcagggtactggtgttcaaacacctgtatctcccccgtgtaacccgtcaactaatatctttccatatttgctccagatttgtctttagaaataaaacccacgttctgaagtcctgttygtatgtggccccagtcctgttgcctccgcctcctgtcctgaagtcgatttctgcccttctcatctatggttagttttgttttgtatgttggcatgttttcttaactttacagaaatggtatcatactgtacatatttgataattttttaaaatattgcattctggaggcatgtataaatgtagytccagttcatttattttatttattttttgagatggagttttgctcttgtcacccaggctagagtgcaatggcgtgatgttggctcactgcaacctctgcctcctgggttcaagcaattctcctgtctcaatttcctgagtagctgggattacagttgcccgccaccatgcctggctarttttgtattttagtagagacggggtttcaccacgttagccaggctggtctcaaactcctgactgcaggtgatccacgcaccttggcctccaaaagtgctgggattacaggcgtgagccaccgtgcccagcccagttattttaactattgtatagtgttccattgtatgagttctactgtttatatgctattgatcgacctgtaggggttttgcagtgtttctgtattacagctgtgctgcagtgagcatcccatcacattgtgtggatttgaggaartattggaattcccccaattgactggacattcccaattaccctccaagtatgtgtctgtttatccttccatccgcaatctgagagttccccaacycwataatacttggtgtcatcagacttttcatcttgtctgattggatgggtgtcatttcctttaggttttataattatcttytcatatgtgtattggctgtacaaggttccttctctgttcattattattaatttttttagacagagtctcgcgctgtcgcccaggctggagtgcagcagcgtgatcttggctcactgcaagctccgcctcccgggttcatgccattctcctgcctcagcctcctgagtagctgggattacaggtgcctgccatcacgcccggctagtttttttgtattttgagtagagatggggtttcaccgtgttagccaggagggtctcgatctcctgacctcgtgatccacccgcctcggcctcccaaagtgctgggattacaggtgtgagtcactgcgcccagcccaagtttccttctctgttacttgttcatatcctctgcccatttttcacttggattttttgtcttacggatatttaagcctcttaaaatatatattctggagagatgctaatctttgattaattatatgcattgcaaatgtctggtacattgtggcttgcctctcttccctgcctttaggagtgttttgctggacccaagtaatttttaaatgttaatgttattaaatctatcagttttttgcttgtatggcttatgccattgaatcttgttttaagagatccttccctaccctcaaggttttctaaatttttattttcataayaagatttttagttcatctgaartgtatttttatgattgtatttagtagggacctaattttgtttttctttgtaaccaggtgtcccagcactgtttactgaacagtctctcctttctcgctggtctgtagaactctcctgacatataccaagtttccataagtgggtggatgggttcctgagctctctactgttaatagaacttgctctctcgcaggccaatgcctcaccaggtgattgaagcagagaaacttaggtggtgaaaggagaagatggggcctgtcctgagagtttctgttcctgagatkctagaggcagagggtatgtaaatctgaagttacactggatctcctaaaacagtataaagctacagaagtataatagtgtggaatggtggtgggagtcagtaagggttaggtcactgcagtggtttaaacaagatgggctagaatcctttcacaggcacaggcagcttggagagggtgcaatagtgsatggtatcaggggtcagatgcctctttttcctttgagatcagtaagtgkctttcacctcatgacctaggctggctgctgtgtgctagccgtcaagtcacactccatccagcatgaaaggaggttagaaaagggtgcatttcctcttcttaaaaacatgtctcaaagttgcacacagcacttttgcctatattcaattggccattagtcccacggccatacctgtctgagactgagagactgggaaatgtctttatttcaagtggccatatatccacctaaacaagataagggatacgtggttatggcgtgtcttttggtttaccaatgcagataatgaagttaccaaaacaatgagaaaatggggtcgtgagggatcatgtgaatcacaagctgatgtcttcaaagacggtggaaatgggccccgggaggcagcagatgacagcagtggggattaaggtagacctccatcctggggttaaaatgaggggaaggtgatggagctggaccagcagtcagaatggtcagtggttaggagaccctctgccccccaccgctgccaccattggctctctacagaatgcctgcgagtggcttagagtgaccaaggatgaggtgcagatccatgtgcacccccctgccccctctgtggacaattttcatgcctgacagcacagtctatgtggattgcaagccgatgaaactatgcaaagtagaagcatgcctgcagtttgtgattcggtgatgtgttttatgcttatgtgagtcgaatggggcggcagggtcctgtggtcacccgctgagaaggaagggtcctgtaaccactgcctttctttcagctacttgagaaaggtgttgtgagggaccgtggattttgggacagctttgaatggtggtagggaggaagggtccggtctgagtgaatggccagaaagctgtggggaagcttttaggacattggccaagagctccctgaaggcagccagggagatacttgtcagtacatgtgactaatggccaactgaatataagcagaagtgctgtgttgctgtgtgcaacactggmcaccttaggaaggacctcgagacagtggttgtggactctgtagagagtaacagtgacagtagcaaacccttacccagtgccaaccttgtgctaggctcrcactaaatgagtttaccttcaattctcgtaacaataggaggtaactactattctaatttccattttatagatgaggaaactaaggcacagagatcactgacttgcccaaaatcaagcagggagtagttagtatataagcccacggtatgtggtttgtagaataggtgctcttgactagcagaaataggtcctccctgcagtgtgtaattgataacaagcatgggctgccatcttcctgtcgaggccactcaaaacacccaacaggctacgcacggtggctcacacctgtaatcccagcactgtgggaggccgaggtgggcgggtcacctgaggtcaggagttcgagaccagcctggccgacatggtgaaactccgtctctactaacagtacaaaaattagctgggcgtggtggcgggcacctgtaatcccagctactcaggaggctgagacagaagaatcacttgaaccagggaggcagaggttgcagtgagacaagatcacgccattgcactccagcctgtgtgacaaaagcgaaactgtctcaaaaaaaaaaaaaaaaaagtatgattttataatcccagcaccttgggaggctgagtcgtgagaatcacttgagcccaggagtttaagaccaatctaggcaacatggcaagaccccatctctgccaaaaataaaaaatagtctaattttagctattcatgtgtgtgtgaagtggtgtctcttcgtggctttgatctgcatttccctaatgctgactaatgacgttgggcacctgttcatgtgcttactggtcagatatctttcttttgttacattttattaagttttaaaatttaaagtcaaagatttccctatgagaatgacttttaaaatgaccaaaaaggggaagataacattaattcttgaagagaaggcctctgagaaaaatacagttgtagcaagctgctactttkcaaatgacccatgcattttaattttcccctaaggaaggccaaggaagagtcttatcacctcagggcaggagatgtagggacttgggtcatttaataagagtggtaggtttgaaaactcaaacccagaagactccttagagtttctcccaggaggtagggaaggggccgcatccatggagagaggaggatgtgacttagagcagtggtccccartctttagggaccagggactggtgtcatggtagacagtttttccacagataggggttggggggatgatttggagctgaaactgctccacctcaggtcatcaggcattagattctcatgtggagtgtgccacttagatccttggcgtgcacagttcacaatggggttcgagstcctatgagaatcygatgccactgatttgacaggaggcggagctcaggkggtaatgctcatctccaccgcttaccacctgctgtgcagcctggttcctaataggctatagactggtactggtccatggcctgggggttggggacccctgatttagaggaagtaagggcatggcttaccgtgggccctggggtgttctgggaatggggaggatggagagaagagaggaggtagggaagacctccccttgctccccatttgggatttggggagaaagtcaggtctcaggctcaacagtacctgatcctgtaccatcttccaaagggaagtcagtggggttggaaggtaggcaggggttatcttctctgagccacggcacaagacagaagtttcccaccattcctgagggggcaggtggtaggtccccaagcagagagccagcagtccctctctgaggcctgcaatggaatggggtggggtgtccactgagccaagggtctgtcagtgagagctggggaggctgggctggcttgcaagcacctgttataaccaaaccaggaaatcaggttccragtcttgccagcaagggcctacagctgccagcagagatggacagccaggagaccccaattggccacccagagccaccctcctctgcctaccccaccctccagtactccagagcctactcggaggggaacagaaacctgagaggctgaacacacacacatggagaaacaaacgtagtaaaatatttggggaatcaggaagaattatttgtactattcctgcaacctttctataggcttgaaattatcaaaataaatttttaaaaattgtaataacattctcatactaaaacactgagtttttttctttcattttttgattttttctttttgactccagcatgacttactctaacaatgggtggtctcgattttgaaatactttcttctccaagcctttcatgacaccctgtctctgttggttctgaaaatgttggattttgtctcagcccttgcttctggaaacagccaaggttaagaaaaccccccatgctttgtgttctagcagacagcttcctgcaaagagccatcttcccagagcacttaggcctcttagatgtctcccttgtttaattatgacargagcacacacacagaccctccaaattcccattcttagtcttctaaatgattagctgagctgcttttccccactgattaatcggaataaaatgctcattaaccaaacttccctcctttccccaggtccctaaactttcctgagtcggcagacatcccctctggagaagaggttggccccagagtcgaacatcctctgatctacctgatcctgctgcccttccattccacttccccacatctgttctttctggtcgtgtttactcccctattaaaaaaacaaaaccagaaaacgtgtttgcctagatcttgagactstggaagatcttaacagtcagaggttccccctatttgcaayratctcctttcctgccccttcctatccttgcaataatccttttgaataaagtctctccttactaaatccagttcctaaaaattaatttttttagagacagtgtctcgctttgtcacccaggctggaatgcagtggcatgatcatagctcactgcaacctcgaattcctgggctcaagcaatcctcctgcctcaactraggctacatgcatgcaccatcatgccttgctaattttttttaatttttgtcgagacagggtcttgctatattgcccaggctggtctggaactcctggccttaagtgattgtccagcctcaacctcccaaagcgctgggattcaagcatgaaccaccgcacccagctccaattttattttgtttggcagtttcctcctactcttcttccctcctcctgctcattccttggccattttccagctgctgctctgcttttaccctagatgcacattttcagggctcagttctcattcctcttctctgcttgctcctcctctcttcccagtgtgatcctatccattcacgtggctttcacaagcgagttgccttccccagtatccctcctagcagatcctgctgtgctcagggtgtcctcctgcatatttagcactgctcacctcccagggtcctgggcacttaggagtggccatgtgactcagctctgccaaagtctagtgcttgggtcttccagaaaagctattgttctcctggttttaaaggcggggaggggcgcctcagccataatctgccattttttccttgcatgggacacagatgtgatgctttgagatgtcacagctgcttagcgaccaccaggatgaaagccgcaggcaaagcgtgtatgacagagaaggaaaccacaagtagctgccccagccacccctggacttcttttctgtttgtttgtttgtttgtttgttttgaaatggagtctcactctgtcacccaggctggagtgtagtggtgccatcttggctcactgcaacctctgcctcctgggttcaagcgattatcctgcctcagcctcccgagtagctgggactacaggcacaagccatcatgccctgctaatttttgtatttttagagagatggggtttcaccatgttggccaggctggtctggaactcctgacctcaagtgattcacccacctaggtctcctaaaagtgctgggattacaggcktgagccaccgtgcctggcctggtcttcttttatgttattaatagaaacccctatctggttaaactattatagttgggtttctagtacgtgcagccacatgcaagcctgacctacctttcagtcagacatctctgctcacttggtatctcttccacttaggtgtctcaaaacactgttcttctctcccaccaacaccccaaatctgctccwccagtgtttaacacccccaraaagcttgtctaagtagtttctccagaattcttcttagaaagggagctactgctgggcrcagtggctcacgcctgtaatcccagcactttgggaggccaaggtggatggatcacctgaggtcaggagttcgagaccagcctggtcaacatggtgaaaccctgtctctactaaaaatacaaaaattagccgggcatggtggcacatgcctgtaatcccagctactagggaggctgaggcaggagaatcgcttgaacccgggaggtggaggttgcagtgagctgagatcacaccattgcactccagcctgggtgacaataatgaaactccatctcaaaaaaaaaaaaagctgtatttatttaaraaaacatcttgatgagaagcatcaagtaaaaggtgaagccctaagggcatgtatcagaaaattaaatgaatagatacactgctttgtattggaacargattttgaggctaggggatgtaaggagaagaaagtgtttcttgtagctggatattgcaataatttcacatctgtttccaggtaaataagctgggagcagaattcatcccttttctcttgtagcaatgcagccattcgttcctcattgcattcctcattatcttgggatgcatcttaagcaatggcaacagagttctccaaagcttcatccttggtgggaatagcgtctccatcccygagtcacaggtggtggttttctcagacactgcatcatcacaaaccatgaactttcacccctgcatgggacggtgatcactcaccccctcccacaaaaggacatggtgccatagtcacttacatattccttctgagggtatgttctgtgcatccccactgctggtaccaaatctgcctgccttcattggattagaaggagcagaaagccacttagactgccttagggaaacacaagattattacgcacctgttaaatatatttttctatttataactctcgctttttaaaagggtcctgtttggtggcttttcttctactaagcacagggtctggttaagcaaggggagctgaatgtctctgtatgataatacttggggagggatttggcctccacttgatatagaaggaaaaggagccaataggaggcaggtggccacatactatgatgtaacctcgcccccaagagcccccagaacctttgatcaggtcagtccaactctgaaatagtgactattcacagagaactcacagagtcagggatgtggatttgattcttactcatccatcttgctcaccattccctgtgccttgaaatctgaatatttgagtctttattcagatcttggaaattttctccccttatttattttctctgttttctctttttgagattccctcaagactggtgtcagatctcagaacttgttttttagtgtctcttcagtgttgtctcctactctccatccctttgtcttttccctgctctgtatgctaggatttttcttctagcctttttagattttattttttgacaatcttgtttgttttttttttaatttccaaaaactcatgatctttacttgctcctctctcatagctgttatttttgatggaggcaatatcttctcagctcttactgagaaacgagtaattcttgaaaggttttctatttgattaattgtctcagttttctttagcctttttgtttatctgttcatcttaggtccttttatttcttatataactctttgaaaatggctgatgatccttgcttgactgttcacatttatgaatgaagaactagactaggtgtctggagttactttccttggcagatgtcagtctggtggtgggttaaagtattatccagtaaatattcattcccttgcctgctggcctcatgagggaagcctgatcccaggccatgtcctctcacccctcttcggtgttctctgtggtgcatgggaactgcctgcactcagttcctgttcagctctgctgctgggggaccaaattgaaacaggacatgccccagtttagccaatgtcaccctctactaattaccatctcattcagctaagaaaatgtatcttccggccaggtgcagtggctcatgcctgtaatcccagcactttagaaggccgaggcggacggatcacctgagctcaggagtttgagaccagcctggccaacatggtgaaaccccatctctactgaaaatacaaaaattagctgtggccaggcacggtggctcatgccgataatcccaacactttgggaagccaaggtggtggatcacaaggtcaggagattgggaccatcccggtcaacatggtgaaaccccatctgtactaaaaatacaaaaattagctgggtgtggtggtgtgcttctgtagtcccagctactcaggaggctgaggcaggagaattgctggaacctgggaggcagaggttgcagcaagctgagattgcaccactgcactcctggcaacagagcgagactctcaaaaaaaaaaaattagtcgggcatggtgatggacacctgtaatcccagctacttgggaagctgaggcaggaaaatcacttgaacccagrgagtggaggttgcagtgagcagagatggcgccactgcactcaggccagggagacaacatgagactctgtctcaaaaaaaagaaaatgtatctttctaaagtatgtgtgtgtgtgcgtgcgtgcgtgtgtgtgatagtcccttatagtgacagtttcctagcaaaacaaaagagaaacataataaaatgtgtgggaatttggtgtctagaaagctaagttatattctgctatcaatagccataaccatctggtcagttcacttctgtgggcctgtttctcatatttataaagtgaagggtttaaaacacattcatgattcccaaactagggatttggagagtagtaaagattatcsaaatagtcttataatagtttttaagagctatgacaaggccactcaagctattagctgattactgcagggaatggaggagtggagcagaatatggtgccgggcaaagaacacagaactcttggcatgtggaaggtgggccctggagcacctgctgagctcccygctcagccccagctataggaccttcagccgactgtcccaggctcagcaccatgtgccttgagggtagggcagaggggcttagggggctcagccagcagtcaccacagatgtaatcttccagggatatgctctgagcttgggaggaaattcacttcttcatgccggggaacgtatgacccactttggtgtattccaggcaatgtggagrtacagaaatgaaaagactcagttctcaaggggcttgaagtctgattcgctgaaataatttttagtttccagaaccacaagacagacccaagagggctgtgttggcaaaacaaatggcagagtggagctggccagaggcatctgtgcgtggcgactccaagagagcacccgactccagatggcgacactgcaggatggagcggggcatgcctgcagacaggtgtcaggtgcgaaaaacagaacaaccggacgcttctggctgcaaggacctgaagccttagggggtgatattggttaaactgaggtaggccttgtgttaatagggtctccacctgactttgtcagtttattttctcactgacaagaagtggagtagggtggctctgggtttgatttatccagcagttcaattccatctttgatttttttttttccattctttccattttcctctctggcattctttcctctcccgcattctcacttacataaagccaagtgcagggggrgagagaggagagagactcttcctgtgtcatttttttaaggtcaatgaaaaccattcttaggagcccctgggcagatttctccctgaatctcattggccagaactgtgtcacatccccatgcctaagccaatcactggcaatgggtgtgggatagttgtggccagcctggacccatcagaatgtaaccctgagtctcaagggggagagtggatgccagaatgaaatcagagttccatccactttccattagaaagaaargaatgggagaggagcagagaaggctccagacagacaactaacagtgtttgatacaataactttcttatgtttctgtaacttaaggtccattttgtctrttgctagcatatataakcttaatgcctgctagattctgttgtttacactgtcctcttctccctggagtagtaccgagggtgagggagcctgtggcctctgtaatatcaggacatagaggatagggttgccggggggcacatgtggtcccttgattgccacgtttctattttggtttyttttctttaaaagaaaactwcttttattttatagataaggtctcattctctcacccagggtggagtgcagtggcgtgatctcggcctactgcagccttggcctcccaggctcaagcaatccttccaccttagcctcttgagtagctggaactacaggtgcacaccaccgtgccaggctaattttttattttyattttttgtagagacrgggtcttgctgtattgcccaggctagatttgaactcctggcctgaagtaatcctcccaccttggcctcccaaagttctgggactacaggtatgagccaccatgcccagccctaaaaaaattgttgattgtggtaaacacatagcataaaatttaccattgtaaccatttttaagtgtacagataatagtgttaagtatattcatattgttgtgaaacagatctccagaactttttcatcttgtaatatgaaatcctacacccattgaacaacttcccattctcccctgcaacccccacaagcccctggcaaccacaattctattttctctttctattagtttgactactctagatacctcatgtaagtggaatcatacagtatttgtctttttgtgactggccctatttcacttagcataatgcataatgtcctcaagcttcacgcatgttgtagcatgtgacaggacttccttcgtttttaaggcggaacaatattccattgtatgtttataccatattttgttcatctaatcctccatcagtggacatttgggttgcttgtacctcttggctattgtggataatgctgttctaaacatgggtgagctaatatctttgagatcctgctttcaatttagatgtatgagatttctgggtcataagatttaattttttgagaaaccaccatgctgtttctttacagtggctacgtcatcttaccttccccccaacagtgtacaaggattccaatttccccacatccttgccaacatttgttattttctgktyttttttgatagtggcaatcctaataggtgtgaggtggtatctcattgtggtttcatgaggtttaagttgagcatcttttcatatgcttttagaccattcgtatatatcttctttggagaaatgtgtggtgcaatcttggttcactgcaacttccacctcctgagttccagcaattctccagtctcagcctctcgagtagctgggattacaggcatgtgccaccatgcctggccatcttcgctcttgagcacctgtgtcatggtaggtcaaggacccctgacagtcagggtcccaggcaggagggggcacatcccttctattatcttggattctaccacccccttagagggagactacagacccccggactcttcccagagacccattgccrgcacttcattctgttgatctcctcttgcacttctgcctcccccagcctggaaagagttttaaacatcttgtccctggsaaggaaaccctggctcagccagtattcttacctaatttttctgcctcgtgtccaaagtgcagctgtattaaatgtattaaataaaaggaaaaacttgggccagaagcggyggctcatggccagcactttaggaggccaaggtaggtggatcatctgaggtcaggagttcgagaccagcctggccaacatggtgaaatgccgtctgtactaaaaatacaaaaattagccaggtgtggtggtgtgcacctgtaatcccagctactcaggaggctgaggctggagaattgcttgaacccgggaggcagaggttgcagtgagctgagatcatgccactgcactccagcctgggtaacagatggagactccgtctcaaaaaaagaaaaaaaaagaaaaagttggagggctttaccatttctgctgggaagtctggagcaaaggccactggcagtgccactcagcttgaacatagtgagggtgggtgggagggcaggaatacagtgttccttcaccaggttgcaggtgggcatcgacctcttggtggtctggcgcagcctccctgcctggggccgtctgccttgggctcgtcactgcccaaggatcagatgagctgmtggaggaggaccctgagccagagttagttcttagcttaaactctacagccgtgcttctcaaagtgtggtcctgggggcccatgaagtcaaaactattttgtaataaaactacattaccttaccattctccttctattacaagtgtacacaggagttgtccagaagctgcatgatacgatatgtgatatcacaagggattgactccaaaagcaggtcggagaatccagctgtcttcttcttcttcttcttttttttttttttgtggagacagagttttgctctattgcccaggctggagtgcagtggtgcgatctcagctcactgcaacttctgcctcctgggttcaagcaattctcctgcctcagccaccagagtagctggaattacaggcacgcgccaccacacctggctaattgtgtagttttagtagagatggggtttcaccatgttggtcaggctggtcttgaactcctgacttcaggtgatctgccagccttggcctcccaaagtggtgggattaccgatgtgagccaccgtgcccgacctcacctcctgggttttcagcaattctctctgcctcagcctcccaagtagctrggattacaggtgcccgccaccatgcctggctaatttttgtgtttttaatagagacggggttttgccatgttggccaggctggtcttgaacttctgacctcaggtgatccacccacctgggcctcccaaagtgctgggattacaggcgtgagccactgtgcctggccgaatccagctctcttctattaagatattctttttattctagtaaagagaattgcaaaaatgtaaacaaatgccagtcttcatgaaaggtttttggtttgtaaaaatatagctattttcaaaaaacttatttatgttaaaatgaaatgtttatttttgttattttttaaaaagttgatacataaataaaattctcagttgtaatttctcaacaggatagagctaacccacataacaaaaggtctttgcagtcctcagtaagttttacaagtttaaaggggtcctgagaccaaaacgtttgaggaccactgtccctccggaaggctgcggctttcttctggtggctttacacttctgctgtccttcagccacgtccctttcgcgtctccagggactcctccatttgccttgaatttctcctgttagctccactccagggtggccacatgagggcagccgattccgccctgagcccttgcgggggcctcaagcacaggtgttcaccaggtcagccttcagcatccagttcctaccgagtccctggctggtggtactggagaagcaaagacgataaaccaggtccttgttctgtgggaggctcaggcctcctgttctctccctcccaggggccaggagagaggccccagccagagcctgagcacatcatagggttgacatgtttggtgaatgaacattatctctgtgttgtgcagagctgagcatagaactccatcttctagatcctgaactttaacctggaagggttaggccttcttgccattgcctgcagggagaggtgagcaccctagaacacttactgttcgggagcacgtggttctcatgcagtaaagtgagaaggggagaggaggcaccttttctctagtcttggattaaggtggaagtaaagggcatatgtgaagtttttcccaaaactaaggcctcatttattttttattttttatcagaacaagtcatggacatctctagcaatgaaagcaaagccctgcagtcatttaacatagrcatactctctacatcctgttagccagcggctcctacgacttctcccaacaatcttaaagcaacctggcatgaaggagctggctcaaatgctggtcagtggaaagggcataagctctgaagtcacaacacaagggttcaaatccgaccctcccggctcctggtctgtgctctctcccccttactgtaatgccaacttcactttggtttttaccccygcaaatattcatcattgtgttgagtcaacacaatgatacataaaaaatcagcagtctctgataaagtgtggcctactggttaagaggagcagggctttgaaaggatagccaaggtaacactcctggttccaccatgtgttagctgtgtaacctcgggcaagctgcttaacctctctgagtctcaattttctcaactgtagaaagcagacataatattacagggttgctgagagaataatatgacattaggtttctaaagtgcttaattcagtacctggctcatagtaagtgctcaataaacaccagttataaacatcactgcatttgaaattcacagctttttcaaagttagagtcagaaagaatttcagaagtcctgtaattcaatgttttccaaagtgtgttcaaaacactcacttccctcaagatgctccatgaaaaagggttctgtggccaaatatgatgggttgtatattaaagcctcagagaagccacagagtaaagaaacctgttgaactttgattactccaacctttatcaaatggatttgactgtagaaccctcttcacacatcactttttaacttccaggttgctggtagacagagctcagtcattaaccatcattaagaatcataacaaatactggataacatttatggagggtttgctctatgccaggcactgtgatatgcacaaggcatgtattatctcactttattcataacaacactaagaagtagtgctatcatcttttayrgatgaaaaaataggcttagaagactaagtaacttggccaaggtcacataccaagaaatcgtcagcatgcaaactcaggttggcctggctctggaattcagccttgccacctccctgtatggtttccgcagcccactgcattacccctgactgttggacagtccttccttgtattgagctgaaatccaattccagttccaatcacactgtttctccagggtgcacataaatatatggtgaaatgtattatttagtttcaattctaaatatcctttatttgtcattgtttctcgaattgtatttattctgttcccttttctcttgacttgctcaagtacttcagcatttcatttggactaaaaaactcaacacaattctgtctgctttcttatagtatgatattttcatttttaggaagtgacacattatcaaaacccataagaactaaatttttttaagagggggaaaaagacaaggtcaggaggctgaggtgggaggatcgcttgagcccaggagttcgagaccagcctgggcaacagagtgagaccctgtctctacaaacaccaccaccaccaacaaaaaaaaaattagttgggcatggtggcacatgcctgtggcacatgcctactcaggagccygaggtgggagagtcacttgagcccaagaggtcgaggctattagtgagccatgatcacaccactgcactccagcctgggcaacagagcaagaccccatcaaaaaagaaagttttagatgtatacaataactaagttattttccctgcaggaattttgataacaaagttgtcttttatagctctagtagtattgctgtaaagctataaaagtacctctggcttttgcccaagtgtagtagtgtctgtctctctctctgtctctccatagcagcacattgttaactgtttcttaccagtagcactactttcattacttttatgactcattgtctcccttatttagtaaacaaagtatacagccactaaaagcaagtagctgggctattcacagcagcttctcccccatacactgtggtagttcctaactacaatctgtttgtgtccaatagcagttcctagtgatgcaaatagtactttccatttaaacaatttcattatagccaattctagttctgaaaataccactggaagaaaaacacttgagttctcagtatggtttgaccaatatagcttggaactatcactttccttrttctgaacattatacttcactagttcagctcgagatctcattattttgggtaactgcattaccctatacctgcttgtggagtttgtctccaaccaattaattttcccctacaattctgctatacatcagcagttgtattttggagcccacrtgaaaggaaactatacttacatctgttccagttcatctgtttaggtctggctygttgttcagcctgtgacaatcatctgggagtggcgatcattctccttcagcccatgtcctctgtgaaactgataaacctgccctagagcagcactttccaacagaatgttctgtgaacatggaaatataccagatctatgctgtccaatatggtagccactagccacatgcaggttttgagcacttgaaattaggctcatgcaactgggaacttaattttaaattgtctttaattttaattaatttaaataatcccatatggctaatagatatcatactggacagtgtcgtagctctagatgtttacctgaaatgcaggtaaaaatattaagtagaacagggacctgcttctgtccctggagtccaaactctggactggggatggccattcaaggattatcaaccacctgtgtttataataactcggtgcacaattttatccaccagcgtatatgagtatcagtgaaggactttgtcaaatgccttgtaaaaagcaagatggcctagaaatatgtggcwctgccctgctctaccagcctcatgatttttttttcctagaaaatagggtgtgtttttttttctatttgtagaagtcatacatacctactgtggcaaaatgcaggaaagtacctagaggaaattaacaatgaccaaaattctgccatcttgagataactactgttaacatttcagcatttttctttcagctttttttctgtgttggtatttttcacatcactgaaatcataccttctctgttacctcctgttttttttaatttaaaaaaattaaaaaaaatttaatcgacaaaaatatatatgtttatcatgtacaacatgctgttacactgtggaatggctaaatcaagttaataagcacacacattacttcacatatatatcatttttttgtagtaaggacacttaaaacctactcagcaattttcagtacaataaattgttattaactgtagttacataaaccaaaaataaaattctaaggccctgcaaccatctgaaaggatccctcctcctggctagggcattccaaagttagcctaaaaactggttcaggccatgatgggaaaggagggtcggacatgcctcattatactcttctgcctttgggatttcaggaaaagctgacgagcatttaacatcaacacaggaccttaagtccgctaagaaacatttacaatctcttctctgtgaagcttgcaacctgaaggcttcacctgcatgatcaaactttggtctccacaaccccttatcataatccagacattcctttctattcataataactctttcaaccaattgccaatcaaaagttttaaatctrcatagaacctagaattcccctcacttcaaattgtcccacctttctggactgaagcaatgtatatcttacatttttatgtctcatgtctctaaaatgtataaagaaggttgtgccccgaccaccctggggacatgttctgagggtctcctgagggctgtgtcttgggtcaytggtcactcatatttggctcaggataaatctcttcaaatattttacagagtctgactctttttgtccacaacaccatgtggtacaatagatctcttgaactcatcccgcttatctaactgaaatcttgtatccttttactaacacctttccaacccttgcctcccagtccctggcacccaccactctgcactccgcttctacgaatttaatgtgttttctcgtttgtttgttttttgttttttttctgagatggcgtctcactcttgttgcccaggctggagtgcaatggtgcgatttggctcactgtggcctctgcctcccgggttcaagcgattctcctgcctcagcctcccataccagttcaactttttcagattccacgtgtaagtaagatcatgcagtgtctgtctttctgtgcctggcttatttcacttaatataatgcctccaggttcatccatgttgttggaaatgacaggatttccttcttttctaaggctgaatagtattccattgtgtgtatataccacagtttctttatccattcatgcactgatgaacacctaagttgattccatttttggccattgtgaataatgctgtaatgaatgtgggagtgccgatatctcttggacatactgatttcattttctttgtatgtgtatatattatagtagyggaattgctggatcatatggtagtcctgtttttaatttctgctttttatattttctttatattttaaaaattttaagaatttttataagtatttcttacattattaaatactctttgaaaacaatcttgaaggctgtatcaatggttaataatttgcatagcaattcccctgttgctgtactttcagcttgtatctaagtttttgctattacaaataaaactgtgctgaatatcttcttgtacaaaataacttcctgaaggtgtattattaaaactaagaatatgaacattgttgaggctaactcttctgaaagaggaaataaggttatcctggaccacatgctggctcttagtggccaattctttcccttctgaatattcaaggccacccatttcatcctctcttttagccactcatcccatattaatgtcaagctcaccttaatatactttttagattctaatttcttagcctttttgaaaatcaggaagacattgcctgcctcgtcagtcttccagcaatatttctgttcatgaaggtttcttaaaaatgaagtctcctgatctgtgagctccctcagtagccttgaatatgacatttacaggtcagaagacctgagttgttctgaggcagcagggtgctttcttactgcctcctcctgtgcttggagcttcaatttctctttccaatagtgctcttcaactttccaccctgaccgtaattctctttaataagggaaaccacaggagtgtgtggcagagaatatcagcgctgggcaaaactcatgctctcctctacttcccaggcacacagctgggggacatctcccagactcccctgcagccagctgtggctatgtcattgagggccagccagtgaagcgtgggcagaagtgatgtgtgcctctgccggcctggccattaagacccccgcatggagtggagacgacacccagggcgaccttggaagtggcatgatgaagagaccagagcttttgtggagcagtagtgcggaggaggagcacctgctgaaccactcactccccgacagttgtgttggattgtggacctgttttctctttgcccactctgggctcatttgcaattataacctcgttgcttctgcttgagctatctttcctttgtcttggatcatgggatcaagcatgcgtaatttttctccaaataccttgggattcttcttcctaactcttggtacagagtccagctgtcccaggctcctggatgacagggagctttctctcactctcatctgaccaacaggttcccctagcggtacataattagatccaaaatggtgcttctctttatcattttctctgctttctgagaaatkgaattgtcattttgkcaagaatttggcagaaattgtatttcagattttaatacaattgagaaaaaaccattcataaccacagttgtctggtacgtaatgaaggtagatcttgccgaatggaacatccttctctgcaacttggtgggtttgaatggctgagtttggcagaaggaatggtagagaaatagrtgactctacagaataaatggggaaggatttggagttctggaagcaatataaaagggamggggtaaagaggagagatgggaagatgaggagccagctggatcactctgtaaggggagctagcctaaaatcctaatgggaccggatggctcaagagcttttgagaacactggtgtccaatatttcatttgaagttgttgagtagatctcctccactcccctgaggggttggtgccaggctggacagggacagcacacagatggtgagacagcccacaagctgaattctccacttgcagaggctgagaaccagcgatgactgtaaatgtgagtctctgcccgccttctgccctggcctccctcctgagaactggccagacttttgaggaggaatttagacttccaaagggtggagaatagaagtttsatccagtcttatctagggaagctcccgctgacatccaaattacataataaacacrgccagtaaaatactactgctactactatcataaaataaaataaggaattaagtagataggtcaggaatttggccccttaaaacactgaggccagagagattacacagtgtgcctcagggatgttttgctctgttctcaggttatctggctcctattccttgtgtcctcagtccttgcctgggaagagagtgcagtgagcagggtagctcctcaccccctctcctcaggtacyaggtgctcctgggccctcaagggctcagctcttccctccgcagctcctgcaggggctgttgggtttatcagwgactggttctgtcaaagagctgagctcaggggaacattttgggggagtgaggttcctaccaccttggagatagctttttccaaacaaggggaagcatttgagaaatatgttcattagtaagttcgtcagtggtcataaagatattttgtctgatggcagaaggcctgaatctttgttcccataaaagacttactcctctaaccagaagaataaacgaaaggtggtgagacactggggacatctgggcagccatggagaaagagtttgtggatctgacccactgttctcctcttgtccagataaggacgtgtgtttgtgtgttgactggtgaggacaggaggaggtttcctgagtgcagagtgccaaagcacaaagcctgagataaaaaggcataaatagacctagagcctgacccagagccaggcccagtgtccttgggctggtaggacttgcaggccaggtcccagatggggagggggtactggggctgagcagctgctatggaaatttccatgggctgtacaccagctcttggtaagctcttgcactcagcatggcatggggaggacatgggttatgaaagaggcacaagacttagtccaagcttataaggagctaggcctctagagaaaaaactcaggcttgccaaagcagcaagtaaacaaacaggttgraaaattttgaaacaaagttgtaaataaggtcaaggcatggaaccagtcaagaaaagtcaatatcgtattccagttattagaacctcatttcaccttctaaggacaatgttgaaaatacaaacttcacattaagataaaaatgggttttattactttaaayactaataaagaggtgacaatatattagttttttaaagaaaaaactttttataattaattgccacttgccagagtttgagattttcttaagaattcaggttaaacttamaaaatcatttttaatacagaaatcaatgaaaaatgatccaaagacattagtttcatgcattggtaatcgttaccaaaagccttacagtgtgcaattttgtaaagtcaatgttgcaactatcccaggaattggaggtctgtgtttttcccctctctagtaagattcaggtcgtgtgtgtgtgtgtgtacaagtgtgttcacacgtgtgcatgtgcaatgtatgaacccacaatgctgaccataatgctggactcccaatgcactggttaggatgcctttgcttgtatttaaagaagccatgaagaggacatattagttcacatggctgaaaagttaagtgttagggcagccttctaataagctttaatcagggctccagttccatttctaattctgtctgccttgccctkttgtggccagattccttttcgggctggcttattcacagttgcaagatgtctgtgaacagcaactcagccaacaacaactcgtctaaggagagaggagctattgtttccyacagccgttgcatagaagtcctgagcttccttctgattggaccaccccaggaccagtcattgagggcgtgccatgtgctgactggctgagattcaaaaacctatcatcttgtcaagtggattgggattgacttatatcgggggcatgatrtggtttggttgtgtccccacccaaatctcatcttgagttgtagctcccatcccacgtgtcatgggagggaactggtgggaggtaattgaatcatggagagggtcttttccatgctgttcttgtgacagtgaataagtctcatgagagctgatggttttataaacgggagttcctctgcacaaactctcttgcctgccactgtgtaagacatgactttgctcctcattctccttctgccatgattgtgaggcctcccacsccgtgtggagctgtgaatcaattaaacctctttcctttataaattacccagtctcgggtatgtctttagtagcagcatgagaacagactaatatrgtaaattggtaccagtagtggggtgctgctgtaaagatacccaaaaatgtggaagcgactttggaactgagtaacaggcagaggttggaacagtttggagggcttggaacttcctagagacttgttgaatagctttgaccaaaatgctgatagtgayatggacaagtaacatctaggctgaggtggtctcagatggaaatgaggaacgtgttgggaactggagtaaaggtcactgttgctatgcaaagtggctggtggcattttgtccctgccatagagatatgtggaactttgaacttgagagaaatgatctggggtatatctggcagaaaaaatttctaagtggcaaagtgatcgagaggaagcagagcataaaagttcggaaaatttgcagcctggtgattccatagaaaagaaaaacccattttctggggagaaattcaagccagctgcagaaatttgcacaagtaacaaggagcccaatgttaatcactaagaccccacccaaatctcttcttgaattgtagctcccataattctcacatgtcatgggaggaacctggtgggaggtaactgaatcatgggggcgggtctttcccgtactgttcacctcttgagatctgatagttttataaaggggagttctgcacaagctcttttgcctgccctcatgtaagacatgactgcttctcattggccttccaccrtaattgtgaggcctttgcagccatgtggaactgtgagtgcattaaaactctttcctttataaattacccagtctcggttagcagcgtgagaacaractaatagagggcaccacccctagagctgggtgagaccaatgccactcaaattgatggtgactacacaatggggaggagaatgggtgataaacattcccaatgtctaccacaccttggtagccatttaaactttttttttatttaaagcgtactgtctaggtttaaggtactgtaagagatataaagatacacagttgacaatctattagatataaaaagacaagctgacaaataactacaatacactattattaggtgtaatgtaaaaatgacacatgtaaatgctaaaacgaagtacagtaaatgtaaaggagagagacagattgtttctgaggtgatcagagaggtgtcgcatagcaaataacactggaattaggtcttaaagagtgagtgggattttaattattatatgggaggcaggggagctttaagagtaaagccccagaggcagaaagccaagggaagagttggagaaatggcccaggtaagttggagyacaagttctagaagttgctgctaaggcaagaaatgtttccccaatacaaagatatctcagagttcagataacacctgaggaactaggataataaagtcagggtgcaaggtgaatatgtctttattttctcccataaagaaacctggcttaagcctccatttacctgattagtgggaaattcagtatctccttcgtggggctcccccaactccttgtgttcaacccaacgctttacacagtccaaagagggagcagggccagtctgactttcacrtgcaggcagaggccactggtctcttgtcagtctggtggacaacacgcatccccaggtctctgtggcttctcagggaggacagtatcactcatgtcactttgaacttggtcgtgagtgttccttttcaggatccagggccattatctcagagctctgcccttcagttaaattcagtttccccatttgccaagtcactcgctgtcccaaggactttggataagaagtagcttgggatatccatgtggatgcagaattctttcatttatttatttatttagagacagtgtctcactctgatggagtgcagtggtatgatcccagctcactgtaacctctgcctcctgggttcaagtgattctcctgcctcagcctcmtaagtaactgggactataggtgcccgccagcatacccagctgatttttatatttgtagtagagatgggctggctcatctggccaggctggtctcaaactcctgacctcaggtgatcctcccacctcagcctgccaaagtgctgagattacaagtgtgagccactgcgcctgggcctggatgcagaattcctatcctctgttcctccctgggatccaccgcaccccagaaagtgggagattttccttgctggctgtcccccaacccccctatgggcttcccccttgtgcaccctttcctggccacacatacccccctggggttcgtsgggtggaggcacctctctgaaatgcttggcatctttctctggtgcaaggaaagaaaataaaacccaaagttcagacaccactgggacattctattctacttggatttataggtccacgcctcttagtctcttccaggattgcttatttcacccaagggagccaggccctcctgtgctcttttattaaaatttcatattaacatttaaccttcttggtcattggcaaaatctgtgtccttagtctgtcctcaccttgaagttgaaattcttttatttgcagccacttagaccctgccttgatgrcatttcctgcccacagcaggctctgaactaagtcttgctgtctgttttggacacatggtgactctctttctgagatggagtctcgctttgtcgcccaggctggagtgcagtggcacgatcttggctcactgcaacctctgcttcccaggttcaagtgattcttctacctcagtctcccgagtagctggaagtgcaggcgcatgccaccacacccagctaatttttgtatttttagtagagatggggtttcaccatattggccaggatggtcttgaactcctgaccttgtgatccgcctgcctcggcctcccaaagtgctgggattacaggtgtgagccactacgcccggccagtgactctcttttctaaactccccttcacaattttgctctcttcaccctgcttctgtatactcacaaggaagtgggtaacagattgtcggaattaggctcggctcatggtttgcagcttctcgcctgtttgctgcttctctagtttaaaaacttggggttccaaatgtggaaattactccaaaacttaggtgaattagaaacaagtatccagtgactgtctgagggagaacaaagtaaaatacatattcagcaactaggcaagtaggatggcttccccaatacagtagagcatttaagaactggagaatggggtgctgagaagaatgtatattctgttgatttggggtggagagttctgtagatgtctattaagtccgcttggtgcagagctgaattcaattcctgggtatccttgttaactttctgtttcgttgatctgtctaatgttgacagtggggtgttaaagtctcccattattattgtgtgggagtctaagtctctttgtaggtctgtaaaggacttgctttatgaatctgggtgctcctgtattcggtgcatatatatttaggatagttagctcttcttgttgaattgatccctttaccattatgtaatggccttctttgtctcttttgatctttgttggtttaaagtctgtttttatcagagactaggattgcaacccctgcctttttttgttttccatttgcttggtagatcttcctccatccctttattttgagcctatgtgcatctctgcatgtgagatgggtctcctgaatacagcacattgatggatcttgactatccaatttgccagtctgtgtcttttaattggagcatttagcccatttacatttaaggttaatattgttatgtgtgaatttgatcctgtcattatgatgttagctggttattttgctcgttagttgatgcaatttcttcccagcatcgatggtctttacaatttggcatgtttttgcagtggctggtaccagttgttcctttgcatgtttagtgcttccttcaggagctcttgtaaggcaggcctggtggtgacaaaatctctcagcatttgcttgtctgtaaaggattttatttctcyttcacttatgaagcttagtttggctggatatgaaattctgggttgaaaattcttttctttaagaatgttgaatattggcccccactctcttctggcttatagagtttctgctgagagatcagctgttagtctgatgggcttccctttgtgggtaacctgacttttctctctggctgcccttaacattttttccttcatttcaactttagtgaatctgacaattatgtgtcttggagttgctcttctcgaggagtatctttgtggcgttctctgtatttcctgaatttaaatgttggcctgccttgctaggttggggaagttctcctggatatatcctgcagagtgttttccaacttggttccattctccccgtcactttcaggtacaccaatcagacgtagatttggtcttttcacatagtcccatattttttggaggctttgttggcttctttttactcttttttctctatacttctcttctggcttcatttaattcatttgatcttcaatcactgataccctttcttccagttgatcgaatcgggctactgaaattgaccacatagttggaagtaaagtactcctcagcaaatgtaaaagaacagaawttataacaaactgtctttcagaccacagtgcaatcaaactagaactcaggattaagaaactcaaaaccgctcaactacatggaaactgaacaatctgatcctgaatgactactgggtacataacgaaatgaaggcagaaataaagatgttctttgaaaccaacgagaacaaagacacaacataccagaatctctgggacacattcaaagcagtgcatagaaggaaatttatagcactaaatgcccacaagagaaagcaggaaagatctaaaattgacaccctaacatcacgattaaaagaactagagaagcaagaacaaacacattcaaaagctagcagaaggcaagaaataactaagatcagagcagaactgaaggaaatagagacacaaaaaacccttcaaaaaattaatgaatccaggagctggttttktgaaaagatcaacaaaattgatagactgctagcaagactaataaagaagaaaagagagaagaatcaaatagacgcaataaaaaatggcaaaggggatatcaccactgatcccacagaaatacaaactaccatcagagaatactataaacacctctatgcaaataaactagaaaatctagaagaaatggataaattccccgacacatacactctcccaagactaaaccaggaagaagttgaatctctgaatagaccaataacaggctctgaaattgaggcaataattaatagcttaccaaccagaaaaagtccaggaccagatggattcacagccgaattctaccagagatacaaggaggagctggtaccattacttctgaaactattccaatcaatagaaaaagagggaatcctccctaactcattttatgaggccagcatcatcctgataccaaagcctggcagagacacaacaaaaaaagagaattttagaccaatatccctgatgaacatcaacggaaaaatcctcaataaaatactggcaaaccgaatccagcagcacatcaaaaagcttatccaccatgatcaaatgggcttcatccctgggatgcaaggctggttcaacatacgaaaatcaataaacgtaatccagcatataaacagaaccaaagacaaaaaccacatgattatctcaatagatgcagaaaaggcctttgacaaaattcaacagctcttcatgctaaaaactcgcaataaattagctattgatggaacgtatctcaaaataataagagctatctatgacaaacccacagccaatatcatactgaatgggcaaaaactggaagcattcccttcaaaaactggcacaagacagggatgccctctctcaccactcctattaaacatagtgttggaagttctggccagggcaatcaggcaggagaaagaaataaaggttattcagttaggaaaagaggaagtcaaattgtccctgacatgattgtatatctagaaaaccccatcgtctcagcccaaaatctccttaagctgataagcaacttcagcaaagtctcaggatacaaaatcaatgtgcaaaaatcacaaacattcttatacaccaataacagacaaacagagagccaaatcatgagtgaactcccattcacaatggcttcaaagagaataaaatacctaggaatccaacctacaagggatgtgaagggcctcctcaaggagaactacaaaccactgctcaatgaaataaaagaggacacaaacaaatggaagaatattccatgctcatgtataggaagaatcaatatcgtgaaaatggccatactgcctgaggtaatttatagattcaatgccattcccatcaagctaccaatgactttcttcacagaattggaaaaaactacttgaaagttcatatggaaccaaaaaagagcctgcattgccaagtcaatcttaagccaaaagaacaaagctggaggcatcatgctacctgacttcaaactatactacaaggctacggtgaccaaaacagcatggtactggtaccaaaacagagatatagaccaatggaacagaacagagccctcagaaataatgccgcatatctacaactatctgatctttgacaaacctgacaaaaacaagaaatggggaaaggattccctatttaataaatggtgctgggaaaactggctagccatatgtagaaagctgaaactggatcccttccttacaccttatacaaaaattaattcaagatggattaaagacttaaatgttagacctaaaaccgtaaaaaccgtagaagaaaacctaggcaataccattcaggacataggcatgggcaaggacttcatgtctaaaacaccaaaagcaatggcaacaaaagccaagattgacaaacgggatctaattaaactaaagagcttctgcacagcaaaagaaactaccatcagagtgaacaggcaacctacagaatgggagaaaatttttgcaatctactcatctgacaaagggctaatatccagaatctacaaagaactcaaacaaatttacaagaaaaaaacaaccccatcaaaaagtgggcgaaggatatgaacagacacttctcaaaagaagacatttatgcagccaacaggcgcataaaaaaatgctcatcatcactggccatcagagaaatgcaaatcaaaaccacaatgagataccatctcacactagttagaatggcgatcattaaaaagtcaggaagcaacaggtgctggagaggatgtggagaaataggaacacttttatactgttggtgggactgtaaaccagttcaaccattgtggaagtcggtgtggcgattcctcaaggatctagacctagaaataccatttgacccagccatcccattactaggcatatacccaaaggattataattcatgctactatagagacacatgcacacaaatgtttattgtggcactattcacaatagcaaagacttggaaccaacccaaatgtccatcagtgatagactggattaagaaaatgtggcatatatacaccrtggaatactatgcagccacaaaaagtatgagttcatgtcctttgtaggacatggatgaagctggaaaccatcattctcagcaaactattgcaaggacaaaaaaccaaacactgtatgttctcacttacaggtgggaattgaacaatgagaacacttggacacaggaagaggaacatcacacaccagggcctgtcatggggtggggggaggggggagggatagcattaggagatatacctaatgtaaatgatgagttaatgggtgcagcacaccaacatggcacatgtatacatatgtaacaaacctgcatgttgtgcacatgtaccctagaacttaaagtataaaaaaaaaaaaggaacaggagaatgaactattttttttagaaatggagcctcactcactctgtcactcaggctggagtactgtgacatgatcttagctcactgcagcctccacctcttgggctcttgggctcaagtgattctcctgcctcagcctcccaagtagctaggaccatgcgccaccatgcctggctgattttttgtatttttagtagagacagggtttcaccatgatggccaggctggtstagaatccctgacctcaggtgatctgcccgcctyggcctcccaaaatgctgggattaccggcgtgagccacagcgtctggccctatatgcttttttcaattcaatggctacttgcctaattttgaatggccaaaataaccttccagttattttcccttaatggaatcaacctagaatagttgcctggggagagggagctggggggcagtgattggaaagagacatgagggaactttttggagggataaaattgttctatattttgrtttaggtgttagttacaggatattttcatttgtaaaatttatgaactgtagaccttagatctgtgcattttaccatatataaattatatctcaatttaagcatagaaaaagtaaaccaatgattgtgatatacttggctaatgtccatatgctacagtgtgttgaaaagaaaaataataccctattgagaaggtagacatgtactgcaagcataagctatgaaaacagagaaaagcygcagacattgttaacggactgagctgggatgtttccagttgtggggattctgagcctcttttgtaatgtgcttaatcacttctaattgtacagtcagctaattacagtaattagtcttgccttagttcaacagagttgaactaagtcattctcttagcgggactgggttgaattttcctgcatctagcgacttcctcagattgtggcctgcaatggtgcattcccggggctcaagaagtgatctgtttgtgctgggttttcaccactgggtgtttgaggggtgagggatgtgactaatcatggagccagtgagtcacgcgtgtcaggcctctgagcacagcaagagctctttgggctctgcactggcaccactctcggcgtactgacccagccttgcttaggtccaagtcaatcacattgtttttttttttttttgagacagagtctcactctgtcacccaggctggagtgcagtggcatgatcttggctcactgcaagctctgcctcccgggttcatgccattctcctacctcagcctcccaaatagctgggactacaggtgcccaccaccacacccagctaatttttttgtatttttcagtagagactggtttcaccatgttagccaggatggtctcgatctcctgaccttgtgatctgcccgcctcggcctcccgaagtgctgggattacagacgtgagccgccacgcttggccgtcaatcacattttgaaaacagacagggttatttactgcagcaccgtttgtaataccaaaataatagaaacagtctgtaggacaggagactggttaaataaattatggttcattcatataatactgacaaaaagaatgaggatgctctctatgtactgatctggaaagagcttcaaactatattgttacatgaaaaaaaagaactgaatgcatagtaaggccatttgtataaaatataaaagtataggtttgtatttgcttgtttatgtataaagaaactgaaaagagataagaamcaataacagggaagatgtttatgtgggagggcaagggaatttggggcatgaaagttgggaagtgggtgggaaagggatggaattaggcaagacttcactgcaaacctttataaaatagatgtttaaatattcaaatgaatgtgttattacctaatgaaacattgaaatcaattaattaaaatgtacaagagttttttttttttttttttttttttttgagactgagtctcgctctgtcacccaggctggagtgcagtggcatgatcttggctcactacaagctctgcctcccaggttcatgccattctcctgcctcagcctcccgagtagctgggactacaggtgcctgccaccacgcccggctaattttttttttgtatttttagtagagatgggatttcaccgtgttagccaggatggttttgatctcctgaccttgtgatctgcccacctcagcctccccaagtgctgggattacaggcgtgagccaccgcgcctggccaagagtttttaaaaatagaaaaaagttttaggggaagaagaaatccagtgatcacataatctaacatttcccaaatagtggtttttaaaggtataatgagaaatttgtgtatttaaaacaatagtgggcaggcctggtggctcacacctatactttgggaggcagaggcagacagatcaattgagcccaggagtttgagaccagccagggcaacatagtgagactctgtcttgacaaaaaaaattaaaataaaatagtcgagtatggtagtgcttgcctgtagtcccagctattcaggaggctgaggtgggaggatcacttgagcccaggaggttcaggctgtagtgagccatgactgtgctactgcactccgtccagcctgggtgacagtgagaccctgtctcgaaaaataaaataaagcaatagtggaatctgttttgactcctactttcttatatttaatgcataattgtttctttttgagatggagtttcgctctcgttgactaggttggagtgcaatggtgcaatctgggctcactgcaatctccacctcctaagttcaagcgattctccttcctcagcctcccaagtagctgaagtagctaggattacaggcatgcaccaccacgcctggctaaatttgtatttttagtagagacggggtttcatcattttggtcaggctggtcttgaactcctgacctcaggtgatagacctgcctcggcctcccaaagtgctcggattataggcatgagccactgtacccggcccatagaataatttttaagcaattgttttcccattatgacaaaactctgagagttcctggggtgtggagtggacacagtagacagccatggagagcaggtgtccaggctgtgacttggttgattarggatctttctgcttgaaaacacctcttcttgtgcttgtacagttataatttgtttttattcttttttttttttttttttttgagatggattctcactctgtagcccaggctggagtgcggtggtgtgatctcagctcactgcaacctccgcctcccaggttgaagtgattctcctgcctcagcctctggagtagctgggattacaggtatgcaccactatgcctggctcatttttttttttttttttagtaragacagggttttgccatgttggccaggctggtcttgaactcctgacctcaggtrttccacccacctcagcctcccaaagtgctgggattacaggcgtgagccactgtgcccggcctgtttttattcttaaccatgtttaattaatgccccaaatggcccaagaatcaaaaagaatcttgctgttgaacacagctaggtaatgtggagcatgaaaattattattctacaaatatgcttcaggactttttctccagatctgaaaactgtgattaatcaacttctcatatagaaaattcagcccttccactttagaatctattgttaatgagaaaatattgcaaccagtgtataaaatgattttccaggtattataaatgaagactacatttgatgtgtcatttataaataaaagatgaaattattaaagttaactagttgattttgggtgtgcaaaatgtgagaatttcatatatgtatattatctgtggagcagtaacatcatgatgactttacaaattasgaaagtcactaaacaaagaacaactataacaaggagcaataactacaaaccctggggagggagtagagtctgatttccagagatgtacattatattatttaaaatgtccagttttcaacaaaaagtatgagacatgcaaagatacaagaaagtatggcccatgcacaggggaaaatgcaatcaataggaacacagataatgtctctgccattagatttattagacaaagactttaagtcagctactttaaatatattcaaagaaataaatgaaaccatgtctaaagaacaaaataaaagtataaaaattttgtctcacaaaatagggaatatcaataaaaacatataaattatttttaagatcatcraacaggtattctggagttgaaaaatataataactgaaatgaaaaatctagtggggctcaacagcacatttgagcaggctggagaaagaataagcaaaattgaaaatgggtcaattgagattatccagtttgaggaacagaaaaaaaaagaatgaagggaaaaaatgaacagagcctcaaaaatctgtgggttccatcaagcatacaaacatacttataatgggagtcccagaaggagaaggagagaaaaaggacagaaagaatatttgaagaagtagaaaagaacttccaattttgataaaaagtacaaataagcatgtccaagaagcacactgaacttcaaataggataaactcagagattcacacctagacacatgataatcaaactgttgaaagccaaaggcaaagagagggtcttgaaatcagcaaaaaaacaaaaaaaccaactcaccgtgtatcaggattctcaataagattaacatttgatctctggaggccaagaaggctatgatatgacataaaatgctacagaaaaaaaaaaaaacaaacatacctgtcaactaagcattctatatccagcaaaagaatccctcagaaataaaggagaaatcaaggcattcctagataaacaaagtgaggaaattcatcacttagcaaatcttccctgtaagaaataaaaggtgctcttcgggctgaaaggacttgaggcattaagtcaaattcacatgaaatgaagaatactggtaaaggaaattacataggtaaatataaaaggcagcataaatatgcaataattataaacgtgatgggcatataatggataaaaatgtaatctgtaggacagtaacagcacaaaagaggggagaatggagctatataggagcaaagcttttgtatattattgaaattaagttgccattaatccaaactagaatgttataagatgttcattataatccccagggcaacccataagaaagagggaggagtgatcaactgtgtcaaatgtagctgatagtttaagatgagatctgagaatgactatttcattgggcaacagaaaggtcactgatgagcagttttaggggaatggtggggacaggtggcaaacctgactagattgctttaggtagaataggaggaaaggaagtggagataatgaatatggataattattccaggaattttgctgaaaatgagggcaacgagaatggaggtgagcgcaggagatttttcaacgggtttgtttgctcatgggaatgcagcagggaaaaactgattgtctcctctgtcactgttattaagggagaagtttgaagatcagaggaaagttattggaacatcatasttttcaccctaaagtcccaggcacaggaatctttggttattgggaaaatacacacaaacacacatttgtttgagtgkgtttatattacataatactgtactcacagatacattttaaaaaaatatmwtaactaagatggcagtatatgatcattaactaatactttcaggcacaacaatcagagtgaggtactccatgaatgaaatctatgtttcaaatgttttcttgataattttggattttattcaaaatttgaaaggctgtgttcttatcagctacagttagatctatccttgcccttgccttgtactgaggttaacaagaatagtaatgactgttcttcactgttttattttttattttttaattttttttgagacggastctcgctgtcacccaggctggagygcagtggcgtgatctcggctcactgcaggctctgccccacggggttcacgcgattctcctgcctcagcctcccaagtagctgggactacaggtgcccgccacctcacccggctaattttttgtatttttagtagagacggggtttcaccgtgttagccagratggtctcgatctcctgacctcgtgatccgccygcctcggcctcccaaagtgctgggattacaggcgtgagccaccgcgcccggcctattcactgttttcttcttgttcaccctgcccacattattagtgttatcttcaggctgggtgttctttgcagatacctttttwtttttttttttttttttttttgagacggastctcgctctgtcgcccaggytggagtgcagtggcgygatctcggctcactgcargctccgcctcccgggttcacgcsattctcctgcctcagcctcccragtagctgggactacaggygcccgcyaccacrcccggctaattttttgtatttttagtagagacggggtttcaccgtgttagccaggatggtctcgatctcctgacctcgtgatccgcccgcctcggcctcccaaagtgccttgtttttttaaaaaaactttttattatagagaattggaaacatatataggcaataatataatgaacccccygtagactcatcattcatcttccactattatcaacttgttaccaacaaagctggtcccccataaaatggagtctttccctctttggtgtcccaaagccaatttggaaaaacaaaagcaagtgtcaagcagtgcaggccttgttggatggccagggaattgagaagcaggagcttggttcatgaattaacttctcagcttgtgaaagtcaggaagtcacaaatatagggcctctttaatgaaggggttgggtattaaaagctaggggataatattcatgtcttttttgggaatggacagagaacttctcaaaactagagtattgccttcctttttttttgtccttttatggtttcctttggtcattgtcatggtgattatcaactgtcacggtgctggtgggaatgtcatttagcatggaaagtagattataatgaagtyagaagttcttcagaggtcaagtgagctgccttcttggatctcagtgtttggtcatgtggggcaccttctgaccacaggtatcctstttcctaaaggtaagccagggtagaaattcacctgtcacataggcatgtaatgtaaagaaacccatggcctgttcacttcccccgtcctgtaatattttgaagatgatcccatatataatattattacatctgataatgtgtatctctaaaacataacgactctcttaaaaaatctaactataatcccattatcacacttgaaaaataatttgcagggaaaatctttgcactaaaagccaggtcaagaaagaaagaaatgtgtctttagtataataaagctgaggtcattatttcacagggagtaaggtcaaagtcgtattaatttgaggaagatcctgtctttgcatagactagctggaggtcatttctctagtaaatcagactggcagtccttgaagaaaaactaatgtttgtggtggtgggttatgcttgtcttcaaggtactttaggagagaagctggccttggcattgctggtggagtgggactgagctagcatggaagccaccaattcctgccccatgtttgtgaaactgaagcaccacatccttcccccacttagcagaagcaggagttgatgacaatcacattctcatccagctgaaatctgatgggctagagttcgtaagattcaggaagtaacgaaccaggaactctcttattccatggactgtggtctgggtcagtaggctgggagagcttggaggaaacagggagggaacagcataaccgtgtaagggaacagttactgtaggaggaagcaacggccacccttgaaaggccttgaggcttggtctttttctcctatgtggaraaagggagccagctgacctaatcaaggcaagttgtcaactgtttggggcagttacttgaaactttagccaaaataactccttaattgtcctttaaaatttactttgtatttagtgtggtggagatgggggaggcagaacatggactgcggggagggcatgtgaatgtgcagagaggagcacccaacagccgaccagtgcccagccacagacgccacaaggcacagtctccattctccttggaagaaaggcctcccctacccctaggaagaacggagcctgacacagagcttgtgttcgcccatatcacacacacttagaattctgttcttgggaactcaggcagatctctggggagccgatgggggactgtgaaattaggttcacttctggatttcattataataaagcaggcccctatccccaattttaggcatcaacatagaacagctaactttaaatttttccaagtgataatataaaacaaacgactttcaattaagttaaatgtcaatatttgtgaaccgaaaagtacctgtatcagtttagaaatttatgttgcgaaggtgaaggactcgcgcccagaagacaggtctgtgcctttctccaaagatgattttgagggcttcaatatttaaaggggaaaagcaggctggagggggaagatggaaggtatgttcacattattgaagccacatgttgcgataaagggagcaggtagggcaacagttatgtatttggcgctcagtaaatcggcactttacacaagataaggtgaacatagagtggagatacttcacctttaatctgtagctatctgcttaggaacaaaaggaaaggcagttgcatgactcagctttcagtttaattttttttccttttggcagagtgaattttcgtttcacaataccaaaaaaaaaaaaaaaaaaaaagcggggggaggctcagaataaggaacaatcctttggcttgagtatttcatttcatgaaaaactaaattgttatttcttttttccacaagaacgattaacagagctgcagaccagtgtttggggtcatctgagtggaaattgtcgagccgactttggctcatacgttccttttctcgttaaggagggagtgacggggcaaatctgcgtgctgctggtggcggtgcctcccarggctgctcggcggggacgccgagggctgcacccgagctccatcccgtgttggctgcgcgccctccaaaaccccggctgtcagcgactgcgggcacctgcacgccgacgagaccggcgggcggacagcgactccggtgagggtactatctctctaccctcggggcgcgggtggcagaggcttcctgttttgaggatggcgccacacaaaacaagcatccttagcctgaagggccccggccgaagggccggaagtggaagtgcgcggccttgcccgccgcgtttcccctcctcggagtgctttttgtggaccctgggcaaggggctcttgctacatagagaggagcaaagaacaggcatcgcccggtccttaaagcggcggcaccctccacgccccgcagtcgcgtctgcttggtccacagcctcccctcccaggcccgcgcagaggcccagcaagcaccartctggaggcaacaagcacgcaggggtgcctttgcggccacgcacactgcatcgcagtgaaaaaggctcccgttctcaaggcgcatgcgcgcaggccagcaactccaaagccaggcctccagccccggtttgctagagagaaaggtagccgggaggtggggaaaaggagaacaggagggccctgtccgctaaggtagcctcccattggctcctcttgctccgctctcggtcgcgattggctacgggccgggagcacgggccgagcacgctcccacgcgcagagcggcattcggcaggcggacggcggtgcagccaatgggagcggcccgcggggcggggcttgtgagctggggctcccccggagcgggcgagttggtaaacagatccggagcgcgtggcgggcgtcagcgcggtggccagcgcgcagaggcgggcgcggaggcggctagaaggtgaccgcggatcccagcttcctgcagccaggtaaggctgccacccgccggcccgccgcgtgcccaggcgccgtctggctgcggccagagctggggtcaacacccacctcagcccttcttgcattctcttcatgtgacagcgcagcttccccgcgagtttcgctggccgcgagcctcaggtccggacgcagtgggggcgcctcagttgcagggtgggtcctctgcagccgtctcacgtccctgggtccacctcagcccctcgttcctgcttcggggaggagacgagggccacgtgcagagccttgggtccctggaacacgcccgctgcttgcccgaccgccttcccgctgccgaatgcccgttgcccatgccctttggtcgccaatacagctttgatgcttcgctttctaataatgttgttcttcactcccagacccccttgcactgtgtgtctggggctctaggctcgttgccgctggctgcaggtttgggtgagaactttgacttccttggctggagccagctgttgggcttcgcaggtgggaattttgtgtgaacttgggacaggggatcctttttgatcctttcttcctttcgcttttctttggcctttcctcttctccaaactctggggggtcttgtgagtggtttgggcttactcccctaaactcgaacctttccgaggctcattctcacccattgcacagaggtaacagcccctctgccaaaccctctttgggcgatggggagtgctgcaggggcaggtttgggtgttgggactccccatttgggtgagagatgtcaggttcctgaagggtgagaggcttgtgtgcagtcttccagcctgagtcgggcctacagcctgttgaaaaacttgtgcacgttcacttgggccttggatctacgtgacaggattgagtagctggtcatgccaggcctacctgattgccaaaggatttgaacattccttgatgccagcctgccagttgtcacgctgtggatgggtaggtcatcctggcaggagggctcttgggagactcttcttttggaggaaggcctttctcccgaggagagacaaaaggggagctacaggagcagcatctgtaagactcaggcggctgggtgcggtggctcacgcctgtaatcccagcactttgggagtccgaggcgggtggatcaccgtaggtcaggagttcgagaccagcctggccaaaatggtgaaaccccgtctctaccgaaaaaaaaaaaatacgaaaattagccggatgtggtggcgggcgcctataatcccagctactcaggaggctgaggtgggagaattgcttgaacctgggaggcagaggttgcagtgagccaagatggcgccagtgcactcccctctgggcaacagagcgagactcaatctcaaaaaaaaaaaaaaaaggctcaggcaatggcttagagtgttttgttcagccttgcaaatggtgcggactatgcagaatcgtaatgatttggggcctaatgttgagcawctcaaaggaaaagtgaaccaggcagaatgggcacctccctcagagccagtgtgttatctaagacaaagtttttcaacctgtggactaatgacattttggacccataattcttcgttgtgggagacctggcctatacrttgtaggatgtgtagcagtatccctggcttctgtctactagactagcaccgctccccaccccttctagccgttgtgaccatcaaaagtgtttccagacattgccacgtgtcccctggagggcaaaatctcccttgattgagaacyactgaggtaaaactctaaaaagagttgtcctgtgctgccaggggtccctctgggacctgcccgtgagtaggtgagaggtttaggcaaagggtagtgttatgcctcctgccctaacccagtggtaaaagccatgtagattgggctacctgtgcacctaggagggcagaggcaaaacctgcaagcagaaagttaggaggtagacacccatgggcatgtactgtgcctgctaaatgtgtggcagtgactggctgggttgggggtgctggagaattagaagactggtagcttctcggggatactgcaagactaggggatttgcacatgaataactatgggccagttttaaaataggaaacatgcttaagctgagtgctggcacaaaggctaactcagctatccacaagtggttcttcaaggagatgctttattcatcctcactttttgctcagacagctctgtgtcttgtgatgtgggaggggctgggcctgcatctkcagggagtgagtggctgggtgcatttcaaacatacgtatgtgtatttttacacagcagcgtggacatgggtatgatttgtggagttcttttgtagttgcttgaagcatcagtgtcaaggtcagtgaaccttttctttttcttttctcctttggtcagcctgctcaccaaagagacatatttacgtgtgtgtggagaaagatgctttacttctgagtctaaattttgccttcagtgtaatccagaatttatgccccaaatttctaagtcccaaactgattggcacgcagaaaaactgaaaaacagggatttcttgcacagggcaaggaaaaccatcctaagcctattcagtgagtttctttttcttgctgttttgatcctgtggggatgtatcaggattttcctgtaacactccttggtcagttaggggatcttttgggtgccctttgttgcctgtagaaaaggatcaggaaggaaggtcacttctcctttctcaaagagaattttaaagaaggctattattgggaagctcaaaacttggcaggataattttccagtaagaaccatggacactgagtcattatctttgtccgttgaaacaagagctgtgtgcaaaattagacaggaatatttagacagagagttgtcttgatttgacagtggcatctggagatacttctgtcattcctgttaagcaacagccaggaactcgggagagccagtggaaaggagagctggtgggagtgagtgagttcgagggtcctgctctttctggagttgcacatatggaggggtgggagccccacggaggtggtttgtgagaagtgaggatggcccgagtccccaaggggagatagaactgaaggcatggattcaaagaaatttatgcaggtggaatttctagactgactacctgactggatatatggctgagatttctaatcagggggaggagctggttgatggaggaagagctggtttgggagaaggtggtcatcttagttttagacatgatgggagcctatgggacttctttccatcctgtttgatataatttgcatacggtaaattcatccttcttagtgtgcagttctgcgcagtttgacaaacgcacatagtcacataacccctaccacaatcaagctatagaacaatttcatcaccctccgaaatttccctgcacccctttccagttgcctgtgggtctttgaagtggtgatgcggtatgtgtgtgtgtaacttggtttgttctggaaatgggttcggttgttgagaggtcctgcctggcctgagtgtggggaggcatcagtgcagagcctgtggaggggctctggcaccccaggagccagtgcagatggcagggaggcaggggtgtcgaggaccagcctgggaactcccaggccttggagtaggtggagaaagaggagctgggggaggaagctgaggaggtgaggccagagaggagggaggagggagggcttctgggaagagtgtggggccagcagggaacactgtggggcagggggtggctgaggagacccactggcttgagccctcaggtgtcacagaggggcagcttggggttggggccagaaagtgtgtgccgagggagcagggaagatggcaagtgcactccatccttgggagatggtagccatgtccagagggtggaggagaagcagagcctatgggaggtttatttaaatgtttggtacaggagagcagagagtgggcttgtgggcttcaggggagggcttttatgattgaaggcaaaagaaaaaaataggtcaggggcaaggtcttgttgcgggaaggaggagggatggtcagtgtgggaggagattggacagaggcaggggaagggtctgagagatgtggccaagaatgtgcgggccctcctatctggttgcccccatttctggagtaacaaaggtccgctaaagaggggtcgaggccttctgtttaatgtgagagggccaggggtgggggcttgaagagccttaggtgcctcagcatcctttgaggagttgtaccctgagagagagagagagagagagagagagagagagagwgagagagagagagagagagagtgagagagagagagtgagagagagagagtgagagagagagagtgtgtgtgtatgtgtagaagggaggcaggaaggtaggtgtttccgggtcatttggaaaagcccagtcccttatctctccctacctctgcaccgtccactggaattttccatttcccagaggtgtgtttcctgagagacagagaggctgtagcgcccctctctgcctttctgaagacagcagggttggtctgcctcttacctctcactatttcatagaatctctagaaggatcagtatctgcgttgttttgagcattactctttctagaccccgttacatcccagctttcagaacagccctgtgtgtgctctccttgctgactttctgcactccagggatgcatggccctttcctaatctctgggaactagacctcctccaggtcagtcgcctcacttacacatgaggaaatgagaaaacgcaggccccaagaggagaagcggtgtgcctgaggtcacccgcgcttggtggccttgctgttggtcctccccgtcggccctcatcacaatatatgcggtgtcatctgggaactggaggacctggtggcaagtccctgctgttcacggggctggatgaggggtcctggggacagtccacatgaaaagaaatgttaaagttcaagctcagagcctgggccccagcccagtgtttgttctgtgcttggcacattttttgtttggcactgatactggctcagaggagggtaaaagtaagagtcgattgcccggtaagctgaaggtggttactgtttgacacgtgcttgagcaaacatctctaatcttcccgagattgaaaaaatcctgtggctcttgctccctaaggtgtttacagccagcatgtggtcaagggttggacattgtgctgccgcgatgcctgttgtagctgctgtttacacctgcttggtgctcacggttcatgggccagggctgattggcctgctgaggaacagctgcctgctggcttcagcccctcctcttttccctcagtcttagacagggacgggggtgacgcagaggaagcagtagcagtgactgcgtcccctgctccctccctgggtctgtgtgcccaccatgagcgggattatgaagctggcttggaaactcatctggcttttgctcctgtaaaaatcactttttgaacagggtgctgctgccatttctgtggctgtgcatgttggggrttcaggttcccctggtgctcagcctcctcggtggtctcttcagtcctgggctctcgatgagggagctcaggaagccacggagcctgggtgcctgggtcctgcctcactgactcataatgctaataaactcgtgtgtatgaggacagtgccagaccccgttgggggtacagaactgggaaagagagggcccctccctccggagcttaccttgcagtaagggaaatgggacaggcacacacagagtcatacagggcatggcgaggtgaccttaggccattaagagatgagggagtttagaggaaaggagatgacttgcctatggaggggtttaccagtccagcagggtggccaagattccagcaggggaaatgatattccatggggaggagggagcaggatgtggaagctggaaaacctgtgtgggtgttgggcggggccgggggtccattctggctgaagcgttggggcacggaggcatctagcgagaggtatcgctgcagaggtgtctggggctccacagtgaagggccttgctggccaggccagaccagggagagtggagatcagcaaggagatggccacctctcctgggtctgtggtccccttgcaccctgctgagcctcttctcatttctcgttgcgtgtgtggttgttgtctgtctaggattgccccttgtctgggttaactgggtgattttaaaagctatcgaggttttrcatacacatgtagtgcctaagggttgtgtgtgacctcagggcagaacatgtttatttaacttccataccagtgatgtgtgcatgtccacacctggcctgtgtgtggcatttggaggtgatgctaataaaggttggtgctggtgttgagtgtggcaagactgagggccgtgtgcccgatggctcctcctagctcttgcacacccagaggcagtcttcagtgtagggcgtctgcctctttccactatttatgtttaagatcaaactggctctggaaccaagctttgcctctagtgggtaggatcactggtgctgagaattgtgatacmctcagtcctggcagctgacaaactttccagagcagggagtttggccagatggcctttgagagcccagctggccccagaatttttatgactcaattttctgtaaccaggaagacacatttcaggatgtaaaccttgctgatgtctcatattgagtgactattgatttaacaaaaaaggagttattgatttggggcagtgttcttctctgctrtctctcagcttcctaggcagtaagaagaaaggactggagcctgagtcagacaggtgtggaagggtccagcatcccacagctttggcccttaggagattgctcagccttgatgagctttaattatcctatcaatgmgtggggataatacctcaccaggtctttgtaagaactagargtaatataaagtgacaggcagacagaggggaataataaatggtagctgttcttgttattattcctatttcattgagatattaaacctgaagtaaaagtgttttgaaagattaagaatataaaaccgaggccaggcacggtgactcacacctataawcccagcactttgggaggccgaggtgggcagatcacttgaggtcgggggttcgagaccagcctgagcaacatggtgaaaccctgtctctactaaaaatacaaacaaattagccaggtgtggtggtacccacctgtagtcctagctactcaggataatcacctgtgcctggggaggttgaggctgcagtgagctgtgatcatgccactgaattccaacctaggcaacagtaagaccctgtctcaaaaaaaaawatatatatatatctatctgcctggcatgtagtatgggcccaatatagagaaagtcaacaggactccgtcattaagaacaggaatgcactgagctgtctgtggggtagtctaccacccagcttggtgcctsgcacttggttggcattcagtagtatttgtggagtgaccaaagttaatttagaagaatggtctggaaattattctagaatacagcccctctccccaacccaaggatctgctttaatttcctatggctgttgtgataaattaccacaaagtttgtggctcaaagcatcataaatgtatgatcttacagttctggaggttagaagtctgaaattggtctcactaggctagaatcaaggtatcagctgggctggttcatttctggaggctcaagggcaggacccgaccccttgccttttccagcctagaggctgcctgcattccttggcttgtggcctcttcctcacaatggcatcactccagcctcacttctgtctcccatcacctcgttctgactctgccctgcctgcctccctcttatatgggcccttgtgattacattgggcccacctggataatcccccatctcaggatccctgacttcatcatatctgcaaagtcccatttgcaggtaacattcacaggttctggggattgtggtatgggtatctttgagacaccattattcagcctaccacagccacccacagtattttggccagatttaaagacaaccctgtaagcgtctgaaagaaacgttgaaagaaacccttcaacctcaactttaggatccttaattaccttcctgggtggcagtggttcgtgaattcagtcaacgcttgcgcttgtaatttgtgtgggtggatcactctgtgtgtgtgggtggagtgggaagagtcagagttgtctgagacaagagcctcccacaaggagcttatagtttgaagagaagagaggtccatgtgcaagaagaagagtaacttacaatgtaggaatctgaccagcaagttagatcagctgtcaggagaacgtaaatatggaagagctgggaatcaagggcctgaataggaatacgttcttgaatttatatggtgctttaacacatttcaaagtatatccacccaccyctccatttatattggacaatataataacttayaccatcatttcgaggagaggaaacaggtcagagatggttcgagaatatgcctggagcagcccagctggtcagggcagagctgattcccagccccaaggccccaaggccctcacccttggctaatgggtgggttttcagacgtacagagatgaaggggcgagcgggcctgcctgagaaagtaggacctgcagagtggagtgcgctcacatggctcgcgcgtagctggaggctggaaaggaggccgggggcctgatttcgatgcctgggacttcaggcrcaggagtttgggttttatatatatgtctacatacatgtctacaggtagaggagccatttgagcaacgcgttggcatgatgaacgtgggtttttttatagggagaggaayctggcaggagagtgttccatggctcggagctggggagcttgtgggagttagaggggttttcttcccaactgcctctccctgaatgtacctggacaaaagcctcccatgctgttttctcctttaaggtgaagtggtaaggaataccagtggacatttgtgtccctggtttcgaagcaggctgccagcactttggactgcctctcctgaatgatgcctcataccacagcactaaataaaccacactggtcctccccagcccagccttcctcccaactcaggtatgagactgtgcctggcaggaacaactgcgggttatccagactgatcccattcaccctaaccgttggtctcaccaagtctgaacttcattccagaatgtctgtgtgcttgcaatactactactaataataatggcattagctaatggtttttaagcacctactatatgtcctgaatgctgttacatggatttatccagtcctttcaagaacagatgaggaaactgaggcacaaagataagctcacatgacttgatttaggtcacactagcaagtcagtggcagagtcatgatgtgaacccagatcacctaacctcagagcatcttaaccatgtcaccagtatcacttcctgagccaaatattttaatttaaatgttttaagcagtaaacttcactaggtttttagtcagaaaactaaattgccatcaggaccttgcgcttggctggttggcctttaaaagccttgtgtgtcatcggctatatcaactcacagagtgggagaggctgcttgggaccctctgttgcctgcctgtggttggagctctgagcccatgcaggttcgctcacagtgttgggtccttctctggactatcatcagaggctggaactttgccttctgctgcttttatatcacccccaaccctgcccagctcccaacccagtgctcaccacagggcaactcacccagggaatcctaagaatatcttaatcttccartggatggagaatggaggtttgcagcctgggacatcaaaaacacactgttttgctctttttctcctcttacctgttaaacaggttgcctagctcctgagccatgatggatccaggtcccagctttacttcttaaaagctgtgtgacttcgggcaaattacttaaccactctgtgccttagcaccctcatctgtaaaatgggcataatttaccttttgaaaatgattgagttaatacatctttgtgctaagtagaacactgagcccagagcctggcatatactaaacccagcaaaagcagctgtagttatcattggcatggtgggctggttctgctrctcacaaaatgaaaacatctgtgraactggtttcattcatgggggagaatgtcagtgcctagttgcttgctttttttttttaagaaaaaattagcagtatgggattcagtgcctgctttcaacaagctcttgtttatgttattagcacaagaatgtataatttttaaacagttcaaagaaaaaccccagtagtctgggagcaactttcaagggaacttgaagtccttagcctasaaggcaagttgagccctggaaactccctttcttacaaggcatgacccactgggacatccagaggctgtgggtacagacctgtgtgagggccatggygagctcagacctctctgccrgggcagacaggccagcgtatgtggctcaccaggaggccaccaacgccctgcagtcagaagggactctatgtggggcatggggtggaggcagcagcgtgcgtccctgtctgcctctgtgtctcccctgaccaccccctgaccccacacccacgtcagtgcttgccttgcaagggggttcttgtaaaggaggctgagaaagtggagggatgaaggaatgattagatggtggatgattttatatcagcccaagcccaagccgtggaccaacaacgtggaggggaatgcgggtgtctgcagttaggctgtgagcctcctgaagcgacaggaggagggaggagagctgtacagaaagttggcattggacaacccctcccagccccccaggcctgtcccttcatgagcagyacttaggggccaccctggcctggataatacagtamcaggtggcttgcctttctctggcttcacctgggggcctgtgggtgttgggcagctctgtgtctggcgaggtgagcccatttctcagggtcaggagcagaactataatgggggggtccttgccccaacacgagccttattggggtgttctcattcaactctggtgaccttccaaatttcctgggacagctgtggtttttactcttgccctagaatatgagtcgacaaatagtaaatattttgggctttatgggtcatagatctttcttgcaactgctgaactttgctgttgtagccaaaaaagaaaaaaaaaagaaagcagctagggacaatacatatgtaaacgaatgagctatacgtaatctataaatgggtgagcaggctgtgttccaataaaactttattgacaaaaaagcaagcagtaggactggatttggcttgaggaccatggtttgctaacccctgccctggaaggacactaattatgtgtcttaatttttgttgcaaaagatgtggtcactgcacctactacccagttctaaactaggatcctgtttttttgaggatcgggggtaagcaccctttcattatttccgtcttttaacccagaggccaacattagggaaggcaggcagacccgctgcttgttccaagtgatttttttccccactgtcccgagaagggcagttgagcctctctctccaaattggaggtgccactttccatccgcctggtggcctgttaggagcagttgtcttctgatgaaggacagtggctaaacaaggagaggcaatgtttatgccattccaatctgctgcctaacccttgcccgttctgctatggacaagcacttaggggatggggaatacatttgtgtgcttgcttactttttaaaattttaataaaagatatttaagattatttttattttatttatcttttattttattttttttgagacaggtcttcttgctctgttacccaggctggagtgcagtcgtgtgatcatagctcactgcagcctcaaatccctgggctcaagcgatcctcccacctcagccttctgagtagctgggactacaggtgcagcaccacrcctggctaatttttttgtttgtagagatggggatgtccctgtgtttcccgggttggtcttaaactcctggcttcaagcaatcttcccaccttggccttccaaagtgctgggattacaggcgtgtgccgcttcacccaacctgatattatttttataacatttattttctattgtaaaagtagttcatgttctttgtagaatattttagaaaatatagatacaggtacaaaggctgtatctatatacaaatctttctataaagaaagatttgtcttcccaccactgcatgaaaagcaacgttcctgtttttgcttcctgtcacctccctccctttcttctctcctttcctgctccaaaaggaaagatgatagttttgtgacctgctttttatttcccgggaatatataataatacactttcttatttgtcagtaaacacctttcacagtgttattttattttatttatttattttttgagatggagtctggctctgtctcccaggctggagtgcagtggcatgatcttggctcactgcagcttccgcctcctggtttcaagccatcctcctgcttcagcctcccgagtagctgggattacaggcgcatgccaccacgcttggataactttcgtatttttagtagagatggggtttcaccatgttggttaggctggtcttgaactcctgacttcgtgatccaccagccttggcctcccaaggtgctgggattacaggcatgagccactgtgcctggcccacagtgtcattttcaatgactatgtggaatgccctcctatgactattccaccgtttagctaactaatcttaggcaaggttgtgatgtttacattcttgtagtgaatgttcacatctgtttttagggagatgtaatttgacaggttttgccaggcagggcctgaggagaaggggagaggggacttcctggaagatgtgctctttggggccagctctgagagcccagccctggggtagactcttgagtacaggctcctgggctcccgctgtgaaggtctcactcagcaggcctgtgctggggctcactgacgggggaaggacggaggcttttttccctctttctcatctcctgggttcttcatgtgttcagttgtctttgaaaactggtagcaggtgaggatatttcaggacctactgacagagaccctgaagctggacctcgcgagatagaagccgggagttgcycgagatgtttgagtgatgctccctggtgtgtgatcataaagactgaggtgaaggttacatctaaagagactcatggagtttggttcagaagtttgaagtctttgccccaacacatacattcttgtgagtccttggaggaaacagtcaattgttttctttttctaagagtaaaaaaggaaaaatttcaaggacgtaaaggaatgtttcagtgcccacacaggctagaaattgagaatgttcatgcccaaagtgaaaagacagttcctggctgggaggggggcagaaggccactgccagcccctcagggtatcctgaatatcattaaacagtccttgccaaagcatccttgaattgacagtcttgagagcctttggaggtctgctctgtgggtcacggtctctaagctcattcacttttgatttcctttttctgtttcttgaagaataatggaaaaagaagggrcaggtggaagacttccgcctaagggcaaagccagactcttgggaagagggtttcagggggagactcttaggaaagggtctctgtggaggcatcctgcctggccataggcatgggccacctctgctccccttccctctcttcctccagaaccggggttctcaaagtaagttcctgggacctgcagtgtcagcagcacctgggaacttgttagagatgcagattcccgggccccaccccagacctgctgagacggaacccttaggggtgtggcccagcactctggactcgtcttaaggtgattgagacgttcgcagcagcttgaggaccagtgcctcagaccagcctcctgagaggcccttgattctgtatgtggagtaaaagttgccagcaagtgtgagccagccagagaatagcaggctttctcaaactttggagggaccagctgagttcatttcctttggcaaatattaatgacctgtctgctcaatcctgagcatggtgttcggtgctggagagaggaagacagatgtggtccttgtcctatggctgatggtccttgtagtccttgtcctgtggctgatatccgactggggagagagttaggcagattcaggaagtggtcactgctgtgctggaggggatgggcacagggtgctgggaggcatgttggggaagccttcccagaagaggtgatgttggtgctgagatccgggaggaggagaggaggtgtgccccctctgcacrggcctgcaggaggaagcctctctggttccaggagtgggttggcctggctggaacctaaaggcagtggagggaagggcagagccatggtgaacggttgctgcatcacccagtgggaatatcagatgcttgagggcaagggaggaggcttgaaagaagcgtatggtggccacattcctcagggtgggagccctgggaggatgaggtgtgggtggtaaggtcagtttgggacgtacttcctataggaggtacctataggtggttggggtgctaggcttgcagcagacagmtgccctggggaaggcttctcagcgtggactctccctgactcccactctccctggctcccgcttttcctggttcactctccctggctcccactctccctggctcccactctccctggctgccactctccctggctgccactctccctggttcacactctccttggctgccactctccctggctcctactctccctggctgccactctctctggctgccactccctggttcacactctccctggctcccactctccctggttcacactctccctggctcccactccctgggttcacactctccctggctgtcactccctggttcacactctccctggctcccattctccctggctcccactctccctggttcccattctccctggttcccgctctccctggctcccactctccctggctcccactccctggttcacactctccctggctcccactctccctggttcacactctccctggctcccactccctggttcacactctccctggctcccactctccctggttcacactctccctggctcccactccctggttcacactctccctggctctcactctccctggttcacactctccctggctgccactctccctggctgccactccctggttcacactctccctggttcccattctccctggttcccgctctccctgattcacactctccctggctgccactccctggttcacactctccctggctcccactctccctggttcacactctccctggctctcactctccctggctcccactctccctggttcccactctccctggttcacactctccctggctctcactctccctggttcacactctccctggttcccattctccctggttcacactctccctggttcccgctctccctgattcacactctccctggctgccactctccctggctgccactccctggttcacactctccctggctcccactctccctggttcacactctccctggcttccactctccctggttcacactctccctggctctcactctccctggttcacactctccctggctcccactctccctggttcccactctccgtggttcacactctccctggttcccattctccctggttcccgctctccctgattcacactctccctggctgccactctccctggctgccactccctggttcacactctccctggctcccactctccctggttcacactctccctggctcccactccctggttcacactctccctggctcccactctccctggttcacactctccctggctcccactccctggttcacactctccctggctctcactctccctggttcacactctccctggctgccactctccctggctgccactccctggttcacactctccctggctcccactctccctggttcacactctccctggctgccactccctggttcacactctccctggctgccactccctggttcacactctccctggctcccactctccctcgttcacactctccctggctgccactccctggttcacactctccctggctctcactctccctggttcacactctccctggctcccactctccctggttcacactctccctggctcccactccctggttcacactctccctggctctcactctccctggttcacactctccctggctgccactctccctggctgccactccctggttcacactctccctggctgccactccctcgttcacactctccctggctcccactctccctgattcacactctccctggctgccactccctggttcacactctccctggctctcactctccctggttcacactttccctggctcctgctctccctggcttccgctctccctggcttctgctctccctgactcccgctctccctggctcctactctccctggttcacactctccctagttcacactctccctggctcctactctcccagattcacactctccctgcccccccccccccacctccctggttcacactttgcccagaagaaaggctttttgtgccacttgcttctagcttcttataccagtcatgtctaggctttggtggcagatatgactgcaagagacttcaggacagtgggtccttggcttttagaacagacaccatgctttgctggggaggagctggtttataatgctgtgctctgtatttacggaggagattgaacagtggcttggtaatgcagatgacgtccctggccwgctgtcatagaggagatgagtgacagacagtgagttttggctgtgaaggggggacttggagtgtataagggatcctcagagtaaaattccttccttctggtgggtcctgagtggacagtgtgtgataatctcatctgccgtctgtcaggattgactgttgaattcatttttaaaaaggacacaactcattttcctattgatatatcttcttgtatctggccggttagacagcccgtgggggtgtcttttggttttggagactagatttgaaggtccccatgacccaaataatttccagctcgtgtgcaggtcaggatccccgagtcggagccttgtctccagcatgagtgagacggtgtccctgaaaggtcagagagtgaaagtttggccagaaaacaccctcctgtggtgggaacacagccttgtgcagctttcctaacccctgtccgtggggttgggaagctgcatttatcacggttctttttctctctagacacttcaataaagacatttatttactttaatcgtgatcccaactccatcgtgctcaactagtcaccgaaccagcatcaactccattaatagtcctaataataaagcccctcagatgtcaatatttgatcctcatgtttcaggatactcctcagtagccatcgccatagtatagccaaaaataaccgtcatgccacccaaataaataaaaaagactatcaaccccacaaaagcccgttagagcaggttagcacattaggaccagaaaaggggtctgatgaggcacccagagcccttccgtactgagctactgaggaggggggaagaggttgagccacacgctgggcagcggcagctggtgggtatgggcctggagtctcacgtcccggctccaggtcgtcrcttccactctgcctccgatcctggcgtgtcagcatcagttggcccctagctgtctccctggtgtctgtgcccattatagaggtacgggcatgccacgctgccatgagccctgggccagggcaggttcatcggggcctgcaggaactagcccagagccctgggagaggtcagtgaacttgtgttgaaggaacctccggttgactttttattttggtttcatgcctggctagtggacactcccaaacatgagcacctgtctcccacccccactgctttatcatttatggtcactcttttgrctgcccctcctcagaggagagcaggcaggcacacggaggccttcaggaggctgctgtaccaaggaggcacagagcccaaacacttcatttcagttactcacaggcgagacccccaaaacgtgctcatggagcagcaggaagaagtagggtaggtgggagactggtgttcctagcgagggcctggtacttgcagatgaagtcacggtgctgataggatttttaacttgtgtattacatggtttgagggcttttatttctttaaaatcatgatgaaaatacctcctggtgtagctgtgtgcctggttcttggtacacccctggaagggatttgcagcgaaattgtgggatcgttgaattatgaggcactttgggattgtggtgcattagaagtaggattttaagacctaagttttgaaaacagaaggtgagaaaagttctggacagatgtttccttctggtagttattccccttccctcctttctacttctgtgagagcgtagactcccttgcagaaaaatacctggtcttaagctggcatggtggtgcaggcctgtaattccagctgcttgagagcctgaggtgggaggatcagttgagccttggaatttgaggctgtagggtgccatgattatgcctgtgaacagccttgacactccagcccgggcaacatagtgagacccctctcttaaaaaaaaaaaaagtacctgatgttgatgaggtgtgaagggttcactttgcatggtaaggggaggtgtgggtgtggcccctaaacagtaggtcagcgatatttgtcaaaggggggtgggtacaggctgtggttttgaaatgagtctacatgttagtctgctcacaaatgacagactgtgtttattagcagcatctgtttattagcagtctgtgtttattgatttgagaagaacaggttttgcatcccagtatgcaggaccacatatctatggggtatttcccctattgggccctccttccagcggagtgggtgctcaccatctctgcttcctggctctggcgccactgtctagggtggggcttggcaccagttgggagttcactgggtatgtaggatgcaactgtttaggtaggaagaaagacacaaccaagtactgttcagtgtgtacttttttagatggcttatatatttgccactttgaaagtaggacaagtgaactaagaaagctacccacagtgctccttgatgcttcctttttgattctgcatcatgtggtagtgcttggtggtgttggtgcttggtggtggtgttggtgcttggtggtggtggtggtagtggtacttggtggtggtggtacttggtggtagtggtggtacttggtggtggtggtggtgatggtacttggtggtggtggtggtagtggtacttggtggtggtggtacttggtggtagtggtggtacttggtggtggtggtggtgatggtacttgtggtggtggtacttggtggtggtggtggtggtgatggtacttggtggtggtggtccttggtggtggtggtggtggtacttggtggcggtggtacttggtggtggtacttggtggtggtggcggtacttggtggtggtatcagtggtacttggtggtggtggtggtggtgcttggtggtggtggtggtacttggtggtgtcagtggtggtacttggtggtggcggtggtacttggtggtggtacttggtggtacttggtggtggtggcagtacttggtggtggtggcagtggtacttggtggtggtggtggtgcttggtggtggtggtggtgcttggtggtggtggttgtacttggtggtggtgtcaatggtacttggtggtggtggtggtgcttggtggtggtggtggcggcagtggcggtggtgatggtggtggtggtggtggtggtggtagtggtgcttggtggtggtggtggttgttcatttcttttgaatggtggttaggatcttccaaattattgcactgtgggtctggactgcagtttgaaaacattggtttggtgaatagttgaagctgagggtgggctgaccctgaggggtcagggaggggctctggttgtcccttggtctatggatatccgtcacargcctcactgggcagagcaatggtggctgggcagggacaggcagcctcagcccctgtgggtttgggttggagcaccaatgccgtgagtggtcccttggaccttgcagggaagttctttgggaattggatgctcctctcycaacaggcagttttggtccagagggawgaaccctagactgggagtctgtgcgcctgactcaagtcctggttctgctgcgaatcatgaatcacgccacctgtctgtgcctcaggttttccgtagggtgcttgtgaggcccaggtgaggaaatgtgtgggaagcagcaagcacaccgcaccactgactcaacggcctttattctgctccattcccctggagtgtccagagtcacgtggagcctcccttgagccctgggccctttcttatctcttagcagaaggggagatcagtggaaaaaccagccctctggaccttctgctcagagtttggtgtggagttggtagtgtgggtttggcctgcagaggcctggggcctcccctgacttggcctcctctcttccagccctgaaggatggctgccatattgggagacaccatcatggtggctaaaggccttgtcaagctgacccaggcrgccrtggaaacccacctgcagcacttgggcatcggaggggagctgatcatggcrgccagggccctgcagtccacggctgtggagcagattggcatgttcttggggaaggtgcaggtaagggggcctggcagtgggaggggtgctggcaggaagagggtgggacctggagctctgggggagaccaagggctgtgaccatggcaactggtctttggtggccagggcctgagggcccaccagctaatgtgtcccacggtccttccagggtgggacagggcccctgtgtgaggctgtggcaactataacagaattccatagactggtggcttaaacaatgcacgcttatttctcaaagttctaaagactggaaagtccaatattaaggtgccagaagattcagtgtctggtgagggcctgtttcctaatccatagatggccatcttctcactgtgtcctcatggggcaggaggagggcaaggctgctctctagggcctgtgttatgagggcaccaatcccattgaggagggcttcattctcatgacttaattacttcccaaaggccccacctcccaatactatcacactaggggctaggtttcagtgtgtgcactttggagacacacaatgcagtttttactggggcccatgtgtccatcagcctggctcagccttcgaaggcccttcccactgagcctgctgagcctccgccaaggcctggcctcatttttctccttcagtttgctgagggtctctgcactcctgactgggggcyctcctttccttggtggcagctggcacagcccttccaagaacagcttcatctccagcctctctctcatccctgtgccatctaggggaggagatgaccttttgtgccaaggtccaggaagccttgatgtcttacctccaaggggtgattttcagtgaaatcgtgtgctggagaggtgactatagacagggctggctacagcagagcacggcccaccatggcgtcaccttgcacagttgccagcagcttccctgacagtcaaggagacagggtggggggtgtttgtgtgcctgttgygcgtgtgcacctgtgtgtgtgcgcttaggcatgtgtgcattggaggttgtrtcgcagcttctctccttccacgtctgttctgtggatggctgatttctggacaaaggtcaccgccctcctgcaggctgtgaggccgtcgcagcccccaggcatctcagtctcaggtttaggacctgcaggcccttccctgccgctctgggaggatcccacagtgatacagtggctgtcaccaagcatacctgcctttaatgttcagaagtcctcacacctgtgctctcccccgagcctcaccactgtcctgggatgggggccagcctggaccatcacacccatttctcagatgaggaaactgaggtgaagcaatttgctgcaggactcataacgagtgacaggaccagaattcttgtcccctcccagcctggactccatgctcttgccctccccttgcctgatttggtgcctgagtgtggggcctcggcctcgctcttgggtgttttgcctgtgggacactcagaaagtgaggttgcccagctcacttgggcctgcccaggagtgggacagcctggacaggccttagccctaatggcgagcagggcctcctactcgggcactctccaaccctctgctcccaaagcatgtctggaaggggcagggcttccccatcagtcactcggaggtagggctgagtgacgagccacaccacccaggaggcacgggagcagggtaggcaccggagcagggtggctgcccgcagtgcgctgcbattcactccctcagtgcttcgcttttccgtgtctcccttctcgcgaggggaggaaggtcacggactccaggatcctgtctccctccagcccctcaaggttgcttccacattcattcagcagatacttactgagtccgggtcccttcggggccctggggaccccccyactggccttgggcttccacagtgacaccgacaggtgttagtagcacagggccaggggaccatcatgggagtgatggggcagaaggagggccctgcccaggctccctcactgtcaagscttccctgggggctctgtgaatttaaatatgacttctgtggttttttattttttatttttttgagatggagtcttgctccattgctcaggctagagtgcagtggcgcaatctctgctcactgcaacctccgcctcccaggttcaagcgattctcctgcctcagcctcctgagtagctgggattacaggtgcctgccaccacgcctggctaatttttgtatttttagtagagatggggtttcgccatgttggccaggctggtctcgaactcctgacctcaggtgatctgcctgcttcatcctcccaaagtgctgggattacaggtgtgagccatcgcactggcataaatacaacttgtttctactctgagagtagtgccacagccagcagggccagcctgggtgttggatcccggctctgtcatttgctgcctggtgaccttcaccagcacatcagccgtctttgcctcagtttcctgtttttgaaatgagtgtaacagcctgtctctctcctccctcccatcctgtgacatcttagacagcagaacgtgaggcttgggtatcctgctgtctgcataccctgcgcatttcatttgtttcagttgaagccgagaatccaggccactggtctccctctagaagccggtgctgttctaattataggctcctgggtgctgtttcctggccctgtctgtggcctccagtaactgtgactgtgaggagccctattttcagatgaggaagtagcagagaagggtcaggagctcactcaaggtcactcctggttcagaagcagaaaggacctgggcccgaagctcaggccttggtgaccatcacaaagaaaacatggcgtatcctctcccctgcccctccatttccctgtaccctgagctcttagggacggccaggcctggtcctggttgtaaccacctctccagtgaggatctcttacatgcataccccggctggtgggtggcatccatgtctgcagtaagctgtgggcttaggtgggcccgtcggtgtgcttccctcaccccttgctggccttaggctgtgtgttcacctctcagagctttccctgtcttttgcgccctggtttaccatctccaaagccctggaggccttcttggccytgttttataggtgaggaacccgctgcgggcgtagtgtgcacttggcctggccccggctgggcacacagtaggtgctcagtgtcccacctaggaccacacagcagagccccaacagaagcagggctggagcccaggtcccggctcccaggctggraagggtgccgggcctcaggtgcagcactgtgccacctctggaggtgggagggggcgggatgctggtggtgtgctgtcctgggcagcaggggacaggcagggaggagctcctggctcgctcttgctctcctaatgctggcctttgctccctgcagggtcaggataaacatgaagaatattttgctgagaacttcggcggcccagaaggggagttccacttctcagtcccgcakgcagccggagcctccacagacttctcttcagcctccgctcccgaccagtcagcgcccccatccctgggtcatgcccacagcgagggcccagctcctgcctacgtggccagtggaccctttagagaagccgggttccccggccaggcctcctcccctctgggcagggccaacgggaggctctttgcaaaccccagagactcattctctgccatgggctttcagcgaaggttcttccaccaggaccaatcccctgttgggggcctcacagccgaggacattgagaaggcccggcaggctaaggctcgccccgagaacaagcagcacaaacagacggtgcgtatgggaggcccctggagggccgaggtagctgccacccacagcagtgatggccttgggctctgctctagggacttttcctgggtgctgtggtctggggtttttaggagcgtggtggccttctcttggtggagtgtgctgtcaggcggagctgctgactgtggggtggagaggagatgtgggggcaacaggagcctctgaaggttggtcctgtccccttggctgattccacaggtctctttctcgtctccctccagctcagcgagcatgcccgggagcggaaggtgcctgtgacgaggattggccggctggccaacttcggaggtaaggtggctgtgtgcccctggactgcctcacctgccctgcctgggcaccacgctgcggcctgcatggaggtggggacccagcaatatcccggggagggcgttgggggagcaggtggcggtggccgcccctgcatgagcttttggggagctggagtttttcatgggaggatgattcagttactggattccagctctgcctggctctcccctgcgggttggtacagggccgatgctgtgccaggagctgagtttggattgcccggcaggcctcgcctggaggcggtgtctgcagcatctctgtttcacccctgcctcaggttcactaccagtcggctgctttggaggcctctcaggaaggaggctgggcagtgaggaaaagctcttccctggggctgttcagcaactcagcagggctttctttccccctgggaccagacatttagggagcccatttgctgggtccccacaggcctgcggctcatgagtggartgacaagatgccatggcctccagctgctgctgtttaaagccgtttgtctgtactttggggggttgagttgtcattgtgcccagtacacatgcgctctttttatagaagttgaagggtgattttatagtgaaggtttatagcagttgtgtctgctttgatggcatcatgtttgtcatgctgctgctaatgcgctggcccagatgttcctgttaaagtgccatctcctttgctgtggtacactctaagttagttactgggattgcatttctttaacactcagctgtcctcagtaggttctccagrtgatataattaatggaagccacagttttggtggcttgatttggaccctgaccttgggtgagtggttagttccagggctgtaggcagcagaggtctgagtggtccatgatggtgctggtgctgggtggggcatggagatgcactctcatgggtctgcctgtctctttgctggtttatgtttttcctcccatacaccatccatcatacatgctgttcctccgctcctgcctattctcttttggaaaccccatcctacttgttcaagactggttctgggcagaggctcacgtactgtgctccccgagagcctggtattctgggagctgcgtaatgtgtgtgggttctgacattgaatgatggctggcccccctctccaaggtgctgagcagacttggttaactggatagaattttctcagcagtaaggttttctttcataatttttaccttaatatttggcatccactgtacttagccattcaggaatttagtatgaagtgtcatctatgtgacagccaagagtatttgcttatttccttttcctgrggtaacatttcaagcagtccctcatagaatatcacacctccctgagttctgctgtcagaatgagtttgagaatcactgccttggtggcctctagtggtccttatcccctggaagacttggcatgttacttgctttgcacattggcttgtcattgggtaacatgtattatttcttattaaaatattgaatggaggctgtcttctttccccatgatattgagggcaggagctaccctgttttcacatcggtaccttttctctgtcccctccctcttcctttcactctagactcttggtgagcctgtccctggaaggctgagtttgacgtgtttcaggactggtgcagtcctcacttcggagtctttgtggggtggggagaagcggtagagctaatgcaggctgttwgggaaaagtggtcagaatgaaagtcttgatggtgaattagaatctggtggagcaccacgaagtcctggcgaaggaggcagtagtcagacccttttgggtgacgggttaaggaagacagagactgatgtggaaggggttatatataggaagatgtgtaggaagaaaaaggtagagagctctcctcagagggtgggggattatgggtagccagagggagcctgggttagtggagttgaagccctagtcttgggtgctttgtagcatcagaagcctctggagcctttgctgacacctgcctgwtgtacggagccatctgtgggtgtctgtgtgctggaggattgcccacagctatgattcagagatgctcatgttgttgcccaagcaattgacagatgatgtttcaggcttggagatggcaggatgggagcaaagagaagccaggtcaggaaagaacgtgccgttctggccctagtggggaattctgggccttctggctcacccagttgaacctttcaaactgtaggttatgaccctttagtaactgtgaaattaatttaatgcatcaggatcagcatataaaaaacaagttaactgtaatctcagcactttgggaggccgaggtgggagaatcacctgaggtcaggagtttgagaccagcctggccaacatggtgaaaccccaattcctactaaaaaaatacaaaaattagctaggtgtggtggcatgtgactgtaatcccagctactcgggaggctgaggcacaagaattgcttgagcccaggagggagaggttgcagtgagytgagattgcgccactgcactccagtgggggcgacagagtgagactctgtctcaaaaaacaagttaaacagaatggaattcaatagaaaagattagaattaatatcgtacatccttacaatgaactatacacatggcaagatattttagtttcagagacatacatactatttaagtatgttcttcactacaatgtgaaatatatagcttactggtgggtcatcatccaaacagtttgtagttgcactgttgcgctttgttctcctagaaaatacctctagcctttcttcccttcatggaggaaaggtgtttttcaggtgcagactgacagactttaggaagtttttacacggggttatgaaggaaagggattgctctaggtctcagggaggtagggctgctgcagggacccagacgggttttcagcgaggttggcagtaggtattcagctatatagaagtggaagtcaaggactttccaattccaggggctcattttgatgctgaaatgggggcggggcatgagtcctaagtccaatttggctatgggacattatgactgtgatgctatgggcaggatgatctgtggatattagattttcttaaagagtggtgtgaaagaaagggtcatatattggatatggggtcagaactgaactttagttcatcataatagctgtcctttgattacaactgtgcttccagtgtgaccttgggctctaccgtggttttctcttttgtaaaataagggtcttgccgttgattccaaatgggaatattttggtaaatgttccatgtttacctgaaaataattcatgttgagtgcagtgatccgtctatctagtctggtttattattcatattgatcagatttttaagtgattttggtttgcttattcaataagctatcgagagaggcattaaaaagtctgctatgattgtggatttacctacttttagtctattgacttgtgctttatatggtttgaagctatgttatttgttgcctacagattcagaattctttttttttgtttgagacagagtcttgctctgtcgcccaggctggagtgcagtggcacaatcttggctcactgcaacttctgcctcctgggttcaagtgattctcctgcctcagcctcccgagtagctgagactacacgtgcgtgataagtctcgatctcctgacctcatgatccgcccgcctcggcctcctaaagtgctaggattacaggcgtgagccaccgcgcccggccagatttagaattcttcttatatcctcctagggattgacccttcattcttatgttatgcctcttttcatctctgtgaaagtcctcattgtctgatattactatagctacattccagctttgttttgggtaatgtttgcatgttaccttttttttttcccctgtactttcaacttttaaaatgtccttatgtttaatgcatatctatgagcagcatatatagttggttttttgtgtgttttaagtgtagactgataatcttacaatgagaatatttagtccatttacatttaaatgcaattgtggatgtattggagtttatatctactaccttartttttgtttgtttactatttgacctgtctgttatgtccmcctttttctcacctgttttgccttcttttaaattaatcaaggacttaaaattatagtcatgcgtctctctttttttttggagacagtctcgctcggtcacccaggctggagtgcagcggcgtgatctyggctcacagcaacctcaggcaattcccatgcctcagccactcgaatagctggaattacaggtgtgtgcygccatgcccggctaatttttgtagttttagcggagacagggttttgccatgttggccaggctgttcttgaactcctggcctcaagtgatccacctgcctcaaccttccaaagtgctgggattaaaggcatgagccaycrcacctggccctcatgtgtgtcttaacaaggattcagtccgagaaatgtgtcgttaggcagtttcatcattgtgtgaacatcatagagtgtacttacacaaacctagatggtatagcctgctacatgcctaggctgtatggcatagcctgttgctcctaggcyacaaacctttacaacatgttactgtactgaatacagtagataactgtaatacaacggtatttgtgtacctaaacatagaaaaggtatagtaaaaatatgatacaatctatcactgtcgtatatgcagtccgttgactgaaatgttacatgatgcgtgaccgtgcatgttctctctttgttagctcttatgttttacattcctttacggttcttttggtgatcactcttgagattacagcacgcatcttgacttattacaatataaaaataagtgattatttttactacttctccaatgatgctaataccttagaacactttttagatattaagatatattaaacaccacaagaattatttctttgtacagcccatatgaatttagatttacccacatatttgcccttttttgtgtttctttcttcctgcatttctataattttatttggtataattttctttttctctgaggaactctcctctctcttacagtgtagtctgttaatcatgaattcttttagtttttatttattttttattgatttattttttgagatgaagttttgctcttgtcacccaggctggagtgcaatggcgtgatctcgactcactgcaacctctgcctcccgggttcaggtgattctcctgcctcagcctcctgagtagctgggattacaggtgcatgccaccacacccagctaatttttgtatttttagcagagatggggttttgccatgttggccaggctgatctcgaactcctgacctcaggtgatccacccacctctgcctcccaaagtgctgggattacaggcatgagccaccacacccgacctagtttttatttttttgaaaatgtcattatagctgggcacggtggctcatgcctgtaatcccagcactttgggaggtcagggtgggtggatcatgaggtcaagagatcgagacgatcctggctaacacggtgaaaccccatctctactaaaagtacaaaaagttagctgggcgtggtggtgggtacctgtaatcccagctacttgggaggctgaggcaggagaatcacttgaactggggaggtggaggttgcagtgagccaagatggcggcgttgcactccagcctggatgacagctccatctcaaaaagaaaaagaaaaaaaagaaaaaagagaatatatcatcatactttatttttttaaggtatttttgctgggtagaatattcgatgttgaaaatgtgtttcctttgatcactttaataatattcctctattgttttcttactttgattgtttttttgaaaatgtggctatcagttatattgctgcttctttgaaagttatgtcttatttcttttctctggctgcttttacgatttcctttttgtttttgttctctagcagtttgactgtgacatgcttgagtgtggtttgctttgtatttattctgcttggggtttacagagcatcttgaactgtggcttccatcagttttggaaaattttgatcatttcttcaaatactgtatctgtactattctctcctctctttctgggactccaattacacatatgttagatcttttccctctgtcccctgtgtctcctttgctcttttctgtattttccatgcctttttccatttatccttcagtcttgcaggtttagaggagatgacttatctcctctgtacctatacattgagaaatggacacctacagaagtgagactttaatggatagaggaggcactagagaagacttgccagaaggagttgagcactgctttgtgcatagctctgtggtggttcctggggccttcacacaggaacttacaatccacatcattaaggcagaaggggagagaggaaaaggggagagaggaagacaggaaacaaaaagtaaagaaagaggaagcaataatattatttgattctgtgtagaaaggattttgaaatttgacctgtgaaaacaaggagatgctcatatgagaaaaagcaggtcagtgggccaggaatgaagagtagagggaatggacctttgggtatcctattatttttaaaaggtaaaaggttgggggtcccttactcccagaaaaatactttgcttttaaatatagcttatgagactctattgggtttcctaagaggtaaggtaactctcttatgttagaaaacaggcattgcttaggctgttggctcttgttgcttaatttcccaaagatgccagtacacttcggatactgttaatacaccagcagcaaagctctctctgggaccattgtgccccatccccccaaacttttgtgtccctcatctcagtggtaaaatttaaaacaaacattgggtgaatgggcttggggtggttatttttaaaattttgcatgtaaggacatttaaaacaaagcagcaccactttataccatcactttatttatcttttcaaaaggacattttaacagtgcaaaagtataaagtacgtgctttaagacagaggagaataaatggaataacttagttttgtgaaagactcacagtatcacttggtttctggacacggttcgagacctggctgtggcttgctgtggccttgagagccatcccacagcagcaatgctgttggaccctttggctgggaccttcaggaccccctgcaacagcactgtgtgccctaacctgctggcatgatgcccctttgttgacagggctgcatacaaggccagcgacaagtggcaggcagtgacgccagcctgatttgctgagggcacacgccatgcttcctgcagtgccagtgctcttctgggtccactttgcagcaggatagatgtgttctagatccaagagttctgcaccctcagcaggggtgcgggagtgtagttttttgccttctcaggagcctccttggaaaggggcttttctgtgtatttcaggagctctgtgttggagatgagagaggttcttattctctcctgttacagatgaggaagctgagccaagaagaagcatatggcccagggccatatggttatttgtgacatccctgggactagagcccaggcctctgtggtgtgtgtggaagtctgagcctggccaggctctgtaattaggccccagaggggctatagggcttcccttcccccaccagtccagttctgggaacagagggacagatcctgagaacctgtgagagcagccgctaggaactcctytcgccttcccgtgccccttcctgccatgctgggggctgcagccccctccccaggccccctgtcctcccctgaggctgggggcagctggaggatgccaggtggtgatagagaaagactgaacactggggattcaggaacaccttgaagcaaagggaagcctcctgggctgctgcattttctgtggggatttcttgtctattagatgaggattgttggatgcctcagtaaaagctgggcttagcgcagcgcctggtttatagtttgctgctgtttagctgtatctttacccyttgctggtagagaaactcccccgagcccttctctgtaaacaggcctagtttctggcaggtaaagccaaagccccaaggaactttacttactcacccctgcccttaagcacttttcacccagcctgctaggaagggccctgtttgttggaagttgtttgatgttttgctttttttaacctcctggtgtccatctgggcagaagccgagtgactgcccacaggagggccctgtttggctctgatgacctcctagagggacttttgggaggatggggccttgtgggggactgggctccagaagtcataggaggttggcctgcagcctgtgttcctgcctgggggagagcctgcccctccctcccctgtcattccttcattgcataacttctctcggagaaacatgtcagaagctttcctggaacaggccaggagggaagcaaggctgctcacagtggctttagagcctggagcttgtgctggggctggttttcctccaggacgaccttgctggccacgtgggccaagccgggggcgctcttagaatgtggatctgagcagggagaggtgtgaggtgtcctgagggctgtgggggtgccgagtggggtcccacgaggaccyggggagtgccggctgaggtgctcatcttctggagttgcctccagtgctggctggttctaatggagggcagaggctggcctgggttcctgagcaatgcrctgagtctggggcgggagggcctcagtttattctgggttcactggtgcaggagctcgtgaggccaaggtcagggttgctggccagctgggctggtttctgtcccctggggagcctgcctgtctgtcagtgggcagcgccttggcctggcactgggctggtcggtcctgagggacgtgtggggcctgaggcctcctctgtggaatgttcttttgktcatttgtttaataacaggtccttgccagtggagagctgtgtgcctgaaagtggccagagaacagtttgaggggggtcctgatggagggtgatgagggggacacacctctgcctgcagaaggaggagctcaatgtggcccaccctacagctgtggcatctccggtaacctgtggatccacctgcccctctcgtgggcttgtctctggacttgcttcaggcagagaagaatccagacacagagagacattggtgaaggtcactgcagtgcacaggctaatgttgcctgtctccgtttatttcgctaagtcagatcgtgtgctcgagtgctggcagggcagaggtgggcaggcatcagggagttaatgtttaaacggggactgtgtctcccagctctgagcccagggctttctacagcgagagaaagagctgatgtacctgccaggcacccccrtcccaacacagcagacatctgtaccatgtgtgttgtcactcctgagggccaggaggctcagcttatcctgccccatgctgcccagtacggagccgccagccgcacggggccttggaaatgcggcyggtccacagtgggatgtgctgagtataaaacacacatggtgtttggagactttgtgcacacacacaagtgcaaaatatctctaataatatttattttgattacttgttgaaatgataacattttgggtatattaagtaaattatactattagaattcattttgcatgtttcttcttgcctttttcagtgtggctgctagaaaagtaacaattatatgtgtggcttgccttctatttcttttgttctgcgccggcccagcctttttgaatagagtcacgagaacaacagcagctgcttgtgtggcctttgtgtgttcctggcccggcgagtgctctactcacgcccgcacgacagcctgtgaggcaggggctgcccagactgctggggacgtggagggtgcactgttgcccaggtgtgggtaaaaatgtatcgcaaaaacatttttttaaaaattgagttgtcttctttttagttttaaaatgtacttttcattaaattttcaacaagttctgtatttttcataaaagtcatgcataatcactgtagagaatttggaaacatgcaagcagatgccagtttccttgcgccttaaacagagcgtcctggtgtgagcccwctcccccaacagccccctgctgcgatgttgcctggctgcmgggcagtggggctgtggcgctgcgatgttgtctgactgcggggctgtgggactgcgatgttgcckggctgyggggctgcgggactgcggggctgtgggactgcgatgttgcctggctgcggggctgcgggactgcggggctgtgggactgcgatgttgcctggctgcggggctgtgggactgcggggctgtgggactgcgatgttgcctggctgcggggctgcagggctgcgggactgcggggctgtgggactgcgatgttgccgggctgcggggctgcgggactgcggggctgtgggactgcgatgttgcctggctgcggggctgtgggactgcggggctgtgggactgcgatgttgcctggcttcggggctgcggggctgcggggctgcgatgttgcccgggtgcggggtgcggggctctccgaggccggctcatcgtgcggccgctctggtctcagccctgccggccatggtcaccgtgcccagccaggtgctcttcaccctctttctgctcacccatgcctacccggaaagccagctacagctgggtataaaggaagagaatactggccctgggtgaggtgtggcattagtggcaccttctgggctcctgggcaggggtggggagtggctttcttgagcagctgggatcattcattgactgatttttggataaatgaggtgttagtggaccttgattcggaagattgtgaaagaggataatgggaaggcctggcaccccacggtcctcagatgtcagtgtttgccagccccgcagaaagggcaaggtgggcgagagggccttccattacccagcgagggctgcgcctgagccccgcgagttcccctggcttggattagggggagccaaaagtgttctcactctcaccaccaagtgctttgtatgcctgtggcaacacctttcctgttccagtgaattagggaagtctaggtgatkggaggctcttcwgacagacctgaagcgggtggttgtgttctcagggtgccctgtgtggtcggggtgacgttggtctgtggaccatccctggtccgtcttcccatttgtgctgggtccttcccaggtgcttcccagctggcattactttggggtgtccgtgtgcccgtgagcctgtgaattatcaaaggtgatggtgtggagtgggggattcctgaatctttttcactgaaacacctacctcgagccaaatgttctcttaaaacaacaggtggcatctcccaccttgttccccacttttcaaaatgctggtgtggcagcgagggcccctggtgcaagcggtgtctgtgtggtgctgccccaggccttgtgggtgggcgagcrggtggccccagccctgcgtgagcactgagtgcccgccccctcctccttgcaggtctggccgtgggcctgggcttcggggcactggcagaggtcgccaagaagagcctgcgctccgaggacccctcaggtgagccgggcccttcagtgggaggggcagggtgggccccgggagggttgagcctgtcagcccccagccccacctgtgctctgggagtgtcagccagctgggccgcatttgcatggggttccaygtaagtggcgtccstggggtgatgaggctgttcatacagacagattgacctgctttagagggggtgaggctggaggcccttcctcctcccagcccaaagtggccacccagccccttctttttggctgcctgcacayccacacgccttctgcacacctggacaccttacacaccccctgcacacccactgaacacccacacacaacccctgcacacccaccgaacacccgcagaccttaccccttccacacccagcgaacacgcgcacaccttacacaccccttgcccacccaccaaacacccgcaccttacataccccttgcacacccactgaacacccacacacctccttatacctcctgcacacccaccgaacacccacagaccttacacaccccttgcacacccaccgaacacccgcacaccttacccctgcacacccaccgaacacccgcacacgtcacacaccccctgcacacccaccaaacacccacacatcttaccctccacacacccacgcacctttttacatcctccacacacccacctcatacctgcacacctccttacacaccctctacacacccaccacacacacctgcttacacagcctccgcacccactgaacacccgcacacctccttacacaccctccacccacccaccacacacctgcacacctctttatcctccacccaccctccacccacccgaacacctccttacacaccctccacataccctccaaacacccgcacaccttgcacaccctccacacacccacctctcacccacacacctccttacacaccctccacacccaccaaatacctgcacacctccttacacatcctccacacacccaccgaacacccactgaacactgcacctccttaccctccacacacccmccacagccacacaccaccttacacactctccacacactctaccctctacacacccgcccaccttacactccacacacccgcccacctccttaccctccacacacctgcccacctccttacacaccctccacayacctgcacacctccttacatcttccacacacccacctcatacctgcacacctccttacacacccacctcacacccgcatacctccgtacacacccacctctcacccgcacagctccttacacaccctccatgcacacacctccttacacacccacctcatacctgcacaccaccttacacaccctccacacacccaccaatcacccactgaacactgcacctccttacccctccacacacccaccacacacccacacaccttaccctccacacacccgcacacctccttgtaaacccaccttttgctgctgccctgctctctggaagtcgctggtctggccgggtcaggtgtggctggggacaggcgaggtgtgcaggcagaccctgcaggcttctcctcaccagcttagtaacctggggaggctgtagtctatgcagaggcacctcacctctgacgtgaaggtcacagccagggtcaggcaggtggtcaggtcaggacactcatcccactgaggttggtggcccgctgtggccgggccctctgtggagaggtcctgcgaacggaccacgctgaggctttgggcattcgtgctgctgtgatgaggagtggggcgcactgagtccctgccgccttctgcctgtgaacaccaggccgggctcctcctcaggcctcttcaggcacggggggcgggccaggtaggtgcgaggtcagcccagcaggggctttcctgttagtggggcctggggtgtggagagcagtgccaagggaaccgtctgcgtgtggatcttcctcaatgcctctggagttctgggccaagtcccctggccccggcccattcagggaatgtcagctcattctggtatcacgcccttccacccccgtccatggggacccccagagacacccagtgtctggccacactgcagccctcacagccctgtcttccagcctgggctagcctcctttgggggccctgccagtccccggacagccccccttcacccaccaacgctgccttctggggcaagggcactagtccatcccacaggcccggactgagtcctggggacacgggcggcatgcacgtccttggaaggggctgaggacggagggcttagcaagggtatttttagcgttggtgctgacactctctgggaaatgaagcctgggtttctctggaaggagaagccagccttcccctactgtcccctactgtcctctccaaagctggctgttctccagactacctcatccaagcagggaagaggccaggctggcttcacagttacagctagtgtcctttgtcagggacagtggtgaccccaggctgggggttaaggggcccaggcattgttagccctgagagggggacccgaggcttaggctggagtggggtggccctgggcagccccaaactgtgctccagcttcctgaccaggccctggcaccctctggactggaggacaccggccaccctggctgagctctgccctggaaggacctttcctgagctgggggcacactgccgtagccctgggcccatccccacttgccaggtcattctcacagccagccctgcctgggtgggggacatacctccagcctgtggcattgaccagctttgccaatgggctacctgggaaagcccggattgggccaggcaccgttcccatctctcaggagtgctgctgctagcctaggcctactctgtgtgtcatgaggagacagactgtccctcctctggcctggggcagtggcctctcctcaaggtttgcctctctgcctgcccctccccagggacccaggcccaagcccccagcccacaagtaccacaggcctagggggcagaggggacattgactgcctttcctttggtgctggcgtctgctgctgcctaaggcaagggggtggccgagggacccttctgggcccagccctcttggactcgctctgcccatgggtcatagctcagcctcccagggcagctcagcctcttcccgcagagctaacatctcccaccttcacaggtcccttcctgctgtctgggaccctggagtgagcctggcccctttccacgtagctgcctgcatgtgtgggcagatgcgggtcttctccgaggctcctcttccgggcccgcagggcctccattctcagggcggcccrccccaccctggtttctcaggggccaggctgcacccggctccggggcagagggcagtggcacggtcacctctctcttcccctgctggggacctggctccgtgccacccgagcgctgtgccaggcctgaagtgatttgaactgaggcaaatgctgggtgctgtgggggccagagaggaggaagccgcactgcgacctcttggggcttgagatctaactagattcacaggacagaaggcaggagaagctccgaatgtcacaagggctggaggcccggcgacaaggggtgctgaggaactcagggaaggtggaaagacttggagccccagatccctgctcaggcctctgtctgcctctggataggggcacctccatgtctaggcagcactgaactgatggcccaggataggggggaagctagagaggacccagcagccctgggccacacgcctgctggcagttgacttagccggccttctgctgctcctgagtcgcggccctcagccctccccttggtggactggaaaaaggccacctgcacccttggggtcactgcatgctcatcactggccagctggctgcactgagctgcagggggcctctgtgggtggacgggagagacgggcacccctgggctgtgctgcccttggcctgagcgccsttcccttgaggacagccctctggctgaagccacttggccccatgtgcaaatgcatgccgaccccacaggtgcagcgggcctttgtgcagtgccctgggtgggggtgcacagggcaaaggctcggcacctcctcacctggggtcctctgggtccctacatccctcttggttcccactcccacgccccttccagccacaggcagcaccatggccctgtcacggcccgccaggtccccatatggaagggagaggccctttgtgtgtgtgcgtttgtgtgtgcacatatgtacgtgtgcatgcctgtgtgtattgggaggcgctggcgtagggcctgggcatgtggctcacacaggcttggggaggtggacatggaacagtagttagttatgttgctggttttatggacgcctgggaggaaggacattgtctgagcctccgtctgtatcaggtggggcttgccatcccactcccagacccccccgagtgccgtggtgacccctcttgcccgcccacagggaagaaggccgtgctgggttccagtcctttcctgtccgaggccaatgcagagcggatcgtgcgcacgctctgcaaggtgcgtggtgcggcactcaagctgggccagatgctgagcatccagggtgagtgggcgcgggggctgctgccccgggactgcgtgggctgctgggggggtcaacttccagggccgggagcagtggccccaccaaagctcagtgggcaagatgtgagcaggctggggagagatcttagaagataataggcctggtctccagacgggtggctctgggtccaaagaaacacatggaataaagagcagagaggaaaaattgctctctacaggtggtcagaacacaggtcatttcaacattttactatgttttattttccaaatttcttttgtaattatgaaaaactctgcatgttgagtgtaaaaagcccaccttctcaggtcactgggcggaggctggggctcccgggaagctgagtggccgagggcgtgtgtgcgagggctcctgtctttctggcctcacccgtgctcctggtggggagggtgtggtgsccagggcntcccaggagtgtgcccgcccaggtcctgggcgcacactttaatccccaggttygccctgtgtcattctcctgccttccagatgatgcctttatcaacccccacctggctaagatcttcgagcgggtgcggcagagcgcggacttcatgccactgaagcagatgatggtgaggagccaggggctctgcccactctctgtggcctcggcccccactgggtggaggggacagacttggggcttctccsggtggcccaggcagggcatgctcagagcccctccctggccctgcccttcagaaaactctcaacaacgacctgggccccaactggcgggacaagttggaatacttcgaggagcggcccttcgcygccgcatccattgggcaggtgcacttggcccgaatgaagggcggccgcgaggtggccatgaagatccaggtaggcggcctgatgcgcagtgcctgtccctaygggggctgcaaggggcagagctggggcctggctcatggaggcctctacaccccaygtcccgcagggcaccctctctcctggcagggccatatgtggtgtcttctggccccagtgcctggacggcaccagaagcttgggaagtatttgctaaatgagtgactttgggggcacagaggggcccccagcaagcttgatttggggtgggcaaggacaggggacaagtgattgctttttggggccagagctggtgggagggtggccgtgagctgttcccaggggtgaggtgaggcaggagtaggtggacaacgaggctgtgatggggtccaggtcacggcagcatggctgggtcttagctctggttctccagggtgtgggctggggccaggacacagctgggaagccagttgggggttgggggagtgccccaggcagggcccacccrtctccctgggctaactcccctgcctcacccatacccccacagtaccctggcgtggcccagagcatcaacagtgatgtcaacaacctcatggccgtgttgaacatgagcaacatgcttccagaaggtctgaggctaggtggttgggtcaagggcaggagtgggtggcaggcatctgtgttgggttctggggaccagagkgggwcctccctgcagagcccccttcctcgctgatgccctcctccctggcccaggcctgttccccgagcacctgatcgacgtgctgaggcgggagctggccctggagtgtgactaccagcgagaggccgcctgtgcccgcaagttcaggtgtggcccccggccgggccccttgcgtgtttgcaccagggaggcagaagggaccatgttcagcagctggtgaaggcccctccagctctgaggggcagagggctggggttgcagcctgggccgaggccatatcctgcctggggtgaaggagggccctctgcctggttggggggtgtgtgtgkgbggggggacggtgtggagggcctgtggctagggcgtgacctccctcccctacccagggacctgctgaagggccaccccttcttctatgtgcctgagattgtggatgagctctgcagcccacatgtgctgaccacagagctggtgtctggcttccccctggaccaggccgaagggctcagccaggagattcggaacgaggtttgtctgtgccagcagacasgtggggccagggtggccctgctgtgtggctgtttggtgacctaatagtgtgagctggggacttgkagccctgaggtgctccctgggggtgaggggcagtgaagtagcaccagtgggacttagggggacacaggggagctgctgccttccctggcccaagtaacactgggaatcaaacagtccctagggtagggtgggtaaaacaggaggcaggggcttctctggccccagtctcccagggcaccaggcagtgtggtgctgcctgacacagacccttcrcgctgtccacagatctgctacaacatcctggttctgtgcctgagggagctgttygagttccacttcatgcaaacagaccccaactggtccaacttcttctatgacccccagcagcacaaggtgagccccagggtgggggcacccgcagccaggcctgagagcttctccgaatggggcacgtgaggccctggactgccccttgtcctgggaaagtcagcagagagctcagggctctgggagtggggatcctcactgccctctgttgcacccccttcccggccycacacacccgcaccatggagcaccagggccaaacttctcctggtgtctctgtccccaggtggctcttttggattttggggcaacgcgggaatatgacagatccttcaccgacctctacattcaggtaactggagaggggccctggccttggtccatgtttttctgaggctgggacaggatgctgggggactcggggtagggagaatgactgggttcctgcccttgtgtccccatctgcgctgcctgcccctcaggtctggtgacagcaggcagttaggctgacagctgccaggcgtggtgtcacagcactggccgggggccctgtgcagggagaggatgagggtggggtgggctcgggtgtggcacttggctccctgggatgtcrggagctgagcttttcatgctgcccwcggtccsctcctgtgcctctccccagatcatcagggctgctgccgacagggacagggagactgtgcgggcgaaatccatagagatgaagttcctcaccggctacgaggtcaaggtgagcagggttgcgggggatcccctgggcctgctgacccagggcccggctccctgtgtaagaatggatgaaagcacagggggcagctgccctcaaggggcccccagagcccgggcctccttgggcacggtctgaaagctggggcccaccccggcccatgctgccctgctgagcgtgagattttccgagtgggccagtgagttggggacttgtcgtgaagctcttgtttctgcctctcactcttgcccacttagggcttggggttgggcctcgattgagccaacgtgcagagcaagtgggaagggaagccccagccctcccctcatcgagcctccctggggggagttggaagaaaccttagaagccttttaaataaaggggaacggtctgtgctggtgccgcctgaagccacccacaaagtggcattttccgcttsctgcttgacagtggggaaggagttaaagaaatccaggtcaagccttgggtctgccgtctyataggagtgtcatttgaggcttgtcagtatctctgagccccccttatctcagctgtaagcgctcagcgggcagcagctctctcccgcctcttccttatggccactcgcactgactcgattcctggccgccccgtccctctgaccaccttgggctgtccctggcggcagctcctctcccctgctctgctggcggcggcttccttaggttgctagttcccgtgggcagacacacggctgctgggtgtgtcttgggtggactctggcaggctcagacacgcatggtgggaggccctgccagcttaggcccacggactctgttctttttggccagaacagtgttttgttaaaactctgtatgagtgccacgaggcgggacgcatcctctgcactctgccacaggccccgccactcccttttgtatcacatcagcccagtccatgttaccctcgtgttcccggcccctgtgggtttgagtttatgcccattaccatgatgtaatccagtttacagcagagctytgaatgagaactcagcgccccgggcactgtgggaggaacccgggctggtggagggctctggtgtctsgcygccatttatccttcctctcytgccccaggtcatggaagacgcccacttggatgccatcctcatcctgggggaggccttcgcctcygatgagccttttgattttggcactcagagcaccaccgagaagatccacaacctgattccygtcatgctgaggcaccgtctcgtcccccsacccgaggaaacctactccctgcacaggaagatggggggctccttcctcatctgctccaagctgaaggcccgcttcccctgcaaggccatgttcgaggaggcctacagcaactactgcaagaggcaggcccagcagtagggctgcgggccacgcccaggccggctccgcgggaactctctccctcagacaggccaaaaaccagtagcgaggtcgtggtgatgctctttttaactcctttgcccaataaggggggtggctgcctggagccccgtagccagcgctttccacggtttctgttgctaaatggttgtagggtgagaagtgcaagaatgaagatgaagccccactgctcggtcagtctgcctccgtgtgtcctctgaaataagcagatgaagatgaaagggcaactttgttttcttctttttcctgatgtgaatgttaagcagaagggagagagtccttactcccttccaatctctgttcagtgcaaaacccagaaacatgaacagatacgattgtgggattttatcatctgtgtagtaggtgtgtgtatgtgtttctagagtgagatttgtgttttstgcccttttcctctccagccratgggctggagctgggagaggtgctgagctaacagtgccaacaagtgctccttaagcctgcgaggcccaggcctgtggggctggttctcacctttgacagctgaatgttcctaaagaactgctgccccacagtgagggtgggagcagcggaacagggaatgccagacacaggctcgctgctgctggaaggcggggtgggacttccttcctctgtccrgagaggcacaggtgtcaccagttccagccaaaggctcctcacaggcgctgtgaatttttgtacaagtcttgtaattatcgaatcaacaacttgtttcaatttaataaaratgctcatgggaagtgctttggcgygtgtaccctcttctgtattctggagaatgacgacccgtatcttctagctcgtggtggtggttcttttctgacctgacggtcagcaggttcagtgtcacagcccatttgcaaggkttgggactggttcagcgtgaggcccttggccctgaacctggaaggctcagcccygttccctgtaagaagggaggtgggaggggtggagaacaggaggagaggttgyggtgtcactgccccagcccccgggaggctgtaccacactgctgaagctgctgtacctggtgatggtggcaactgggaggacagtgacacctgccagcacggctgatgccaggtctgcatcacagtgagacgtctcctctctagacatcagctgcagttgaggaccacgtcctgaaaagtggcttttcctggggccagactgattcctagataacaggacacactggacactgagctggggccctttctacggacctgtgagcagttgaaagtgcatctgcagaatgcacaggcccaaaagaggctttgagaggtataggctttcagggytcttaaagaaagaaaatatagtttctgaaatttgggattgccgagtagcagacccagtgggctccgggacaggatggagaggcctgggtggcgtccgtgaggctgcctggctagcagcggcgcccagcaccactgtcagatccctggctgaaactcttgtggccctcttcttaagggtatttgctgttgtctagcaaactcctctgcagcactcagatctgaagccatcgccctgcagagtaaacagcaggggaagaacccaggccagccccagccagggctctcacagtctcctcttcctcttgaacaacaagccaaacaagtcaagcagcagcatgcggggggaagggagaggagaasaacagcagccagcatttgcttccccaggaaccacgaccataactgctggaacaggagaagttttctaagggaaaactggaatgtggtttgtgtgtcctaagtctgagagccggctgagaactagagccctccctgtgaagacagtggggatcactggattgcaaatgactttaatccccaagtaaagctggctctgaagctggccacacatacttattcttttgtacctattttgatttttacagtattgtgakgaatgactccccgtgctcacccattcacactgagacatggggcatgagaacatggcaaatcayggcttgattttcccagggtctgtgtcttcgtrtccctaacatctagtgaagggctggacaccacacaacaaaaaaatatttgttactgtaggctttggcggttactcataaggacaaaacactaaaccataggctagaagttagattctgagtgcattaactcctgacactccaagtgggcctttttacagagggaaaaaaaaaaaaaagaggcccagaggttaagtggcagaatgaggatttggaacaagacagtctagtcttacagtctacactaaggggaccaaacgaagggctggcaaactatgatggtccaagggccaaatctggcccactgcatttttgtaagttttattggggcacagccactctcgtttatgtacgtagcaggctaagactgtttttgcactgaaatgccagagccggggagctgcagcaaactatatacacaaaggcacaaggatttcttaactggtcctggacagaaaagggttgccaagccctgttctaaagcactgcacagctgacactacagtaaaccaacataacagtatcagccacaaatgtcaattccatgggccaytggaaccggaagtattctccgaataactacttagctgccaccagttcaggagttcctttaaccccacccctggaccttccctgtatgttcttagatgaaccattctaactccagaaaagcagtaacagtccrtcttgtttaagtgacacaaaatcaaactgctyccacattcacactgtcagggccactcaggaaacctcacgcagccagggtttggtcttgtggaccgaartaacagcaacagcgaagttctggccagaagaggggagttgaaagcttcaggagaattgaacatcattcttacccgagctaaggaagaaattaagaaagtcctagattaaaccacaggggcaaactaacyccatgtccttttacggcataargaagcagcctggatgaggaaggaggccagcagaaagaagagaagtgacaggcggagaggtggcacctttctctatttctcagactttcaagtggggggaaaagagacaaaatactcaatgctaacagttctctgttttattgcaatacagcaaagtctggttaatattaagtgatatcaacataaagtattggtgaggagtcttttgtgacattttttaccatcccaccttaaatatttctgtgcaaaagaatccacatcattgtttggtagcagaggatctcttawaaagttccctaagacactgagggcataaaaccaaacaaaataaaataaggagtgataggctaaagcagtatcttcccctccatccacatttgtcagcattatattctaaccaaaaaatgatcacaccaggccatgcaaaactgtacaatattacgagaaaaaccctaaaaaatttataaaatgaatgatattacactatcaaataaaaagacaagtcattttgttttcatgagatttcaaggttgatttgagtcagcttcccccggaactgcacggtgtcctgtgtggggagggcccagcgtgctgccagtgctggggggcagggcttacactccttatctagcagaagtgcacagagaactctggacttgagtaacaaagtcataaggaaagagrttttaaaatgggctccatgaaatgcagctcatctagttcagggctgggccagagagacgggggagtggagtgcccaattcattccctgttgtgctcaccagacatgggctacggcaaagtctgctctgagcgcccctctgtctagattggatggggagccttaggcttggcaaggcctacctgctgggagactgcagtggttgtgatcccggccaaaggcggcaaatggccctgctgcgtctgtggttttgacctctgctcacccctgctctggcttttccttaatgatacctgagatgccacataaatgtaaccagtctttctcagaaatagacgtggccactaagtaacaaaatgacataattctaacctatggaaggagagagaggctgagagctagccaggaatgatagattgttgctgtaaacatgacaggaatttcagattctcccctgaaatgtgagtacaataattggctggaaaaccaaatagatgggctccttttagttgtatctcatagccttaaagctgtgctccctaggaaataacagaaatcactaagtgtgttggggrtgtgtataaatayatacataataacaaaaaatgtaagatctactttagcaatcatttgacaagaagcaagacttttgtttttggcaaaaagaatatatatgtatgtaattttaaatacccaaagcacaaacatgattagtcagaatttgagggtagataacttggctggacatagatagcaccaaatactaacacagatagactatcccagaaatgcctctgaatgtattttttctattgagaaacargtttctgctgccayatacgtttttaaaatgtcctgcatgaaaacaaaagaaaacttcagatagtaataaaatactttatctgtgagctktgctactgaytcctctraatggtcattatgttttctttgcctagaacccactccctgtcttttcacatcattcttctcagaagcttctggaggtaacaggcttcatatttaagggtgggataaacccagtaggatgaccgttattttgggaaaaccctccccaaaactattccccctggcagtgtttctctcctaaagccctgcttttagaatctgcacgcattcgggactgctctattatgactgatgagattacttgccattgcagtggaaaaatcaaagagtgccatggtgcaatccatggggtgaatatggacaagycgcccagttagcctggcaacctagacaagcctcagtagctctctctctctgccctgttgggaggctgaagagtatgacccatagcagtggagctagactttaggtagggttattattttgatcttaaaagcatcctttgcaaaataagcacctataagcaacaaaaattcataattacttgtcaaagctacaaactaatggcttatgtcaagtcctgttaatctcggcttgggatggcctcctccctgcctgagaagagaagggagagaggagaaggcaaggggaaagggaagaggaggatggggagggtggggatggggagggtgggaagagtgaggaggagaggaggggagggtggggagagtgaggagggtggggagagtgaggagggtggggagagtggggaggagaggagagaagggtggacagaaggggtgcgagctggtcacgagcaccaagcagggggccggctggctgactcccttctctcacgtgaggtgctgaggacaaggatctmccaagtcatatgacaatgatccaactaaagggccaacccttggtattcaggtgagaaaagtatttttatacttcattctaaaaagcagaaagatttgggagattagaactgtgctgtgaattacacccatccaaaataaaatataatcaaatctgagctggcaccaaactcagaatgtttaaatgtcaaagctgttacatgaaaattcccgattataggtgcttacaatggaatccccagcaggatcctttcttccctcactgcatctcagaaccttctccacacagcagcatcacctggaaacagcctcagctccctgcacatgccgcaggccagcatggtggccacctcagtgacacgcaggtcacctcagtgacacagacgtggagtcacagacagcagcagtgaaatgatggccttaaacactgcaactcaggttagcaactgcaggaaaactttcttcattttcactgaattttaaagagagaatcctgtctctatttctcagagaaacttaggtgaaaagtaaaagagaggcaaaatctctttccttcatgagatacttttatttttatctctttctctactcatgtgcttaactggtgaaatgattctgtagaaatagatccttctgattctgcatctcatttccttatggcaactacaacaggaggaatccagctggaaatgccactaaccccacaatccagcacctgagagaggaagccagtcggagcgccgtgctgggctcactcactctggcctgcgcactggggttgtcacatccattttccactggctatggggaataatatttggttaaggctgttgaagcccttgcttttgaggttttacattatttggtaatgaaagccgttttttcttccttccccaggcttatgtgaagaagcccacgcccactctcaacaaaacagactcctccttgggaagcatctccagccctgggacagacacctcgctgygacttagggagggacaggattagcccaggaataaaagcatttttagaaattgttttctgcaccttcagaagctacaacactccttgtamcctttcagatggaagggatcagaggtgacagaaycgtgtatttctacatttatctgcggaagataaaatacaataaaaagtgagaagtgttcaaattccaccactaggaaaagaaacatcttgggtagagatgagttcgccttttgctgctgctgctgaagtggcttcaaatgttaaagctctggtgcccagggcatgccccaaaccagcaaaacctggctctgcaagtgttttctacagctccccaggtgactagagcctatgaccagtttgaggacagggcaataaagggaactc

SEQ ID NO: 9879 - DNA, 13451 bp, Homo sapiens
ttattttttagctgatagtcgaagtcctcataggactattagcgtatcaaaggcagtattgaattagagcagttgtttgctttgggtcttagaaattcccagagtttagcagcagaacatagaatagtgaaagtgggttcttagatggggacagccaggacagggtgttctaaatcacattcaagttttgcgtatatgactggagtagatggagatgggggaataatgaagttatgactcaatcagtcctttcatttcattctgcttagtgaattttgaataaaagaaaacctgtgaaaaaggaagatttaggaagatttgtactggacccttgctgctattatgcagaatggtacatgggaagaaaggatggaaaaataaatcaagagcatcgcttcacttaggttttcagcaaacattgggatagctgagacattttttcattaaaggttagcttgccagaaaggtggttgagagtgagtgaattattagtatgtaggtactatgattgttagattatcattaaacaggaagtagatgactggatggagccttgaagaattactagagtaggaaaggtaatttagtcattgatgtgcaatctataaattccttgttatttgaaatttgagtgttatttatatagggatttgrgtaaagtaggtttatgggaactaaaatgtaatctaatgaggtaatggtatttatcagaaggtgatataattctcacaacaatcttattacctggatacttgtataattcccactatacaagcaaggaaactgagttacggggaagctaataaacttggccaacaatatacataaacacatggcatggcagggttttagatcgaggcattctgattctacaggcgaccttcttagctgctctgctgtgatgccatgggcagagaaccacagtttcagaaatacatttaccagcagggacactcgaggtgatctaattcatggccctcattttagaaataataaaagggctcttcgactgcgactgaatggcttgttttatggcttacttaccctgggatggaaaaagcattttaatgactctttaatttcctcttattatggatagctgggtagtataggggagtgagagatcatctctgactcccctttttgctcttgtgtaaatgggctctttggctggatctgcaaactaaattgacaccaggcatattaacaagtgaaaagcatatacatcatcgacgtgttcatggggatcttcataagagagtgaatccgaggaagtaaccacagcaagatgcttgtatacttttttgacaaagaacaatgaatttgagaagaaatgacaggacaagtaaactttggtgaggggcaataaattttctaggggagttactgagatatatagaggggtgtataaaactagtggaagataagggttacttcattaagtatatttattcaggtctgttgcagcmccagttctcaatgtctggtggtaagggctgttttctcaccccagtactggaagggtacccctcccagaggaatcttgatggcttactgcatgcgggaagagaaaggtcagctagccccttctgaaactacaattcctccagtgttttcaacttgaaatagtcaataggccattccagcatattttgggatggcatgtccttcactccttcagtagggataatgaaaaaagagactttcctggggcagctataggcttctgctctgaggtctcttccagctcttgcaagtatacccaacatagctgatttttagcttttctttctaagtctgcatgtttttgaggctatcctttgattcttctaggtctgacaaagggtagagttggacatacgttttagtaagatatgtggggtcgaatataggttccactgttctaatggagaccctaagttacatggctcaaaaagttaaaattttatttttctctcatgtaacattttrgataatttgatgattccctaatgttgggacccagtcttttctgtcttaggctcacaactatccttgagcctgtgtcatgggggatgactctgaagctgcgtgcaccctgttcattcacattttcttggcctgaacttagtcactaggctattcctaactgcaagagaagctggaagatgtagtcttccttctgaccagccatgtgctcaaccacaaattgagtttcagttattggagggcagaaagaatagatatggggctgctttgtaggctgctgctcggggcagcctctgctgtgttatttgagatttataattttccttggcttcccagatgacagtggaaaaaggcatagtcaagacttcaagtgcggaaaatgttggcaactctgacatgcaagttcttttccatatasagctgagttatgctggagtattttggttacaaagacttcattttctcacctgtctgaattcctgtttggattttagttactcttgatttatcagcatggattaaaaattgaaaagacttggtattttaaaattatatctgaaatggcagagacagcatctgaggattcctcttgctactataaggaatgagtaatttagtttgatttttctttaaatccaaataaataagatgattaaactcaagataaagctgtaatatctcttatcgtgtcctgtcatttgtcattgctaccatgtcttgaaagctttgtggaaaaataatggttttgatatttgttattgagatagaatacccacaaataggtatttaaaatatttttgtcttagccagttgattgtggcgtgtgcatggactaagcaacttaaaaaaaaagaaattggtttgttgaataacagctttcactagagacactaaagtccacaaaacctcagtgagcagttgtcagattccattttaaggaggcaaagctaaactttatatgcgtttcccaccatgtgtaaatccaaacagcaagcaaggactattaaatgttttattttgctagtggcagcaaagaatgtaatgttggatataatatagtttacatttacagttgaagttatattttcaattgtatggaataaaatgaataggtctctatttcatagccaaagtggacaatttatagagtgattttctagaacaccccaatatgtagtgacattttgtggcagtgatgccacatgtaggaartggatctctatagaactttgctattaatgttgcggggtatttgttgcatgatgtagaaaatgctatccgggttacctttcattccttatatctgacttagcttaacctcagctgatggcttaagtcagtggccaagaatttttcatcagctgtccttggtaacatatatcattcatcatactaggatgattggtgttatcaattgaaaaatctaaatggaagacaaaattaaatgctacttgagaagctagagtgaaaagagaatgtcttggctctctaacatttcctctcttttctacctgtattcaatatggccatgaatatccttttggagacactttgaatctcattgtgttcaattacagaggaactcttcagcaaataacccttgtatggtgtgcttctagatagtgtacataagaaactgtgtgctgtaaattctgctttcccaaatgttataaaggtatatgattgcatttttctataatataatatatcatataatataatacagatgtttgattgtaatttaccttttaagaacacatagtcttataatggtatatgggcaggatacctgtggggtcaaaggaaaagaacatgaaccaattttgttttcttagagcctgtgctacctacttttagatactttaatcccagccaactctctttggtataagaatggtttgaacttctgttagctaaactgatatactatgtaatgttcatgattgaattgataaaggtgttttttaaaaactgaaattatgcctcattatgcattgtttaaaaataacttttaaatgattatgaaagtaaaaatgtgttcttggtaaacactrcaacgaagtataaagagagaaaggaaaatgatccatttctcccaaatataaaggtaatcattagtatcattttggcatatgtatttatgtatgtatgtatttattttttctgagacagtctctcgctctgtcgccaggctggagtgcagtggcgtgttctcggctcactgcgacctctgcttcccgggtttgagcaattctccwgcctcascctccctagtagctgagastacaggtgtgcaccaccacgcctggctaatttttgtacttttagtagaggtgtggtttcaccatgttggccaggccggtckcgawctcctgacctcaggtgatccgcctgcctcagcctccgaaagtgctgggattacaggtgtgagccactgtgctgggctatatgtatgtatttctttgtgatggtgtccttaggcttttttcagtactgtacatatagaaaacaaaatgaagaccaaatagtgtgttcagcctggtatcttttcacttgtgagaaatttttcgtggggtttaaagcatgttttttaatgttagcattgtattatttgaccatttcactgtttttggacatttaatttgcttctagtttttcattgttttatatataaaatgtatattgttctccctcattgtctaaatctttctctttgccacactacacttcatgtttcttaggaggaagatttaatagtcttttaagcttgtcatgaagatgaatttttagaaaatgcttgatcaacatcaattttactttaacctttggtctcgtcatcattcatcatattctattactttagcagcattcaaagataatgaaagagattcagataaattcttgttactctcagatcaaattcatttacaataaatatgtgaatcttgatgatcagaagctaaaatacttattgaacctggacatcaagccagatcctaaatctttatgaaaatgcaccacaaattcttcttgttacataatcttttctgtaggttaaaaaaaccaacaaatcctagcatgttgacattctgaagaatatatggctttaaacagtctcttgcaaactatagtactggctcaatgaaatgttatacagcatcagtcaggatttttaataaaatgctgttggttctccaattgaagagtttcattctgtttatgtaatgatgttcatgtttgacctgaaaatacctcctcattctacggcatttcatcttcaagagaaaccttattagtaatttgtagattagaaataaagtcacagagggtagtcaggagaacacaggtctctgtaaacctgactcttttattaaacatactttgccatgaatacttttcattgagctgtttttctacctatttaagatgaaccagatatgacatatttctgtattttatttcacaatcctatggtatatacccccaacacccacacagtggttataactgtaaaatgaaagttttgcatgtgtaacatgtcgtaacattcttatttcactgccttgtttgaaatgcatataaatttaaatgtgaacattttatactattcttttaaagattttaaatattatatatgtataatgctttattagattaatttcttcctgttaaattccctatgaactgtgtaacttgagataaaaatgttacaatcatttaaaagtgttaaaacatgcagtaaaatcttactcatttggattcatttaatttacaatttgtcagaaaattagagaagaattatgtttacttacactaacaggatgggaaaggggtcatggggtgagagttggggagggtttggtaagaaaattcccctaaaggaaatctcaattgcctagcgaattattttatgaaatcatcatgtgtgttggatgttactatttatggagaataagttggtattctaattactagtttcattaaaacagttcccctaaggacccctacctgataacacttttaagactggatccakcctttctttgcggaatcaccatggcggctgggaccctgtacacgtatcctgaaaactggagggccttcaaggctctcatcgctgctcagtacagcggggctcagrtccgcgtgctctccgcaccaccccacttccattttggccaaaccaaccgcaccyctgaatttctycgcaaatttcctgccggcaaggtcccagcatttgagggtgatgatggattctgtgtgtttgagagcaacgccattgcctactatgtgagcaatgaggagctgcggggaagtactccagaggcagcagccmaggtggtgcagtgggtgagctttgctgattccgatatagtgcccccagccagtacctgggtgttccccaccttgggcatcatgcaccacaacaaacaggccactgagaatgcaaaggaggaagtgaggcgaattctggggctgctggatgcttacttgaagacgaggacttttctggtgggcgaacgagtgacattggctgacatcacagttgtctgcaccctgttgtggctctataagcaggttctagagccttctttccgccrggcctttcscaataccaacygctggttcctcacctgcattaaccagccccagttccgggctgtcttgggsgaactgaaactgtgtgagaagatggcccagtttgatgctaaaaagtttgcagagacccagcctaaaaaggacacaccacggaaagagaagggttcacgggaagagaagcagaagccccaggctgagcggaaggaggagaaaaaggcggctgcccctgctcctgaggaggagatggatgaatgtgagcaggcgctggctgctgagcccaaggcyaaggaccccttcgctcacctgcccaagagtacctttgtgttggatgaatttaagcgcaagtactccaatgaggacacactctctgtggcactgccatatttctgggagcactttgataaggacggctggtccctgtggtactcagagtatcgcttccctgaagaactcactcagaccttcatgagctgcaatctcatsactggaatgttccagcgactggacaagctgaggaagaatgccttcgccagtgtcatcctttttggaaccaacaatagcagctccatttctggagtctgggtcttccgaggccaggagcttgcctttccgctgagtccagattggcaggtggactacgagtcatacacatggcggaaactggatcctggcagmgaggagacccagacgctggttcgagagtacttttcctgggagggggccttccagcatgtgggcaaagccttcaatcasggcaagatcttcaagtgaacatctcttgccatcacctagctgcctgcacctgcccttcagggagatgggggtcattaaaggaaactgaacattgaaaaaaaaaaaaaaaaaaaaaagactggatccaattgctgaaaggacttgaaaagaattatagatgcattttttwaaaagtatcatatatgtttagattttactcatccttgttgctttcttaccatttattctagatagtttaatattatatgctttagtgaaagctaacttatttttgctgtttatagagaaattatttcttattataccctcacttccttaatttcaaaaaggaatctctgtgaattattataagttaattcaggatgagtagctttaaatcctttttctttttccttcattataaacatgatatggccttattgaactgtttgttcagtattcattctgatattgtcatatataaaacatagttttaaatggtcaagcgctatcctgtgtagataattttgatgggaaatgtgtcagcttgaaataaatcgatgtttgggaaattgttctcttaaagacggtaatctgaaaatgtgaatgctaaataatgaaaacatttgtacagtttgggggtagatgagttttaatctgtttctggcatctgtacattcttgtgatatctcacagagacctggagtgtttaggttgcaatttgtacccaccttttccatttctattgaattaataatggagccctcatccctctaggacatcaggagagaaaaaaaaatagacaatgtgatgattagcagagagtaattttgattaccctaaggaaaattaagatgatctttataagtggaccgggcaaaatgtggttttggtgagtatggagctagagaaagctagtcatgtttgggcaccttaaggcagagatcatgttggggaaagatattttggtgtcatccaaatgtttatctgtttgaaaaatccatataaatattagtagattatttgtgactatctatctgtggtcatacaaaccataaaatagctagatttcccactttttttcatttatcagggtgaatattttagccctgtctaaaacaatggtgcgcagtggtggggcaatactgtaccactttagaaagtgtttgagtagtaccccacttgaggagtacggcaccacttcaggcactttaggaatttgagggaagctgtggtgtttagtggcacggggagggatcttcatggctagcagtgcctgggggtagtttcccatctccaagaattgtcctgtgccctcyaacttctgaatgtcccatcagagattcatggagctgaaaacctatttacctggctgagaacttagttgttttatatataaacagaaagtatgttttgcatggttttaaagtatactgaattttccaagagtgaaactactgtgtaacaatagcttttgcatttgtgatgatttagcacacaaactcaagattcagactgttttattatgtctgctagggtagttatgtttgaacgtttacataatgagatgccattattttattataaattagcttgttttatttaaatattacacttagggcattatattgattacttttcttggtcacacaggaccatttgcgtgaaatggaaaagagcttgggtggtttctgtacttcatttagtttggagagttaacactgtattatagttttatctccagtgaacaaaatataatcatttttrwaacaaaaaaattaagctatgtatcagaaagcaatatccaaaggtaattattattttttaatttaaattatagatcttattttcctggaggctgtgtgagatcttgcaactattattcagaatattaagacatgaaatactagatatatctgattctcaatacgggttttaggaattgtctacttaagatgtctaaactgtagaatatgaattacgagcttatctcttgctatacggctatagcccagtattgatgttttctttcctacatggaatggaacatggagctagtttctatgggtgcttattgtgaagcaaacaataaaatgaacattatttgcgtaatatgccattcagatgagaaatttacaaaggtatatacatcctgatggagtgataatgctacaaaataagccattaacttgatgctgttgatgttcaggttgccaaactcttcctaacactgccttctggtacagtatttatgattatgaatgtgcagtgcagaactttcattctaccatcttcattaactttaatgcgtaagtagccacagttacccctgccaggtagtagacagatgccatttgttttgaaggcactcttaagatacattctccttataggatggtgaaggtaactgtcagctgaatatacctatattctctgtgtgcmtggtttaaatcaggtttatttgtctgccaactaaatggtgccacaaatggataataaacatgtttatttctaactcttgagatttatcctagtcatcttttggctcttcttccaatcaaaccctgtagcttttagaagataaggagcaggacaagatttatcctgtaacctatgctgttagtcatttagctctaatatacttggtgttgtatttcattgattgcatggatgctttgattattattttcttaaacaataattgctcttcattttaatgaatttattgaaattataagattaatgagtatttctattgagctgaaaatttaatttggctatatcttatggtataactttttgctcaactatctcaatcctgggagaatcagagtctttatctgaaatctgctgcttatattatgcaggtacatatatttattttgttctcttggaagatcttcrtggtttctctttagtgtgtttaaactagcacatgaaaataatagactttacaaaattggcsatgacctatatcagcaaatggtgaaaccagaaagaaaaatacattaaaggaaaaatcccaaaggaactgatatttctctaagaagcaaggtataacttttattaagcaacttaaagagattgtttaagaaatactgtaattggggagggaattatagtgtaaggattatgcaaaaaaaaaatgaagtaaaagggaattacaagtgggaaaagttacaaaggaaattagtatgttccttgaggttcagggaatctatgtatatttcagatcatggttgcattttcagtcttctgtttttcatggttgatgagttcatcaagtccttccatcttttggagtcatttctattcaccattcaaggatctatctaaaatgtataattatgtctccccgtaccattccctcccttcatatctttagtttaaccagtttcggtaaacacaggaatttgagcatcacctgtcacatagaagacaggtgatgtgtattgaacttatgttacactttctttgaggaataagaatttcctcacatttcctaagaatactcaggatcaagtataagtttaggaatcttggactttcttatttgatcctgaactcaratttatagcccagaaattttggtggctaagtgggtcaaaagattcctaggcaaaccttaaagaagacccttggactagccaaagcatttgtttagaatattgtttagtaaagacaaacaaaaatttgttaggaatccagagctgctttcaatcatccaagtatttattattttcagtaatggtttcaagtaaatggtttagagccacacttgctagaactaagcaattgcaatgcttggctttttctgacatgttttatgatcagtgtttatatctataactaattgacaaaatgccagtgtttgtgttctttaagatacattcaccattgagaaagaaattaaaatggtttctgagaagaattttaaaaagtacagactatacaagtatggaaagaaaacattcttttgtcttaacacatttctaaaaggagagtatgtgtgtatataaaagccatggaaccatacttactgaacttgaaatagttttgcaaatttccatggcaaatgggatttatattgcttgaacatttttttgtttttactccttttctcatttcacaaactttgccagttcccaaagatttgcttggaaactcactgtgctaataggcaaagttggcctttcttgtgcttctcttaaactagcccttcctgaaacactgaccttttagtttaataacagttttatttgagaaaatgttcagatcctgggagctgaaaagagtgttttcagaaaggccattttaaatagtggtctccaaatgctgtatctttttccctcatgcactttgggtcagacctatcagaagaaatacagtattgctttatgtattctattgatttaaaaacaaataccatgaagcttagatgtgctcagaacccattacctcactggtttattttcctggctgtgctttgatttgctattttagatttcaaactctttatgctaggtcatgtttttattttctgttattttaacttctcatttgtagctaaggtaattactttttcagttgtgaccttggacttgacccaaaagttgtgattttttttttttttccttttctggaaataggtagggcattagaaagayagctgtgctttggctcctttatggaccaaaagtgatgtcaaccagctggtcacttggacatgtctttttcagtggccatgggagtgttcctgtccctttcattgctgttgttgtcctcttcccacgtttttctctcctctcatggcctacctggacgatgccacctgtaatctgtatctctttctcacctcaccccacagcaagtggcagggctgatgatagtagggagaaggggatagagaaggaaacagcaagcctccagtctgcattttcttcaccccaaaccacttcctctccacattctcacctggatggcttcgtgcctatccacccagctggtcaccgtttgatcacactggaataaacagctcgctgctgatttgagcttttcctctggtaggaagacatccctatgttataggcataaagtgcactatgaagatatgacattgtgccaagtgaaataagccagacacagaaagacaaatactgtatgttcttacctatatgtggaatctaaaaaagttgagctctaggaagcagagtaaaagagtgattaccaggggatgtgggatggggaaatagggagatgttgatcaaagagtacaagctttcagttataagatggtgactttagttaataatattttttacttgaaatttcataagagaacaaattttaagtgtccccaatgttccccaccccratggtaactgtgtggtgctcgatatatttgtggtaatcattacatgattcrtatcaaatcatcacatagttcaccttgaatatatatgattctrtttgtcaattataycttaataaagctggaaaaaccaaactgcttaatctcttttctgttgcttataacagaatacgtaaaactgggtaatttataaggaaaagaaatttgttacttaatgttatggaggctttgaagtccaaggttgaagggctgcatatggtgtgggtcttcttactggtggggactcctgtagaatccctaggtcatgcggggcatcacgtggtgaggggctcagtatgctagtccagctctctcttctttttcttttcttttctttttttttttttttgtgagatggagtcttactctgtcrcccaggccggagtgcagtgatgtgatcttggctcactgcaacctccgcctcccragttcaagygattctcctgcctcagcctcctgagtagctgggattgcaggtgtgcaccaccatgtctggctaatttttgtatttgtagtagagacagggtttcaccatgttggtcaggctggtctcaaactcctgacctcgtgatctgcccacctcagcctctcagagtgttgggattataggcgtgagccaccgcacctggccttctttttctttttaaggtaccagtcccactatcatgataaaccattaatccatgcatggattaacccattcatgaaccctcatgtcccagtctcacctcttaagggcccc

SEQ ID NO: 9880 - DNA, 47129 bp, Homo sapiens
  misc_feature (43190)..(43190): n is a, c, g, or t
ggtggtgcgtgcctgtagtcccagctactcgtgagctgagatgggagaatcacttgaacctggaagatggaggttgcagtgagccgagatcgtgccacggcactccagtctgggcaacacagcgagaytctgtctcaaaaaacaaaacaaacaaaaagcataataaaaataattacaggagtggctaataagcacctgctcaacatcactaatcattaggaagatgcaactactctaagccacagtgagataccacctcacacccattgggatggttactgtaaaaacaaacaaacagaaaataacaagtgctggcaataaggtggagaccctgggactcttgctcactgctggggagtgtgaaatggtgcagccgctgtggaaaatggtgcagcagttcctccagaaattagacagacaattaccatatgatcmtgcaggtccacctctgggcacatccccgagagaatcaaaagcagggccttgaacagatgtttgcacgctgtgctcatggcagcattactcacactagcccagaggtggaggcaacccaagcggccatagaggatgaatgggtgaacagactgtggcgtgtccataccagggaatgctgttgagcctcagagaggagggaactctgacccatgccacagcatgcggggatggtgaggacattgtgctgagtgaaataagccagtygcagcaggacagatactgtatggtctatgagggacccagtgtagccaaattcatagagacagcagaatggcgggtgccagggactaggtgttgggagggggaatggggagttcttgtttaatgggtacagaatttcagtttgcaaaatttgaaattgggattatgactataattggggtctagaactgttctatcatgcaaacccccattgccctgtcccctccccacacccctacccctggcagccatgagagttatctgtccccacaggtttgcattctggagagtcccctacaaatggaatgagactgtagatactcgctggagaccactgctgtcactcagcacaatgcctctgagactcgcctaagtgccacacgtgacactagtgtttgtgttgttaatagtattccattgtggccgggcgcagtggctcatgcctttaatcccagcactttgggaggccgaggcgggcggatcacgaggtcaggagattgagaccatcctggctaatacggtgaaaccccgtctctactaaaaatacaaaaacaaaattagccgggcgtggtggcaggtgcctgttgtcccagctactcaggaggctgaggcaggagaatggcgtgaacccgggaggccgaggtcatgccactgcaccccagcctgggcaacagagcgagactccgcctcaaaaaaaatagtattccgttgtatggctctccmrgtgtgtttacccattcactgttaaggagattttgggtgtttgcagtttctagtttaactagaactgctataaacatctgtgtgtgggtttttgtgtgaatacacattttcagcattgttttgcgccatcacaggggaaaccttctttttttttgttttgagacagagtctygctctgtcgcccaggctggagtgcagtggcacaatctcagctcactgcgagctctgcctcctgggttcacgccattctcctgcctcagcctcccgagtagctgggactacaggtgcccgccaccatgcccggctaatttttttctgtgtttttagtagagatgcgtgttagccaggatggtcttgatctcctgacctcgtgatctgcctgcttcggcctcccaaagtgctgggattacaggtgtgagccaccgtgcccagccggagaccttcttaatcagataacattagcttcaaaatgaaacctgaaaactaatcaaccaggcctccgtcttcaccctgcagtcatttactggaccagaacttggaagatccagccactctrtttctgtagtgatgtcaaaggaatcatcattggtttccccatgtgaaaggcaaagcttatttgttaatggcaacatgacgtgttaggatcaaggaaaggtccattccgcagttttcacaattcccagagctcttgggaaaggaagagttttccaagtttgatcctcatgatatcaaaattaaaatgttcttacccaaaaaatgataactcctgttattagcttattattattattaaactgatactgagtgtcagatggggtgaacagattaatacaaagtggcatctctatttagatgagtctttcattaaacaggaacacacagagtaaaacacactggaatggccctttctccagcttccaatagggaagttggattgattattatgttggcagtggagcaccttccagaagaaacatgagctagaaatgatacccaagtctttaccttacccttagcaactgacagaagtgaagccattgcagaaggctctcttgctaataactttttttccccagcatatttctcaatgtgacagtattgttctgaatgatgaaggcaaccacttttcatttggattcagaaacacttggaagcagtgataatatgtcttttcttttcttcttcttcttcytttttttttttgagatggagtctcactctgttgyccaggctggagtgcaatggtgcgatctcggctcgctgcaacctycgcctcccaggttcaagcaattctcctgcctcagcctcctaaggagctaggactacaggtgcacaccaccatgcccagctagttttttgtatttttagtagagatggagtttctccacgttagccagtatggtctcgatctcctgacctcgtgatccgcctgccttggcctcccaaagtgctgggattacaggygtgagtcactgcacctggccgaaaatgtgtgtttttaaaactaagtgaagataatacagttaggratcatgaagtctaatcccattttttttttttttgagacagactctcaatgtcacccaggctgcagtgcagtggtgccatcttggctcacggcaacctctgcctcccaggttcaagtgatcctcccacctcagcctcctgagtagctgggactacaggtgcacgccactacactggctaatttttgtatttttttatagagatggggtttcaccatgttggccaggctggtcttgaactcctgggctcaagtgatccccctgccttggcctcccaaagtgctgggattacaggtgtgagccactgtgctcagctggatctcatttttaaattgaggcatctgagtcccggagggctttgattcccggcccaggcttctttcctttgggtatagatttagcaatactctggtctgacccaggcagatgttcttgttttattatacatagcgatctctcttgttagaactcaattctaagctcatgtcttattctatgttctaattgtgttaacaggcatatgtgcattgtcgtgtatggtgctcagtcatctagggaggaggagcatcctagaatgggagaaagtatcatataagagaaagaacgctaacctcaggtagctctgggctgagattctagctagtagctgtgttatccctaggaagccctagtttcctcatctgtaaaaatagcactactggatcaaataattgggtggattaatgtgtgccacatactgagatagaggtgtcatctgtctccatctatccattcacctcagtgttgaaagttgaaatagattgaatgaaaatcacaaaaagggtatgggatcctgtatttgttctattaagaggtagcatatttcttggtaagtgaagatagacccccccacacccccgcgaaaagaattagaacattgtcacatagcagttcctcttctggggttgtatcttactgaagcacttgccccaatataaggatgtttgttgcattactatttgaggagccaacttacctaaattatctgaatgtccgcaagctggaatgatccaagcctctgtgtgctgacttggacatcttcccataatatttgctttctggaactaaaaamatatataaataacatatatatatatttgggatcttaaacctgcatattaagatctactggtagatgttagttttatctgaaagtttccacataaattgtgagcaccaatgcccatctcaaccatttggttgccctcctcaaccagtttggttgatccaatgccagckcccagctcccactgcaggcatcaccacacgaccctgatctggcagacgctgtgcacagggacgtctacgggggtgggaggatgggttccagggaaactgttctttcttaataaaaaggaactgatgtggttggagctgcccttgctcccctctttgcatcttcaacgtgggccagatgttcagaactgcagtgacattttgtgcccccaggatgccaagcaaggggcacaatccagccraccaaggatgacagagacgagacagagaggggtcccagtggaaccaagaacagctgaatgaacaccagccaccacctcctagtgcactcctggtctatgaggaaataaacccccacgtgtaaattgctctagttgttctatttcttgcagctgaacacattctaatcgacataactgtcaggggaaaagaccttcagagaaatgtgcatgttgtactgttttgtgaaatgagattatgtatgattgcacaatagttgtgagcacattgaaagactggaagggcggctgggcgtgatggctcacgcctgtaatcccagcactttgggaggccgaggcgggcggatcacgaggtcaggaaatcgagaccatcctggctaacacggtgaaaccccgtctctactaaaaatacaaaaaattagccaagcgtcgtggcaggcgcctgtagtcccagctactcgggaggctgaggcaggagaatrgcgtgaacctggaaggyggagcttgcagtgagccgagatcacgccactgcactccagcctgggcgacagagtgagactccatctcaaaaaaaaaaaaaaaaaaaaaaaaaaactggaagggcaataataggtaacaaagtactgagcacctactatactaggtacatctcattgcagccactctrtaagatggatgcttcacggttatgctcatttaagagtgagacaactgaggttccaaggggtttaataactttctcaaatcatgcaaccaacagatagctagcttgggactcacagccaggtctggctggccctagagaaagtgcttccaccaccatatgcaccccaccagtgcctactggctgcacagaccgccaccagccctagcagcagtgatttctggagagtgggatgggagaatgggctggtggtgaggaggtttgtctttatccacttctttagtgtttcctttttaacaagcaatttttgttacaaaagtggacatccagagatattgacaaaataacactggtgccaggaactgtgctaggaatataatagttttcttccggatctggatctctactgtgratatccactggtcatacatgcctactggaaataaaaagcattctttcctaacttattccaaaccctggctaaaggaattctggggttgccattatgttactatgtgacctacgtcccagataaggaacctgcgaatctgccacctccrccctcgggagagccaggccctgcagtcactatatgtgaagaatcctttggagcctggaataagagggttttatgcatcattttttaatcaactggatttctcacctcccacctgtgcytaaatggtggcttcttggtatcttgaaagggggtgctcagcaggagaaagcagctccatgtttctgggcagcccgtcctatttacakactgctgcggctccctggcagctgccacagtccccgaggccagagggagttccttgagggccccagcagttgtttgagtcatgtgttttgggcccttttccttagagatcctggcagggccagcacagatttcttatcggcttccacactgcggagctgcagccctcagaagtaagcaaggtttcctgccgggagaaaaggatttgaagcattccagccaaaatgacggacagaagccccttcgaaaccgacatgctcaccctgacccgctacgttatggaaaaggggcgtcaggccaaagggactggggagctcacccagctgctgaactcaatgctgacggccatcaaagccatctcctcggctgtgcgcaaggccggtctggcccacctgtgagtcctggggagcaggcatggggcacagagcaccccaggcccaggcaggggtgtgggagctgcaggtgctttggcaagaaactgggtccaaagcttattggccctgtgtgccctagatggaagctgcatttcaagttcctatcatgtgtgctttgataaaggggcctttgacttgttttgagaaaggaacgaaaacatgctatgaagaaatacacatataatttttccagttattataatgataccaagtgcagtggcttgttgcattaaaatatgtattgtgttatcatgacttgtacttgcacagagagagtctcactggaacaaagaagtagaggggtgacgtgaaatatctctttatgcctyttgcagacatgagtgttttattgtaataagctttgcaaatatgttaggagctggaaattatgtacgacataggaagcttggtagagccccttcctgcatctgctctctcatcatctaaaggagtgttttgctggctacgtgttttatttcttctctgtgactctttctttatcttcacctccacttggtgtgcaggaagccrggaggtgctagtcctgggaggggagcgcagaggtttcttccacagggttctctttggtgctttatccsagcayagatgaggccaggttcacattacactgctgatggtcacagcccagtgtccagtttaagtctgtaataaaaagaatccggtggccaggcacggtggctcctgyctgtaatcctggcactttgggaggccaaggtgggtggatcatgaggtcaagagatcaagaccatcctggccaacatgttgaaacyctgtctctactaaaaatacaaaaattagttgggtgtggtggcgggcgcctgtagtcccggctactcgggaggctgaggcaggagaatcgcttgaacctgggagatggaggttgcggtgagtcgagatcgtaccactgcactccagcctgggtgacaggaygagattccatctcaaaacatacaaacaaacaaacaaaaccccagctttctttgggcttcccttgtagtaattccaggggaggtcctctcaggagctgaaggaacacatattttggggatgaaagagactcaaaatgaggagctaacaaagtccaatcatttaaaatatttactctgagcaattaagtgcttttaacacaaaaagtgatagcattagattacaagatgtaattatcatttgatcaccacagactgtatttatttaggggtggtgacccagtagcaggacccaggttaacggtgcattatccttgctttttycctgtgggtggatgcttcagctctgtttttacctcatttggcaataacagccacgctctgcatttaatcgccttccagaatgtgagggcaggcggtgccctgttctgctcctgtgggtgacagccctgctgagtgacggtagacagggactttgcctctccctgtgcggaccctgctatcctcaatgcggttgcctgagtccatctcagggtgattcatccacataaattgggctccccctctgtgcagggctcttggctaggcagtggctgccatggtaggggtcttgcttatctgctgcaaaactctgactttatggcggttgagcaaggagacaaagtggccctaggaactggataattgaggtgcttattaatttggcatttcctaccgtgtgataatgggcgtgatttactcttgctaggaccttagattccctttgtgaaatggagagtatagtagcatccctaactcttagggttgttgcagagttagcgagcgcatgtgatgacgatttcaactgtgccggccccgtaagacacgcacagtgcctgtcactaccgcggttccaagcccagaccagatttgcctgtgcctgagccgtcaatgaccactggcggcatttgaggagcctttcagccccccactgcactgtgggagccactttctgggctggccaaggctggagcccactccctcagctttcagggaggtgtggagggagaggtgcgagcgggaactggggctgcgtgcggcgcttgcgggccagctggagttccgggtgggcgtgggcttggcgggcccgcactcsgagcagccagccagccctgctggcccccggcaatgggggacttagcacccgggccagtggctgcggagggtgtactgagtcccccagcagtgctggcccactggcgctgcgctcgatttctcgctgggccttaggtgccttcccgcggggcagggctcgggacctgcagcccgccatgcctgagcctcccatccactccatgggctcctgtgcggcccgagcctccccgacgagcgccaccccccgctccacagcgctcagtcccatcgaccacccaagggctgaggaatgygmgcgcacggcgcaggactggcaggcagctccacctgcagccccggtgcgggatccactaggtgaagccagctgggctcctgagtctggtggggacrtggagagtctttatatstagctcagggattgtaaatacaccaatcagcaccctgtgtttagctcaaggtttgtgagtgcaccaatcgacactctgtatctagctgctctggtggggccttggagaacctgtgtgtggaaactctgtatctaactaatctgatggggacgtggagaacctttgtatgtagctcagggattgtaaacgcaccaatcagcgccctgacaaaacargccactcggctctaccaatcagcaggatgtgggtgggccagataagagaataaaagcaggctgcctaaaccagcatcggcaacccgtttgggtctctttccacactgtggaggctttgttctttygctcttgctgctgctcactctttgggtccacgctgcttttatgatctgtaacactcaccgcgaagatctgcagcttcacttctgagcccagtgagaccacgagcccactgggaggaacgaacaactccagatgcgccaccttaaragctgyaacactcaccgcgagggtccgcggcttcattcttgaagtcagtgagaccaagaacctaccaattccggacacaccaccaccacccaggcaggggaccgcaagcccctggctycttttggggagatctttctagcaagggctccgtgaatgcaatttaaaagttatgagagtctccttttccccttctctttcctcttcttatggtgggaacaagagaggctggagtgcccgcctggagcctctccttggctttctcatggccgtgggggatcattcctttagagactgttagttagctttagtgtcagtcagaacactgcaagatactgtcctacgggctagagagcccctttcmcccatcatctcaggtgaagctattgcygggaactcacatctcctggtgagtttccattctttctaggaggaggggtgctgcccagtgcctggagagagggtgcagggggtcggctgaggggtggggttaggcggatgagggggcatttgcaaagcgcaggacagaggctgtttctcagctctgcccaccgcaggcctgggcctgctgttcatyctccagtggcaagcgcrttcagattccatatcgaaccaaggcctgtgtttgtggtcccctgaaactcagatgcagtcagcctagttttgttgctgctgttgcttgcttgcttttgtcttgaccaggaggcacagtctttggggtgaggctgctaggagtgttttccaagacagctgactgctcacgtcatggttcctcagacaccaaatgatgtgctgtgggtgggggttggtgttggggggtgaggtgggggtgctgttcagggaagagggtgggaaatgagtttgcccccagcttaaggtagatcagtggttctcaaccctggctacctgttagaaccacctgagatttccttcaacaaataaatagcattcacatcagtaggcaaaggaaattcctttcttgccatcctttcctcataactcagtgagcagacatggagcatgggctgtgtgtctgggcactgcagaaacagacagaaggatggatcctgccctctgcaagcaggtcatgcagcaggaagccagtccgtgagtgtggtgaacactgaggagggatgatggggtgtttctggtgtgtggggcccacttgagaggaccagggaggcgtcccagagaggaaaaggaggaatagcaggaagaaagcygggcagagagcactgctgtggtgggaacaccattagtgaaggcgagaaggaccagagccgcttgctgggtgctggcccagggacatctgcggctgttggaacgtgagagggtggcggggtggctgagccttgctgtagtggtgcagggtggacacatgaaggatacggcttccctcagaatggaaaaaaaaatcctgccattgtggaagctcacagacaataaacaggacctagatggtggtcagggcagaggagaaaatgcatcgagtaagatgttggggaccagggaatgctgctccaaacagacggccagagaaggcactactgagagatgatccttgagccaaagcttgactggggtggccgtcacatggctcttgaggaagagtgtcccaggtggggcagcaaggccactgggcagtcagtcacaaggcaggtgtgtgccttggaggtttcagaggctggggctgaccctgtgaggatgagagagacgggcagccatgccaacccgggcgcagagattccacgktggtgcctgacacccacttgyggggacttggattttgcctctgggtaagactgggggcactttaggaggacccctcctgctggtgtgttgagaaccccctgaaggggcgagggtggargtggggagacctttgcatatgaatgctctaaaacccaaagcctctagatagaattattttgagggtctccctccatcgctcargctgcagtgcagtggcgtgatcacagctcactgcaacctccacctccccaggcttagatgatcctttcatctcagcctccaaagtagctgggactacaggtgtgtgccaccacatccagctaatttttgtatttttttgtaaagacagggtctcactgtgttgcccagactggtcttgaactcctgggctcaagcgacctacacgcctyggcctcccacagtgctgggattacaggcacgaggccctggccctgactggcatagaattctcgtagtagcactctcttatactgcttgggatggcagtgaagaaaaaaatgaaataagtctgcccccacatttccttctcagttcaagtaacaccaagctaccacagggcaattttaattcattccagcagggcactgtgtgaggacaatccacaaagacttgaaattccagggcttggccgggcatggtggctcatgcctgtaatcccagcactttgggaggctgaggcgggtggatcaccaggtcaggagatcaagaccatcctggctaacatggtgaaaccccgtctctactaaaaatacagaaaaaaattagccgggcgtggtggcgggcgcctgtagtcccagctactccggaggctgaggcaggagaacggcgtgagcccaggaggcggagcttgcagtgagcagagttcgtgccactgcactccagcctgggcgacagagcaagactccgtttcaaaaaaaaaaggaaaaaagaaaaaacaaattccaggagctggaggccacagtcctttacttttggagtcctcagttatggcaatgggtctgatttgatgagtccccccatctgctccatctccycgtgctgagactgggtttgtgttttagtgagactgagtcctgggtcatctcattggaaggctaagaaaatatgacaacgactccaaggtgtaagggaggcaaggctgagaggtatcctgccaggcataatcgccttcttctgcacgtgtgacttggagactccagagacacagaacgagaggggactgcactgctggcgttttagggtcccaggctctttgctggagttaagaccccctagtgacttcctcattcagccttttgtcttctcaggtatggaatcgcaggaagcgttaacgtgacgggagatgaggtgaagaaactggatgtgctatccaattccctggtgatcaacatgstccaatcctcctatagtacctgcgtcctggtctcagaagagaataaggacgccatcatcaccgccaaggagaagmgggtgcgtcatggggctgcggtgcccgctcgccagtagatgatgatactgagccggaaataagctgccttrcttttctttaattcccgggattctcctctatttcttaacatttgttttctggaaacaaaggattacatacttctctacttggaaatcttgtgctgtctagagaaagaagactccacagtaggacagtgattcattcaggaaattgttcagagtgatgcaggaaccgcctcagtgggcgcttgttcgtggctgttcacttaatcagtaacaagagccaaatttttgggggcttaaccttgtggagtccagggaagagctgtactgtacagcctctcaccgccccgccttctcattccacccccgcccccagccggcactttgcgaggggttacagtttcagcagagatttcttagtgcctgacaagctgttagrctggtccagaaacaaaaccacaagcctcctgtgctcttacctcgtaggatggtgaagtcggtgaaggaaggcacggctggggagggtctgcattcactatgggttcacacacagcttattatacagagaggtttgccaatggccaaaagtttcaatcaatgttcagctgcaatatagtcaatagacaagaggccatttctttgtgattagctggaggaatggaaaagaatttaaagtaaagccaaatttatttaacctctgctctatgccaggtactgcaaaaggcacttttgccctcgtctcacataattttagctacatcacactattacttccaactttcagtttcagttgatatgactcttgtttctctctccagtctgatctaccattgtcttctcctattggcctaagccacatagccacataggtcttcatgtcagttcctttatttatttatttacttatttatttatttttttgagacggagtcttgctctactgcccggctggacaggctggagtgcaatggcgcaatctcagctcactgtaacctctgcctcccgggttcaagcaattctcccgcctcagcctcctgagtagctgggattacaggcatgcgccaccatgccccgctaatttttgtgtttttagtagagacggggtttcgccatgttggccaggctggtcttgaactctgacctcaggtgatccacccgcctcaggctcccaaagtgctgggattacaggcgtgagccaccatgcctggccygtggcagctcttgaatactccaaacctgctgatctctctgtcgaaaattcttctttctaggatgggcgcggtggctcacgcctgcaatcccggtgctttgggaggctgaggtgggaggattgcttgagctcaggagtttgagaccagcctaggcaacataaagatacaaaagataaaaatttagctcggcatggtggtgtgcacctgtagtcccagctactcgggagtctgaggtgggagaattgcttgagctcaggagtttgagaccagcctaggcaacataaagatacaaaagataaaaatttagctcggcatggtggtgtgcacctgtagtcccagctacttgggagtctgaggtgggaggattgcttgagcccaggatctctaggctgcagcgagctctgaccacaccactgcactycatcctgggcaacagagtgagactctgtcaaaacaaaacaaaaacaagaaaacaaacaattttgctttctaggtctctgtgtgtttcttcattccttaattctagtcaggtctgtcatcaaatgtgaccccccctcatggctctccagcccccagcctatgtgggttttcgttagggcacgtgccacagcctgcttgtatgtgtcctgacctgtgtgctctctgtctgttctcccactggaatgtcagtgccatgaaatccagccttgctgccgggatcgctgaccccccggaaacaaaccccagggccttgaacacttacttcccagcatatgctggaagctcaacatgtatctgctgaatgcatgcatgcatgaatgaatgggctaaattggatttttttttwaaaaattggattattatagagatgttggggaatttccaagtttacaaattatctaacttttctactctggctgagcaaggaaaaaaaacagaaacaaagctcaaatgaagctaggccaatactcattggaaagtcagggaaaactaaatcaagtggagggagaaatgaccctcatttctcttgaagttgcattacccgtgtttaattggcctgggggttccggtcgccatcactaagggtctctcgtgaccttgcacacagggggctataaaaaggacctggggcttcccttggtggcttgagctgcctgtgayagcagagtgggtgggtgtgggggacgttggtctctcaagacacacccactttatcttctggtcttcgcatcagacaggtgagatggatacaaaacccagaggagtatttgtgtataaactggcaccctgccctccgtaagtcatggtgttttttgataaagatatgctgtggttctcaatctctttttgatgtggtgtactctgccacgcacagccctgacacagagcaattgtgctaatgggaagatgtgctgaycagttggtgctttcctctctgatttaggggaaatacgtggtctgctttgacccactggatggatcttccaatattgactgcctggcctccatcggaaccatctttgccatctatagaaaggtgagtagacaggctgacattttacacctccttcctgtggtggtctctggaaggttcctgggctgaaaaccgtgtgtttggagtcctaccctttgtcttcccactaacgagaaaagccactgtaggcaaaccaccaacttttctctgcctggggctcctcattagaagaactggattggcgattctttctctgcctactttctggcattcctgggagggtaacacagaaggacagctgagatcttgttttgaaagtctgggtgcaacacaaatgtcagacatggcattaggttccaggtggcattctgaatctctgacatcctctccccctcttgcctcatctctcctgtccccagccacagaaagttttctgctaacgctcattggattagattgaactaatctaacctggaaggtccacrgtgatctccctatttgaaatctgaacccctgagtacacctgaaaagtctttgttgccatgtaatgctgggtattcacagatcctggggactggcatatcttttgggccattctgcctaccctgaaatcctagcaacagagagctgggtgggtttgtgacatccagcaggactagaaacttcacaattcagaaaacttgtccttcattctatataaagtgtacaacggcaataaaatccatagcaacctcgccagctgcggtggctcacgcctgtaatcccagaactttgggaggctgaggcgggcggatcacttgaggccttgaggctaggtggtcgagaccagtctgggaaacatgrtgaaaccccgtctctactaaaaatacaaaaattagccagggtgatggtgcacgcctgtaattccagctactcaggaggctgaggcaagagaattgcttgaacccaggaagtgcaggttgcagtgagctgagatcatgccactgcactccagcctgggtgacagagcaagactctctcaaacaaacaatccatagcaaccaaagagaaaaataagcagagtgccagttacattgtatttgagagtcttctatgtattaggaagttgattaaaccgtgctcttacagagtcttgagatagggaatctatggcagaaatatgagtatttaaggcctgtatagtttgggttatattgtgagaataatctggtagatatctaattctcagccttaattcatgcacaagtgttgccttgggttgtagttaggatatctaaagccatatgatttaaagacattgtgggattaagacatagtagcagtttgcttttctgtgtcttgtggggctgagggtatgttttgggcattattcaggaagtatgtacagcacttagttttacttatacttcatggtccccactgtcaattatatttggggttcctgtggggcttgayaacaggttggcaaaatatacatatttaacaggctgggcatggtggctcatgcctgtaatcccagcattttgggaggctgaggtgggtggatcacctgaggtcaggagtttgagaccagcctggccaacatggtgaaactccatctctactaaaaataccaaaaattagctgggcatagtggcgggcgcctataatccctgctactcaggaggctgagacaggagaattgcttgaacccgggggcagaggttgcagtgagctgagattgcrccattgcactccagcctgggcaacaagagtgaaactgtgtctcaaaaaaaaaaaaaaaaaaaaagggggctgggaagggtggctcatgcctgtaatcccwgcaatttgggaggccgaggcgggcgaatcacgaggtcaggagatcgagaccatcctggctaacatggtgaaaccctgcctctactaaaaatacaaaaaaattagccgggcgtggtggtgggtgcctgtagtcccagctacttgggaggctgaggcaggagaatggcgtgaacccaggaggcagagcttgtagtgagccaagatcgcgccactgcactctagcctgggtgacagagcgagactcygtctcaaaaaaaaaaaaaaaaaawtagccaagagtggtggcatgtgactgtggtcccagctactcggctgagacatgagaattgcttgaacctggaggtggaagttatagtgagttgagattgcactgctgcactccagcctgggcaacagagcaagactccctctcaaaacaaacaaactatacacacacacacacacacacacacacacgcacacacacacatatttaacagattataggaggagctatgaatatttatgaagatggtcctgacatatgtgtattgaataaatatgcatgtatgacccatgtttattttggggtggaatgtattccatttaggtcctgtatatcaaaagatctttctaggacataaaggcacacagtgtgtgctttctgtaaactggccagacctagcccatggttggtggtcttttatcaggagagctactgaaatttagtcttttgtctaattaaagctgtagtcttggctggtggaacaagagcctgggggtgagttagtcagctgatcttaaggccagcgcttgtttggctgctagagaaaaagaaaaacctatggcagttaggacatggtttcctcttcaaaataggagtgagtgactaacccttgcctggcgtggccttaggtcccgtttctaattgggtattttattgtgacaaacagcctattttgtcaatcttagggttttcagttgtgcctaattccaaaaagtgggggaaggtatagggaggcctgtctgatcccgcttcctgccatggcctgaacttgtttttcagtttatctggggatttccttcggccaagaggcaggtccattcagtctgttgagaggcttaggattttattttagtttatattctccyttttttgtcaaggtattccrggggcagtattgatggccaagcttttattttgtcccatgtggatgctggggtggtatggttaccttcccagggtccatgatgttcctcgatgggacccctatggcccagggacttagagtcaaaacagtggaagccagttaaatgttccaggccagatgggaatggaggtggccaggcattcattaaccttaaaaccccttttaagcaatgtaaaagccaaaaacccaaagccaaaaggcaagcttccaaaattgacttatctacaaatctatacatcgagctactgtgagcttggctagtagcacttakctgcacaaracacaagccttttgttcagctgttgaagcctctctgtgtccgtcctggatttggaggctctgaattaatttgatcccataagactggcccttactatgtcagacgctcacttcttccactatagtctttaggcctgggggattgaatagtttcaattctggaggtaaaacaaaatacaaagaattagtaatgttttaaagtatcataagcccagcctagttctgagaatgacaggaaaggaggcttataggtagttaagcattttaattatttggtattaaggcatagaataaatcatattactttagacagaggcaaaattaataaattaatcttactggttttgactacaaggctgtccttgtgtctcattaaagcaggtgactttgattgtcacctttgcctggatccagagacaaggctttggttagcttgagtttggtatcagatactggcaggagccaatgccttctttagatgaaatatgtgcacccaggagtcaaagccctgtaacttaactgcacaaggatttgttaatagtacctgataagggccttttttagggactagaggtagtgatactagagactttgacctgtctggaacctgtaaaatgattttaaaacctagtggtgattaatttttatagctttggtaaaccccagcagaaagtcagaaacttaatttaggattcaattttgaaaaagttaaagatgttaaaaggctcaaaacaattgattaaaacagaactgtaggtcattgttaaacaatagttgctcatttaaccagagtgataattgaaagattgaaaaggcaatccaggctgggcatggtggctcacacctgtaatcccatcactttgggaggctgaggcaggtggatcacttgaggccaggagttcaagaccagcctggccaacatggctaaacactgtctctgctaaaaatacaaaaattagctgggcgtgttggaccagccacttgagaggctgaggcatgagaatcacttgaacctaggaggcggtgattgcagtgagctgagattgtgccactgtactgcagcctgagcaacagagcaagattctgtctcaracaaacaaacaaataaaaggcaatacagaacgttatatggttgtacaaactttaacccttttagatctcaacttttctaagcaattaaaacctaataaagacaacataggaattattttgataaaatgtaaaatgttgtttcttaagtgaattaccagacagggaaagaaaaacctgcagtgtagctgcttctctttaggggaagcctatttggataacctggaagtcaaactgtgagtgtatcagggaaatagataattctcagtaactgcatgagaagctttctaatcatattgacaaatttagacatatcaaggaaagtacagaatcaagtaataatgtaggaaaacattgcttttctagacctttaagataaaatgttttagtgccaggccataataataaaattggaggaaaaagatcacaagagttgaggaaaaagctgaatgagagagttatcctctcaggccttctcaaggggagaaaaagctgaaagcagcaagacacagcaaagccaaacttctgagatatgattctgagaagtttttaagagaaagaggttataaaagtaaaatttcttgttattaggagcaaataaataccttaagacagacaaccttgctttaaacatagggggctattataaagaatccccttttaattataggtaacttaatcacatgcaaaattcttttataaattctccacaaactttaatacaatttatacaaaccatttatgacatgcttaaactttttgacttgtcctgaattttgtttctttagatatcagtcattatttttaggacaagaatttaccatacaacttttttttttttttttttttttttgagacagagtctcactctgtcgcccaggctggagtgcggtggcataatctcggctcactgcaagctccgcctactgggttcacaccattctcctgcctcagcctcctgagtagctgggactacaggcgcccggcaccaygcccggctaattttgtgtatttttagtagagacggggtttcaccrtgttagccaggatggtctccatctcctgacctcgttatctgcccgccttggcctcccaaaatgctgggattacaggcataagccaccgtgcctggccaagttttttttttaatatataaaattattctctcttttaaaataaactttatttttttttttttttttttttttttttttttgacagagtctctctctgttgcccaggctggagtgcagtggtgcaagctccgctcactgcaagctccgccttccgggttcacgccattctcctgcctcagcctcctgagtagctgggactacaggtgcccgccaccacacccagctaattttttgtatttttagyagagactgggtttcaccgtgttagccaggatggtctcgatctcctgaccttgtgatcygcctgcctcagccttccaaagtgctgggattacaggcctgagccaccacgtccagcctataaaattatttttacaatacgaatacaattcatagaattatatagtcattagaatttttatttctactaactttaaattttagtggaaacttagtaagcaagaagtcctgaacggtttgtcagatgttagcattttatagatgaagtcatttcacaattttagaaccatgttttcccatattttattgtaaattagtcccataatttattataatttttaaaaaattagaagtaaaccagacatccaataagcatttattatttaatttaaaataattttaagattttaaattacagaaaaaattcacttaaaaaacatatttcatttatgtgtatttaattttttaatctttaagtttatctagattctttctgaaaacagatattatayaaagttagtcattatttaaagttatttccctgttaaccattttaaaagtccgaacattaggtgaacacctaagtaagaacctcaaagttaaatccatggtcattttgccaatagctcagaggattcagttgctttcattgaactaacaatcctaacttagtcttatttgtcaaaaaaattacacaaagattactctgtgtttggctgggttataatcttacaatctttgcgccaaaccctgacactttaaacatttagcagagacaaatacaaaatttatttgcttagacacaaatgtatgctgatgattctgaaggcatttttgtttttattttactaataatttttgaagccagttttatttatcaaagattcatgcgaacttggaaagcatttgaacttaatttatgtgtactcacttacttataaagccaatttggtagcatgctagacacgacagaacataactataacatgtacattacataaacatatctaaacatgtatacatccatacacaaacaaaggtctaagagcttttatctgagaactctaatmatgagatagcatcacaaactcactgacctataaaagctggcttcaagttgtttttctgacaaaaytggaagctgtccacgtggctaactttgtttgccctgataggtaatccaaggaaagctggcagccaaaatttggggtaaascagtctctatggcagtttgggtttttttctttttaaatcttttcccctttttgctgttcagtttcaaatgagttttcaatgtttatattcaatttagaccataaataatgagtcttgtctcgcgccagcagtttaataacagcagatttaaagcaggcagaaaagagaggaaggtagagagctaaagaagattctacttaactccacagtgtaggttaaccatttgaactctgaatttttcttgttgtaatttgcccatcagtttaaaatgtgcacaaaaatgggccagaatatgtaaccagtcccagagaagatgacaaaatcagaggccatgatgttggaaactgtttttctccttcaaggctgaacccctggattggacaggaaatgagaaaaagaaaagaaagagatgtagaggacaaaggtcaagttttacaggaaggaagaggaaagagaaaggaaggaggggaggcttgtgagcctttcagccactgcaaggcttggggtcagtaccctcaccacccrggtktatctcctgtcagggagagcctcagtgccccagacctacatggtgtgggatgaacccttcccacctttgcaagtcaccagtcaaggtgaaatgtttctagccagagggagctgtgggtgcttttggccaagaggaataaggctgtgggtgccccaagattatcaggaggatgacttggaagaagtggggggagggagggctgagtagagtcccaaatccctcacctcagtttccaatgcccccccaaccccagccctggaacagcctgaacccagcaaggccccaagggtgccacaaatacaaacaaatacaaatgcataaaatgctcaaatggtgtcactagtggccaagtctaaatagagcagagtcccagtgacatcccaaaagaggcagayggtggtcaaatgcactccgactaactcaccaagttccraagtttcaaagttccaaaattccaaagtttgtcacttctctaaaagtcactttcagtgcaccagtgaaatattggaggtagcaggcactgcagcaggaagagaaagagaggatccccaagacaaaagcatctaggcagctgcaggagactccctagcattccagccaaggggtcaggtagccacaagcaactggagcctacaggcagccccacaggccctgtccaatagaaaccagaccatgggcttgggcccccagagcacactgtatgggccactaaaattgtaactgaatgcaggtccacatgctcactgcctgcagagtccagttaacaagagtgaggcctggtagatagaaagtgactttattaaccacaactagtaaaggggaagtggccagattcccatcaaagcaaccactttgactatttcgggggaagggagggrtttaaaagaggaaaacttgattaaggagggcatgcaagagaattgtgctgagtacagtatctctgggtcttgtttttatgattatctttggtgccagtccacctggacctcaggctgacatcatctcaacagtggccgagttgttaattagctgcatggaagtaatctctggaattttgcagctaggtctccatgcttggtctgtcygtctcaagattacctcctggaacttctaagaaggcacataatagatactagcatgcagttagctaaatgtgcagggagtatatatggtgagaaagggagctattttatagctaagagaaaagrcttctgcagtttgcttcaaggttatatcttgaaacccaagagaagggaaaaatgttttaaaatatattatgaagttaagctgcccagttacgttaggaagatggaaattaaaaccacagtgagacaccattctcctcttccagagtggctaaatctaaaaagactaagcataccaagtgttggcaaagaaactggaattcttatacctcattggtgggactatcaaatagtataactactttggaaaacatttgataggacctactaatgctaaacagatatttacacactatggccaagcaatttcactcctgggacccacacagaagaaaggaattctgtgtctgcccaaagatggagaaattagtcatagtagccccaaaccrgaaaaatccaaatgcatatcaacatgagaatggagaaataaattgtgatatagtcatacaacagaaaactacatagcaatgaaaaagaacaaactgctatgtataacaacataggtaaaattgcaaagaaataaacttgaaaatcataagccatacaaaagaacatatgcagtgtcatttcatttagatgatgttccaaaccagataaagttagatttggtgataaaggtgagaatagaggttacctttggcaggaggtgatagtgactggaagagactactaggcctggcttcactaggcytaaagtccactaggttgctggaaatgttatataaatggatctggatgttatgtaaaatattctrtaaatacacataagtgtatattatatatttgtaaaaatttatcaagatgtaccattaagatttgtatgctctgctatatgctttatacctcaacaaaaaggaaaaaagtccacatttcataatttctaccaccaaatacatggagctcttgcaattttcattwattttaccaaaaagtagtggtaggaagcaccacttatctgatgggctcagatatttattggtgtagaaaaaaataaaaagacgcactaaatcatttgcaaactactataaaatttactgagaaaggtgtcatggcaatgaagattgctgatataaactgggtttttgaaatctcaggaccgtgttagacaaatacaaaaactgaaccattcttttttttccatgcatagaaawaaattacagatgagttgatgagtttggtagagaggtggggaataaaaccagaaagaaaagacaagaatatttgtgtcaccctgtcttgatgtaggagaaattcagtctaaacataaagacaagagaagaaaacatatggaatgtcatgaataattttaattttaaaactgcactgcaaaaacaggcaccataaataagaaggcaatgacaatcgaggaaaatatttgtracatatacaagacattaatatcctttatatataaagagctattaaaataaacaagaagttgaatatcctgatagaaaaataagcaagacatgaaagagacaacttacaaaataaaaatggtcaaaataaacayataaaaggttttacctgactcataaaaaatagaagttaaaacaaaagagatgtcattttgtccacctgtcaaattgacaaagttgaaaagacaatgctatcttgtgtttaccrggctgaattaaaatgaactctcttattattagtggtaaaagtataaattgatgcactctttctggargacaatttttcaatatgtatcaaaagatttttacccaattatttaattattgggaatttatcttgggaaaatgatcagagaattgtgtatttatgcagtagattgttaatctcaggttgccttgtttttcaaaaggataaaaagagaatattagaaacaactccacatgcatacatttgacaacttagatgaaacgaaccaatgtctcaaaaactacaatactctaactcacccaatataaaatagatactttgaatggctatctacagggctcaatactattaagaaactcatgcccaagaaaagaaatctccaggctcagatggtttactggaaaaacataacaaatattcacagattattcagtctcttccagaaaagakaataggmaggaacacttcccaattcattttatgaaaycagtgttatcctgatacaaaaaccagacaaagattgttcaaaaaaataccacagaccaatattccttatcaataaatgcaaaaactcttaacaaaatattggcaaatagaattcaacaatacataaaataaattatacaccatggctgagtggggtttattctggtgatggaagactgatccagtattcakaatcagtcagtgtaatccaccatatcaacaggctaaagaagaaaaatcacayaatcgtatctattgatggagaaaaaacatttgaacaaattcaacactcattcattatttaaaaataaacttgctgaggtaggaggattgcttgaggccaggagtttgagaccagcctgggcaacatagcaagacccccatctcaaaaaagacattagctggagagsggggtggtagtgcatacccgtagtcccagctactcaagaagttgagatgggaggatgacttaagcccaggagttggaggctgcagtgagccatgaccaagccactgcactccaccctgggcaacagagcaagaccctgtctctgaaaaaacagaaagtcttagaaaacaagaaatagaggaggagcgtcccttaactctatcaagtacatctacagctagcattacatttaatggtgaaagastgaatgcttatactctaagatcagtaacaaagcaaggatgtcctcactcgccactgttacccaacatatgtaatcctgaaagttgtagccagcacaataaggcaaggaagatgatgaaacacatacagattggaaagcaggtaataacactgttcttgcagacgacatgatggtctatgtagaaaatcccaaggaacctacaaacagaaaaccaaaacacttctagaactagtgagtttagcaaggtcacaggatacaagatcaagatacaaaatcaactagatttctatatattagcaataaactaattcgtaattataattacattttaaaatatgtgctatttacaatcacacaaaaaatggaacagtataaatccaaaaaatgtgtataggattcttatgctgaaaatcactrcatgtatgcatgtatatatgtgtgtgtgtaaactcatgtgtgtgttgtgtgtgtgtgtgaattaaatgcaatatctgtggactggattgtgctaggtgatgggtaaacagacaggaacaagacggagttggtacttgccaccaagttgctcacagtctagctgggaagtcagacactaagcccgtgaatgaaaatgtgttgggagcttcagagaagcagctctgagtgctcatggygtcaagcrctggaagaccagaccatgaggtcagaacatggaggcaagaacattcgggtttacaaagcttctacgtacatcacaacaatgctgtactccarttctaggtttctggaggagagactcacattgggccagtttgaatcacwaatctatgaatctatccttgaccccatcaaataagtgtgcgtgtgtgtgtgtcgtgggagacggggtaactcaatacaaatgwagcagctaagagtccccattttggataagggggtgaggaagaatcattttgcaccggttggatgtaccaagggccacagaaggaccagaaggagcaccaacatttaaggaatcagaggaagaggtgctgccgggaagagargcaagtgagaaggagcatccacagagtcagagagaaaggcagaatcagggcttcctgctgctgggcgagttgtgcagccgctccagctgcagtaggttgttaatcttaggtggttttgctctcagagttctccctctgagccatggaggtgatggtgcyatctgccccaaagggctgttgagtgtgcagagtgagacactgcacgctcagctcagtgatctgagttgtgagtatcgtggcttgggaacatggcttatgatgaagaggggctayggttttagcatctgggagtgcttttcttgtcaggctacagasacatgcgtttggaaaacaggaaggaagaagtccaagaatggcctttgccatggctcagctagaactgttggcaacatggccactcgtttcctctggatggatttgcagcagcttaaaattcaaagaaccgygcttccttcagtgattcraggagatctgaagcccaggcccctggcaaagtgttctctccagagacaacaataacacatggcatttatccctctcttccacagacctcagaggatgagccttctgaaaaggatgccctgcagtgtggccgcaatattgtggccgcaggttatgcgctgtacggtagtgcaaccctggtggctctctccacagggcaaggcgtggacctcttcatgcttgacccggtaggtacagaatatggcatcatctgtgcctggggactccatgggcctctgtgccttaatgccagttctctgcgataatgtcctggttattcctaatacttgttttggggaccaggggtcctgagagcctagtttggggagccaaaaccatcatcagaaaccatgaagggcctctgtcccagtgagggcactcrgggggaggagtgtcctgcagagccagttgcatcaactcaggccctctccttaaggagctcattttccaaaaatgcactcaatctctttggcttatgagaatgccatgatttaagaatcacaatgctgcaaatttccagcagaagcatgggttcgttagagcagcaccatccagtagaatgctccatgaatttcacttttaaatgctggatggcttgcccatcaattgtgaaatgctttgccaagtatactgaggtcttgtgaaaactcagataayatccaccaaagaacacgtcaaaacctcttgttcacttagaccaaaaggttaagtatttaagtttttgatttacagctgtttattgagcatctactgtgtcccaaagcaccactccagacagcggagatggagcattgatcaaacacacatgacagcccttgtggagttcacgtgttagtgcacatgtgtggagagaggggtttgcaaaatttcaaaatgacatggagttaacttacaaaacagagtttacagtatggaaacccagaaacttttcaaatagaatcttttcacctgtatgcccattagaccaagacccattgctgtgtcagtttgctaatgccccaatttccctttatgttcaaagaagctggcaaaccctgagaaattctatggcttgcaaatattaccctcagacaataaaacaccctttctaaagttgttgtagaataacagctaagagttagataattcttcgtaagtggtaggaatgtaaagtacctgtcctatgaaatttacatctattaatgcatttaaatgtyacagtgkccctatgagatatgtcctacaattattcccattttcagatggggaaagtgaggcgtagagagagtgagtaacttgcgcaaggtcaagctagtgactggtgtcaggagtcatgctccagcagtctgtgctttwattactctaccacactaaatttccaacacaactgctcttgagtacaagcaaaatatctccatgaacattctgagcagttctaaaggtgatgggagatgctttgactcagggacccaattcaaagattcccaggcacagacagagcctctgttttctgccctcagtcatgamagcagggcccagtctggacataggtgggcaccagagcttgtcaacatgacrgaaggaagagatgaaccatagcatctttccggatctctatgtattagcctgaaacccctttggatcacatctccctactaaaaaggacatttgagcaaagacccagtgcacaaagcttagtgcctgtttgacatccagcggaggtagcttgtggcagttgtcacagatasaaatgccatggaaggcggccagtagcttatggaggcagcattccctggtgggtcaaactgagcctgtgaggtctgtgggattgcagggctggtgatttgattttgtcagaacacacatattgttcaggcacagagagaccacctcctgttaaccaactctccattgtgggtaaagctcaatgtcaaggcattcatttacaaatgggagctgttgtttcttgtgaccaggatctggtgtctgataatcggtaacagggtgtatgagagcccatattaaaaatcagccgttgttggtgaccacacaatcagaacaaaggaacacattttccaggttaataaaaytgtggaaacaatattcccagggcctgagwgtcccggccccagccccaggagtggatcaacgtaaggcgttttcacccgccctgatgcagaatgagcgcctctgttcaggtggtgagtgagtgccactgttcagatgacagttgtgcatctccatcctctttgctggaaagcaacagcaaaattgaccccggctcaattaagtgaaaggagttactgcattgatgggaaagctgaggaccctggctaggaacgggcaggactagaggaccaggaagcaggaagcacggcagtggtctcgcaacatggccggtctggcctggacaccamccccagtgctgcgcctctcactcaggtttcaaatcctagggaggcgtatctcattttcaagctaaggtacatgcctgaccttggcctacaagaggcccagatatgagtcttcctagactggcatccaattcaaagcaagtcagggcacttttcagaagtagaaatcagcgctgggctgctccaaagcaacagacacccacagcaagttaaaggtcatgagtcaaagaccatcactcgtgcacctgtaataacccgaagttagawttagsaggcactgcagaggaaccatggggtgttgcataaggagggagttgagatgggcttataggacttggggttttgcttggtrattctaaagaggatttgaggaagagagggtcagtctggattggatattgtctggaagtgggtgcaattaatgactagttaccttaatcatttttatctaggaggcagagagattgaagtcactgatatagaagcagttgtcactcatgttaggcaggaaaggattgtttagttgtttttgttattgagtctccttggcactgacttgtttctgacagggacagtgtcacctctygtagcaacacctctrctatgtggagtcattctgtggccttgcctctttatattccgggaatacctctgatgttccttgggaaccttctggcctagctgccaactgtgagctgtcattttggagtttttcactctcaaaatcttggacattcatcaaaatggatctggtttccaggctctggttttcctcctagtgactkagacagacatgagcatttaaggtggtatctgccacaagctgatcccatttttagtgactgmtatcaccagaactagacataggggtatttgagagatgccctgcaggtactgaccacagtggctacaygggttgtggagagggactgggcacacttttattaatatgtctgaggattcctttagattttaccaactttttccttacgctgggtgaacacagtgtctgatgaaagcggcttcctcttttctccaggtaagagtgggataccagaaactgaatagtttctatgattgaatcactaacataaacaaaataactgtaccacacatttttttttttttttttgagatggagtcttgctctgtcatccaggctggagtgcagtggcgcgatctcggctcactgcaagctctgcctcccgggttcacaccattctcctgcctcagccccccgagtagctgggactacaggtgcccaccaccacgccyggccaattttttgtatatttagyaaagacggggtttcaccatgttagccaggatggtctcratctcctgacctcgtgatccacccrcctcggcctcccaaagtgctgggattacatgcrtaagccactgcgcccagcctgtaccacaaattaatggttaaaatgcatccctcatabgacaatgtaacttcttcctctcactgttgatggcctatcttcctgaaaacattaatctgsgggtgagaacttgggagatacacacagttgggttcaccataaatgaggagcctcactgacagtggaagatgcacaggaaaagaaagaagactatgggctgcttccttagaattgtcttcctgcttgctgtgttactgctagagcttcctgtgtgggctccatatggtccctattcttcccaccactcatgaaaacaccaaagagcaggytcagagtgaccacagccaagccccagctctgccagcaggcccccatcttctcctgctctgatgtggggattgtgcggttggcttgtttcctggcttctctcttcttcctggcatctctcttcatgttgctaggctcttggtgaatttgtcctggtggaaaaagatgtcaagattaagaagaaaggaaagatttacagcctgaatgagggctatgccaagtattttgatgcggccaccactgaatatgtgcagaaaaagaaattccctgaggtgagtgaagmaagccaggtgggtggcagacagaatgctgtccccatggggtcctgtttgggtggtggcttcaggggctttgctgaaagaggttggtgccactgtttatggctgtggtcagtatgaagatgatggactctgcctttcttcataagcattcagtatcttatatagctaaaatttaccttctaaaggtagtacttatctttacatttgagtttttccaggataaattctttataaagaaggcagagatcacatttacaaaattcagagctcasgccagatcctctctgaagtcatttgtttaagctccaacctatagactcactcagttgcatttgcttttagaataaataattatatgagaggccttcaaaaagttcatggaaaaatgaaattaaaagagattagaaacataaaatataaactttatttctcaacataagctccatcaagttcagatgcttttgtaaggcttcataccaaccctttaatccatctgtaaygaactgagatactgggaatttaatcttaaggcagtctttttaatgttatttgctgaagaaaaatgggtgccctgccaagaccagcttggtgggggagaccctaacccagcagagctagaggaattaaagacacacacacagaaatatagaggtgtgaagtgggaaatcacagccttcagagttgagagccccaaacagatttacccacctatttattaacagcaagccagtcattagcattgtttctatagatattcsattaactaaaagtatcccttatgggaaaggaagggatgggccaaattaaaggaataggttgggctggytaactgcagcaggagcatgtccttaaggcacagatcactcgtgctattgtttgtggcttaagaatgcctttaagcggttttccrccctgggcgggccaggtgttccttgccctcattccggtaaacccaaaaccttccagcgtgggcattaagaccatcatgaacatgtcacagtgctgcagagactttgtttatggccagttttggggccagtttatggccaggttttggggggcctgttcccaacagtgccctttaaaggttttttaagattargaaacawaaagaagtcaaaaggagctaaatcaggattatagtgattttccatcaaaactcttgcaaaattgccattgtttgatgagaagattaagcaggagcattcaygtggtggagaagaactctayggtgaactttcctgggctttttctgctaaaactgtggctttctcagaacactctcaaaataagcasatgtgggccaaggatgtttctccccaatgttgtaaaaatgaatgggtgtaattagtcaagggcaaattgtaycctacaccttcagaggcccttgctctcctcccccaagttacgagcatctatagttatccctccctcctgccctcgctccctccctcactctcacctatctatcatctatctatctatcatctatgtatctattttctatctatctathatctatctacctatatctttaactgagagatttctcgtagcttttcttttagagcaaaggtaagttagagtagaaacacctgtctctgttatgtcaagtccttctgggctaaaaaactaggagcttaggaatatgggttccatctctagttcctgatagttcactgtgtgtctgctgaaagattctttctgtatttaaatgttttgattttatgacttaatgttttccccaaatataaaaattgtgttcctgtgtaacacatcacataaagacaacaaaaaatataagaaaatgtaaacaaaattcatgtgtaagatactccaccctcaaaaaccccactgggaacatctctttttttttttttttttttttgaggkggagtcttgctctgtctccaggctgaagtggcacgatcttagctcactgcaacctccgcctccctggttcaagcgattctcctgcctcagcctcccgagtagctgggattacagcctcccgccaccatgcccagctaatattttgtatttttagtagagatgggatttcaccatgttggtcaggctggtcttgaacgcctgaccacaggtgatccacctgccttggcctcccaaaatgytgggattacaggcgtgaaccaccatgccagacccattgttttatttttaattgacatataataattgtacatatttatgggatacatactgatgtttcattatatataatatacagtgatcagatcagtataattaggaaatccatcatctcagacatttattatttctttgtgttgggaacattcaatatcctccttctagctttttgaaaatatgtcatatattattgttaaatatattcatcctacagtggttcagaacactataacatattcctatgatgcaggtgtaattttattttctacacttttattttagattcaggggtagttgtgcaggttkgttatataagtaaactcctgtcatgggggtttgctgtatagattgtytgtctcccaggtactaaacctggtatccaatacttatcttttctgctsctccccctcctccctccctccaccctcamgtaggccccagtgtctgttgtttccctctttgtgtccatgtgttctcatcrtttagctcctacttataagtgagaacatgtggcatttggtttcctatttccgtgttagtttacttaagataattaggccttcagctccacccatgttcctgcaaaaacatgatctcattcttctttatggctgcatagtattccattgtgtatatgtagcacatttctttatccagtctaccactgatgggcatttaggttgattccatatctttgctattgtgaatagtgttgcagtgaacatacatgtgcatgtgtctttacaatagaatgatttctattcctttgggtatatacccagtaatgagatggccgtggttggagagtggttggtatgagttcagttcttttgcatttgctgaggattgttttacgtctgattgtgtgttccaattttactgtatgtgctgtgtgtgatgagaagaatgtatatttttctggttttgggtggagagttctatagatgtctaacagatccatttggtctagtgttgattcgaggtcttgagtatcttcgttaattttctgcttcagtgattactgtcagtgaggtgttgaagtctgccactattattgtgggggggtgtctaagtctctttgaaggtctctaaggacttgctttatgaatctgggtgcccctgtgttaggtgcatattatttaggatagttaagtcttcttgttgaattgagccctttaccattatgtaatgtccttttygtcttttttgaactttattggtttaaagtctattttgtctgaaattaggattgcagcccctgcttttttctgctttctatatgtttggcttccatccctttattttgagcctataggtggcactgcatgtgggatgggtracttcctttttctttgtttgtttagcggctctyttaagattgctgcaggatattgtctcatactttaagcagtcctgcatttgttaagtccagtcacaaggtaaggtttgaggagctcataataaatgaaatgcacaattatataatcttttcaattcctacactagtgggtggaggatagggattcaagaaggcagaggtcacaccaactggacttgtgaccacgagcaggtgctggctaatcctgaaagccactggatcttgtctcttcgctttctgtcttctaggatggcagtgctccctatggggccaggtatgtgggctccatggtggctgacgtgcaccgcaccctggtctatggaggaatcttcctgtacccagccaaccagaagagccctaagggcaaggtaattctcccttgtccactggctgtgcatccggtcagggaggtgggggagctccctcccgtcacacctgctgtttggctactgcactgcttcatggcatgtctgtgtggggatgggcaggggaggaaaaatgaactctgtttcccttgagtgagtctccaggctgtgggaggtttgaagaagaaggcgacaggctgacgttatgtgactggtgattctcactggtcttaccccctccagcctcacacccaccgttcaccatgaaccagctgtgtgtctcactttccacaggctgcatctgacttttagcttcagcaccagctgatctgggatgatggtccctatagggagcctaataaaacttatcaacacacttcccagaacaaatgcatgtaaacgtacacattacatacaaattacacgttgagggagttcactgatgccctgaagtccgcccaagtatcccctagagaatttccaaacctcagaataagaacttctactcagaactcagccaatatatctggaaaggtagttcctggaaggtctaattgcaacttaatgatgcaaaacttaaaatacttgtattatcaagtgagaaccttatgatccagctatcttgcagagaacctcccataaaaatgcatctgaattttagccaatcacagaaatcgtaggtaagtagtcaaatcaaataaaggcctctgttttctctgacacaccaacaaccagcgacacatttttctgtctctcagagtcaccttgagatttgaattattcgaatgctaagaatcaaagccacgctgagagatctcacacagcacatgaagccagagagattttaataggttggtgtatcaggtgtttctcttcatgtgagtgcttagcccaggtgtattcacccactgaactaagaacactgataagcctgcagaagtggtgctgaaggaaagctaagcaccatggaggactaagtgaggcaagtagaagacatggacaatggacwttctttttttttttttttttttttttgagatggagtcttgctctgtcgcccaggctggagtgcagtggcaccatctaggctcactgcaagctccgcctcccaggttcacaccattctcctgcctcagcctcagagtagctgggactacaggcgcccgccaccacgcctggctaattttttgtatttttagtaragacggggtttcaccatgttagccaggatggtctcgatctcctgacctcgtgatccgcccgccttggcctcccaaagtgctgggattacaggtatgagtcacmgcgcccggcgaagacatggaaattcttagaaccactctggtcacttactcagttacattggggagaacataaagatcagttattactaattattcaaatgatcgtaaatgagtcagaaaatacycacatgggatcacatactcatgtcccttaagcacatgtcactccatagatagatctgcgtttgctgygcataaccaccacccatactgaaagttctgttggatcctaatctccgcatttctgctgtcatggtccctgtgccgacgtctctstgtgtgtgtgtgtctgtgtgwgcatgtgcamactcctatcctgtgtgtgtctgcatctgtatagctgtgtagatttaattgcagagaaagtacaggtcatggctggstgcggtggctcacgcctgtaatcctagtactttgggaggccaaggcgggtggatcacgaggtcagaagatcgagaccatcctggctaacacagtgaaaccccgtctctactaaaaatacaaaamataattagccaggcgtggtggcatgtgcctgtggttccagctactcgggaggctgaggcaggagaatggcgtgaacctgggaggcggagcttgcagtgagcygagatcgcgccactgcactccagcctgggtgacagagtgagattccatctcaaaaaaaaaaaaaaaaaaaaaaaaaaaatacaggtcacatgtcacatggcctgcaggccaaggtgccatgaagccctgggcattttgrtattaaatttcctacaacaggggcatctgaggtcagarcaaaagtaacttggctccaagacaagcgcattaggtactaatgctgagctttttttgattaaagtagttgactcaacaggataattgattacaatctgagactttattatctgataccccaaatcccccacataaaaggggagaaaaatgctgagcgctataagctgtcaaggtgagagtctccttggctagactgtcctggacagcatggcctccagtgtccctcctgtgggtaatgagggacagaactatctgcccccagacagcccgcatgcaccacaacttttttacacccttctggacacccactactttaagagccagaggtctagggtgagggcaccttacactgaccaaaatggcagtaaatacccccatggagtcttcacctactttctctcgaatgcctggatctccagcctagaccaaaggcatcatgttcctctccttaatatatataatatatacaatagaaaaaatatataataacattatataaatatataacatattatatgtaaatatatattatataatatataataacatataaatatataatagaaaaatagaaaaaaattaccataatatatgactctttctcaaagtagtttaaacatatcaccaaaacggactggaagaaaagaatggtaaggaaaggctgcacatagctgggtcaaccatttcgtaaggtgataatggagaatgaacttttgggaagttacacaggttgcactgatggggagaaagragaagatgatactgagtcatgcacagcagcagggcctcggccagaacgacaccctgaatctaaggtgatggggktgtgtgttgtgagtcaggctgggggcgtcatgacatcatcacagaaatagacctaaaaagtccattcaatccaaccccattcatttcaattcactgcgtactcacaggacacaggcagcctcctgccagttctcatgtgcctgcaggagggttagagaaggccttccttcctctgaacagcagccctggatcttgtgcagagactggcaagcagggcacaggctgatttcaacccagtttctgccctcggctgggacccctcgtgcaggaaacagtggccttgcttggacactttcttcgtttttgagacaggctcttgctctgtcacctagactggagggcagtagcatgatcacagctcacygcagccttgaactccggggctcagttgatcctcccacttcagcttcctgaatagctrggatcacaggtgtgcgctaccacacctggttaatttttaaattttttgtagagatggggtctcactatctcaaatggggtctcaaatgcctggactcaagcgatccttttgcctcggcctcccaaaatcctgggattacaggccggagccaacactttctctgtgtcggcactactgagaatamagatagtacagtgaccagctaggatggacagcagcctagagaggaagccaggcattaaagaggcctcagtgtgatgagtggtaccagaggggaagtacaggatgctatgggagtgcaaacgatgggatttcacttagtctaagggtcaaaagacaagaccattgaaacaccrgcaaactagttagacaagtcaaagcttaagatgtggagttcctccacacaatcccagccactgtggctgtccccagagagacaagccggcatggtcaaggtgaccttactgtcccatccaagcttgactctttaccagccttgaggtctcacatataaaggcttccaccmaggcctgcagcatcagtttgcttcttgttgaaccaagaaatagatgcctagatctcatatttccaagtcaagaggcaggtytctcataagcacaaggatcacaagatgggtagatacatggctcagtcacctggccagaggggcccccaaggcttctggatgagtgccatctgatgcatctggcctgctgtaggctctaaagctcgggcccactcttgcaaggtgcatggtgcgctcatgctagccagatggaagcrccgcagtacaaactcctcccccagctttaggggcatggctcgggacatttggccacttgcagagtttactcacctgcctctgttcctccacagctccggctcctgtatgaatgcaatcccgtggcctacatcattgagcaggcaggaggcttggcgaccacggggacccagcctgtactggacgtgaagcccgaggcaattcaccagcgagtccccctcattctggggtcaccagaggatgtgcaggaatatctcacctgtgtgcagaaaaatcaggcaggcagctagcgagtttgaccccacatgccctcttctgtttgtcttgcaccttgtctraggaccctaaatgaacgataaacagagatggtagctatgagtatrcaaaaggtaaatccacttaatcacatacagaagagcaacaacaaactgcttacgacaggtttggaagccacaggcgattctatggtcaatgtgaaggactagaaataaaaacccacatgtggaaagtgcgactttggcttgtcttctgtcagaaacagtggcaaatatggttataattccgtctgtcaacccacataattggcggctgcatgcttgtgggcaaagagtacatagattagttaagaatttgtcagctgggtgyggtggctcatgcctgtaatcccagcactttgggaggccgaggccagcggatcacggggtcaggagatcgagaccatcctggctaacacggtgaaaccccatctctactaaaaatacaaaaattagccgggcgtggtggygggcgcctgtagtcccagctactcgggaggctgaggcaggagaatggcgtgaacccgggaggcagagcttgcagtgagccgagatcgcgccattgcactccagcttgggtgacagagtgagattccatctaaaaaaataaaaaataaaaattgtcttgattggcttgaaatttgaacctagtgtcttatcctgtagtgattacctccctcaaacacatgtaaatttccaacttaatatcttagaagagtatttgtgtcttattttggataaayttgagttagaaatctcatggcaattaaattctgaaatttctgattgagcctatcttaagagtctataatttggatgaccaatcacagtttgaatggaaaatggggtcacttattgttaaagccagaaacagagtcaatatttagaaattaactacttttctaaacctcttaaccttgcattttcagtttttggggaaatgttttaatctattctagggactaactggtgtacactggttaaatgactcgtcacttgtccaaattatgttaagactggggaggggttggcttatgcatctgaaatctcatcttgttttaggaagaattgctctgaatatctatggacctggaggctaagaaagacattcatgaaagattgacaaatcaaatcaaatccagaagtatttaaagcaaaggtgcatcaggagaaagtcaggcttaacctagaaattcaagaatgattcaacacggaaaaatctattacagtaattcattaggttaggggaaggcagtgtcgggtgggaccaggcaaggccctggaggaagcaaggctctcctttcccactttagcttgggcagggtggggcatacagcccacagacacatttcaacttgagtgtcattctgtacgcaacatcgttcctcagtctagcatggcttggcaactttagcagacacagcaaaatcttattacacaaccaaaaaattttcaccttctcaaaaaggaacaaagattttcttcttttcccaaaatgaaaacttcataaaacatagatgaaagatattaaagcagacacaagtaaatggaaagatatcccatgtccatgcactagaagaatgttaaaatatctatatcacccaatgcgatctacagaatcaatgcaatcygtgttcaactacaagacattcttcatttaaatagaaaaagaatcttaaaattaacatggaagttcaaaatacctcagatagacaaaagaatstggaataaaaagaaaagctggagscatcacactacctgatttcaaaatatactacaaatctatggtaagcatggtactatcaaaacagtatggtactmtcaataaaaggggcaggggagagacagagagatgaacgaatgagacagacagacatagacaagtgaaacagaatagagaaatcagaaataaattcacgcgtttacggtcaactcatttttaacaaaggccccaagaacacacattcgggaaggacaatctcttcaataaactgtaccaggaaaacccaacacccacatgtacaagratacatctaggccattaccttaccatatacaaaaatctactcaaaataaagatttaaatgcaggacctgaaactatgaaactaccagagaagaaaacataggataaaatgcttcatgaaattggttaggacaaggaattttcaaatagacatcaacagcacaagcaacaaaagcaaagatgtaattacgttaaacttaaagccttttccaaagcagaggaagcaatcagnataatgaagacagaacccagagaatggaagaaagtrtttrcaaactatgcatcaggcaagaggttaatacacaaaacatctaaagaattcaaactactcaaaagtgaaaatacaaataatcttatttttaaaaatctacccaaaacctttgtccsccaccatttccccaccttcttttcctgaccgcatttggccctctccctctcaccaccctttctcttcctccatctaccccaaactttttcaccgttttctccctaccgtcatttcgcaaagccttctctactctcccgctcaccacgcttttccccatccatctacccaaacactttctcccaccgtattttttttcccaccgtattttcccccttctccctggccaccctctttttccccctcccgctgtcatcacgcccttttgctccttcatataagcaaaaacattttcccccgtcttttcccaaagccttttccctactgctgctcaccaccctcttttccccctttatctacccaaaaactgttttcctcatcgtctttcccccggctcctccttgccactctccttcccttctccatctacccaaaaacatttccccaccatcttttctcaaagccttttccccactcctgctcacctccctcttttccccatctaccccccaaaatttccccatcttttcacaaagtctgcccctgcttcccactcgttctcttctctcccctatactgcttgccaccctcctttttgccttccatctaccccaaactattttcccgtcttttccccaaacttctttccctgctccctctcgccaccctcttttctcctcctccttgtcaccctctttccctcctccatctacccaaacackttttacctaccatcttttcrccaccatctttcttttctgccactgttttttcgcaaaaccttgtcttcctcccgctggttaccctctttttccttctcccacttgctatcttcttttgctcctctacccaaaaacttctctccccaccatcttttcacaaaaccttctctccctactgctcgcccatttycccccccycaccactctttcctcttcccaattgccaccttcttttcccccttcatccacccataaactttctacccaccgtctttctgcaaaaccttccttccctccctctctgcaccctgtttttccacctccatctacccaaaaacttttttccccaccwtcttttccccatcgtctttttgcaacgccttctcctcctcgctatccttttttccctttggcactaaccacactctttacccacctctatctatcccaaaactatcttcttcttcctacccctccagccgcgctgcaatgtccaccgccaccaccaaccgcagcgaggcgasccgcgccacggtgccgcggctcaagcctccagcatacgacctgtgactccttttcctggtcttctaagccgggcactgagcagctcaatagaaacacacggaaacctaaaaaaacaamaacaaaaaaaacaacaacaaaaaaaacgtaactctgcttcagcattatttatatcctgaggttatgcgcatgccggttcctagactgcatgttctgattggatgagagcaagtcttaagacaaccaatcacagcatgaaaataaagtccaatcagagtaggcctagaggtttttctctcatccaatcagaayatgtagtccagggtctcctaacctcagtatataaagcatgctgaggcagcggcgcgtcatttctggcacttatgtgtgggtgtggggagctactacgtacccggcttaaagaactggaaggctcygtcacttttcgccccctggagcctggagcttggagcctggagcctggggcactccctccctgttggtggtggtggtgacggagcggtaggagggaggctagcagcgrgagcttctcctgccgggctggaagacagaaagaagaggcaccgccgcrtgctggaggctggagccggagcttgcgcctccgcggctcgcctcgctgcggttggtggtgamatcagagaccgcagctcggccacagtggtagaaatgtggtagggtaggtgagttatccagggctgcactgccctcttctgggggtaagggttgggtgtactataggggctcactgccaaaggctacactgcctgtggcattggactgtttgggggcactctctggggttgcattgctggtggtggaatggggggctacactgcccgaggtggcaggggtggtcgggagaggcaggttgtgtacactaacgtgtactgccagtggcggtggatggcttaggggcgttgtcttctgctgcactgtccgtggcaggggcgggttgggtggagttatctggggctacaatgctggcagtggggggtggtttaagggcgtggtccggtgctgcactgcctgtgactgggggtgcgctatcaggagctgcactgcccatggcggggtgagggtggggcgggtttggggcgctgtctagtgcagcaatacccgtggctgcgtcaggtgggcactatcgggtgctaacactgcctgcggccgaggagttgggatggtttgggggggtattggttacattgcctgcagctgttgggtgtgctatcccagggttacagggggcaggttaggggtgctatcgggggctatactgccagtggggttggtgggctgcagaggcagcagcggcagcgacagctgtggcctccttcctctttctggtggcctccatggaaggatggagttcttctcttcccggactccagactctagagggtgatctcttcgtgctcatgcaatcttgagcaccgcagggctctcacacccactgtggttccctggcccgcgccctcacgcacgctctgtgttgtggagaccatctgggactaccgggcagggaatagagggcaccacgggggagggagggggacagggcactgtgggtggaggcgtgaggaatgggaaccagcacttgggtggagagggctggctgggtctgagtttctcctacgcgggctccccgaagagcgcagtgccgatgggcccagcaattcctggccagctggacttggccaggagccggtttcagtgaaggcaccccaggccccagttcctggccagcttttgccagaaagagaggctggactttggaaggtgggtgtgagtgcctttaatgaaatggtccctgccgcccagtggccagcgtgacaaggtgaagctctaacacttccactccctgcatcctgttctaggtttctctggctttgcctgcgcaactgctcccagccaggctggaggaggaggaggagtcacctgtggtatgctggagcctgtagatggcktggctctgcagcttgcctcatgaggttggtggcagcaacagagactgcagcttgaccagagtggtaggagggcacccgtgggggccaagtgataggagccttgtagggtgggctggtgcattgagggcaacagcggttgtactggcatcggcgctagcgttggtagcagcggcaagtctgggggctgggaaggggagtaggagcgctcacttgcccatcctgtcctggggtggggacgaaccytaaggtgctataatgcgggcctcagtggcagtggtggaggtgcatgtagggtaaggaggagtcttcctccttgtcctgcaatctctggagggtgccctcctcctgctggcgcctgagccaggcatgagtggcagcattgtctaattcttaacaaaattcagggggtgactytttgtgtatcttttcgcttgttttttgttgtgatactcttggacttaactcaaatttcatgaatcgaggaaaggataaaaggtataataggccttctaattcacgcacctgttctttttcctttcttccagtctgtattttct

SEQ ID NO: 9881 - DNA, 58905 bp, Homo sapiens
ctgtctcaacaataacaacaacaaaagccatctcggaacatggtatttgggatctctgtctgctctctttggatcacctcaagaagtgggttcagagcccacatctgtgacattcctgagtgtgtctcaggtctacaagctgctccttgtatgtcatcttctggtcctgccattgactcagctgcaaacaaccacaaatcttccacttgggacacctgcctctcccacccaaaagactttacttggaaacaggtgactgcagaggacaaaaattaatgagcattatctcctgacttaaatcagagtgtagtttgttaaaacacacttagactgatcctaatataattttcaattttttaaaaaaggcatcccccctccagacctaataccactttccccatgtggcaggaggggaaggcagaacttcgtgtaagttaatgagtccgtatagaacattcctgggaacttgggcactctgccttgtcaccttttgcatttgacaatcaagttcctgtccttgttattttatttattattatttttttttttgagacagagttttgttcttgttgcccaggctagagtgcaatggcacgatcttggctcactgcaccctccacctcctgggttcaagcgattctcctgcctcagcctctcaagtagctgggattacaagcgcccactaccaggctccgctaatttttgtatttttagtagagacggggtttcaccatattggccaggctggtctccaactcctgacctcaggtgatccgcccgcctcggcctcccaaattgctgggatcacagatgtaagccactgcgcccttccctgtccttgtcattttaaaataattataccagcaggaggacgtccagacacagcatgggctacctggccatgcccagctggttggacatttgagttctttgcttggcactgtcctctcatgcgttgggtccactcagtagatgcttattgaattcctgggcctggggctgtggcagctgcctcgtcccttcacctcctggcttattctctccctccatatcttagcaatttcttcatgggaatgtccccaattagaaatttctattataccattatattaccaacatatatatatatacctggccgggcgcggtggctcatgcctgtaatcccagcattttggtaggccaaggcgggtggatcacctgaggtcaggagttcgaggccagcctgatgaccatggtgaaaccccatctctactaaaaatacaaaattaatcgggcatggtggcacatgcctgtaatcccagctactcgggaggctgaggcaggagaatcgcttaaacccaggaagtggaggtttcagtgagctgagattgtgccattgcactccagcctgggtaacaagagcaaaactccatcaaaaaaaataatatatgtatatatatattacaattttatatatatatacacattatgtaattttttttaccattttatatatatacattacgtaatggtaaaatgttttctctgcccccccagtagattgttagctccagaagagaaaggatcatgtctttggtttatctagatatgtccatcggcctggtacagtctctggcccatgttataggcaacaactacttgtagaatcggtgaatgcatgaatagaagaatgagtgaatgaatgaatagacgaaaggcagaaatccagcctcaggccgggcgtgggtggctcacacctgtaatcccagcactttgggaggccgaggcgggtggatcacaagatcaagagatggagaccaacctggctaacacagtgaaaccccgtctctactaaaaatacaaaacattagccgggcatggcggtaggctcctgtagtccgagctactagggagcctgaggcaggagaatggcatgaacccaggggggcggagsttgcagtgagccaagatcgcgccactgcactccagcctgggcgacagagcaagactcggtctcaaaaaaaaaaaaaaaagaaatccagcctcaaagagcttacagtctggtaagaggaataaaatgtctgcaaatagccacaggacaggtcaaaggaaggagaggctatttccagctgagggcaccccatcaggaaagcaccccagacttcctacaaytactagacacatctcgatgcttttcacttctctatcaatggatcgtctccctggagaataatccccaatgtgaaattacttagcacgtcaagttaggtagatccttgtgtacttcttggttgttcagagatcatcaaccagtgcaaacaatccccccatcaatacacagcagtgtctgcccctctcctccccaagccttccgaggcccttcctccgtgcctgaaccccctggacatatcatgtggcaaactgaagggtccaacgagatacaggaagtgaaacacgatgtacactgaaacgtgcaatacaaatatgcagcatgaagtgcctcggttcactaacccgagctatgctgggtgcttcttttctaccactttccttaatgcctatggacacctcattctgtggctgaagttccttgtgttcaattccccccatcttcattgaacatcctctgtgcagggacttgacccctgtcctgctagctttgcactgaggcaagttttgtccatgcctagtagtgccaccatctttactagatgaggtttctaaagagcttggcatggaaggaaagcctggggggccttagaagccatcacttaggaactgggagagctccaggcaagccaccttatctctttgggcctcagtatcctcactcacatccccatggtcagtagagtgccaagcacatrgtggacacgcagaagtattgatcatcttcctcacctcccctaggagagcccttgggaatccccatataatattctctgaagacctcaatccaatgagccragtaattgactcggtagcaaactcatggaaaggacattagaagccaaaaggaggtagagtatgtcccagtacaataaccagcctctgatctcaaggaagaaagaacagagctgcaggtgagaagtgtgcgcctcaaatcaccaaagtgagagtggaaggagcacccaccagtcccttggaggcgatccctaagaccggtgagaatggcttcgaaaaatgtgatcgtcctcaaccccacagtcttgaacctaacaggagatcttgaagcctgaaagacaccactttaggatcaacagcagatctgtgactttccacagcaggcacacagaaccctagagttagtcgaggttggacataggaagggcttccaaacacacagagaaattcatggatcctaaattataaaggsaggttctttaaaagaaccaagatgattctgagatttatcctgagcttttttttttttttttttttggatgcagagtctcgctctgtcgcccaggctggagtgcagtggcgtgatctyggctaactgcaacctccacctcgcgggttcaagcaattccctgcctcggcctcctgaatagctgggattacaggcgcctgccaccacacctggctaatttttgtatttttagcagagacgggatttcaccatcttggccaggctggtcttgaactcctgatctcatgatccacccaccttggcctccctaagtggtgggattacaggcgtgtgcccaacttttcctgagccttttgaggctgacaccagaggtgagaagcccagcctctccccactggccatgtggggagaggctccagcctgcagcaaccagggatctggcctcaagtgatgccccaacagtgggcgacttcccagtactgttaggagaatcccaagtctaattcaaagttgattttttactagcaatkaatgatagacatggtctccattgctcaaggctctgggaagatctagactagagaaaacgatcaccgacttctacccacacctgtgggcctcagttcttccctctggtccatggttaccacagtaaccccttgtaaaggtgtttccccaggggtccctagagtcctctgagtcaccataattctgggtcaacagaaatggagaggtaagaggagacactcccctgccctggctggtcccacgtgttcatggcagtaacctgtctggggagcctcgccacccctgtgtccacctgcagagttatgcagtggtccccaactagggcccctgccaccctcattcctaagggaggctggagacttcttccatggccgaaaatccacatctaagtccccggcactagcaaaaaggccctgtcatgggggctccctgccccagttgagattggaggaacatggaagaagctaaaataactaawtaactcagtagcatcacactacctgctctggagaaaaaaaaatttaatattattattttttgttttttgagatggagttctgctctgctgcacaggctggagtgcagtggcgcaatcttggctcacggcaacctctgcctcctgggttcaagtgattctcccgcctcagcctcccgagtagttgggattacaggctcatgccaccacgcccagctaatttttgtacttttagtagagatggagttttgccatgttggctagtctggccttgaactcctgacctcaagtgatccacccacctcaaagccacccaaagtttggggattacaagcgtgagccactgtgtccggcctggagaaaggactttaaatgacgcaatgtaggaagagcaaggttgtggagatctgctgccctggctgaggtagctcatgcaatcagtctctctgagccacagtctcttgatctgtgaaatcggaagaaaataatacctccttcacaagacaagtggcaggtcagatgtgagaatgcacaggcaggccctcggcaactggaaaagctctatacagatctgaaaaggaggaggagaaaaaagaggaggggcttccatggctggacagggcatctttctttttctttttctttttttttttttttttttttttgaggkggagtcttgctctgttgccaaggttggagtgcagcagcacgatctccgctcactgcaagctctgcctcccggattcacgccattctcctgcctcagcctcccgagtagctgggaatacaggcgcccgccactacgcccagctaacttttttgcatttttagtacagagtggatttcacctggttagccaagatggtcttgatctactgacctcgtgatccgcccgcctcggcctcccaaagtgctgggattacaggcrtgagccaccgcgcccagcctgatagagcatctttcggcgtgatgtgttctgagttccaaagctgaggaagagactcaaatcttcaagagctcttctaactttgagattctctgatggtttcagggctatgggaggaagagcttgtggtccgtgtctgctcccgggatttctgtttcttggtttgtgtctctgctgcaagtccaaggagctggggcaataccttgagtctgggttcttcgtccccagggacctgggggagccccagcaatgctcagggaaaggggagagcaaagtgtggggttggttctctctagtggtcagtgttggaactgcatccagctgactcaggctgacccaggagtcctcagcagaagtggaattcaggactgaatcgtgctcacaacccccacaatctattggctgtgcttggccccttttcccaacacacacattctgtctggtgggtggaggttaaacatgcggggaggaggaaaggrataggatagagartgggatgkggtcggtagggggtctcaaggactggctatcctgacatccttckccgcgtkcaggttggccaccatggcctgcdgccagagggcacccacstgacccttaaagagaggacaagttgggtggtatytctggctgacactctgtgcacaaccctcacaacactggtgacggtgggaagggaaagaygacaagccaggggrcatgatsccagcatgtgtgggaggagcttctaaattatccaytagcacaagcccgtcagtggccccatgcataaatgtrcacagaaacaggtggggkcaacagtgggagagaaggggccagggtataaaaagggcccacaagagaccrgctchagsatcccaaggcccractccccgmaccactcagggtcctgtggacagctcacctagcbgcaatggctrcaggtaagcgcccctaaaatccctttgggcacaaygtgtcctgaggggagaggcagcgacctgtagatgggacgggggcactaaccctcaggtttggggcttctgaatgtgagtatcgccatstaagcccagtatttgkccaatctcagaaagctcctggtccctggagggatggagagagaaaaacaaacagctcctggagcagggagagygctggcctcttgctctccggctccctctgttgccctctggtttctccccaggctcccggacgtccctgctcctggcttttggcctgctctgcctgccctggcttcaagagggcagtgccttcccaaccattcccttatccaggctttttgacaacgctatgctcygcgcccatcgtctgcaccagctggcmtwtgacayctaccaggagtttgtaagctcttggggaatgggtgcgcatcaggggtggcaggaaggggtgactttcccccgctgggaaataagaggaggagactaaggagctcagggtttttccygaagcgaaaatgcaggcagatgagcacacgctgagtgaggttcccagaaaagtaacaatgggagctggtctccagcgtagaccttggtgggcggtccttctcctaggaagaagcctatatcccaaaggaacagaagtattcattcctgcagracccccagacctccctctgtttctcagagtctattccgacaccctccaacagggaggaaacacaacagaaatycgtgagtggatgccttctccccaggcggggatgggggagacctgtagtcagagcccccgggcagcacagccaatgcccgtccttcccctgcagaacctaragctgctcygcatctscctgctgctcatccagtcgtggctggagcccgtgcagttcctcaggagtgtcttcgccaacagcctggtgtacggcgcctctgacwgcaacdtctatgrcctcctaaaggacctagaggaaggcatccaaacrctgatgggggtgagggtggcgccagggktccccaatcctggagccccactgactttgagagctgtrttagagaaacactgctgccctctttttagcagwcaggccctgacccaagagaactcaccttattcttcatttcccctcrtgaatcctccaggccwttctctacaccctgaaggggagggaggaaaatgaatgaatgagaaagggagggaacagtacccaagcgcttggcctctccttctcttccttcactttgcagaggctggaagatggcagcccccggactgggcagatcttcaagcagacctacagcaagttygacacaaamtcrcacaacgatgacgcactrctcaagaactacgggctgctctactgcttcaggaaggacatggacaaggtcgagacattcctgcgcatcgtgcagtgccgctctgtggagggcagctgtggcttctagctgcccgggtggcatccctgtgacccctccccagtgcctctcctggccctggaagttgccactccagtgcccaccagccttgtcctaataaaattaagttgcatcattttgtctgactaggtgtccttctataatattatggggtggaggggggtggtatggagcaaggggcaagttgggaagacaacctgtagggcctgcggggtctattgggaaccaagctggagtgcagtggcacaatcttggctcactgcaatctccgcctcctgggttcaagcgattctcctgcctcagcctcccgagttgttgggattccaggcatgcatgaccaggctcagctaatttttgtttttttggtagagacggggtttcaccatattggccaggctggtctccaactcctaatctcaggtgatctacccaccttggcctcccaaattgctgggattacaggcgtgaaccactgctcccttccctgtccttctgattttaaaataactataccagcaggaggacgtccagacacagcataggctacctggccatgcccaaccggtgggacatttgagttgyttgcttggcactgtcctctcatgcgttgggtccactcagtagatgcctgttgaattcctgggcctagggctgtgccagctgcctcgtcccgtcaccttctggcttcttctctccctccatatcttagctgttttcctcatgagaatgttccaaattcgaaatttctatttaaccattatatatttacttgtttgctattatctctgcccccagtagattgttagctccagaagagaaaggatcatgtcttttgcttatctagatatgcccatctgcctggtacaatctctggcacatgttacaggcaacaactacttgtggaattggtgaatgcatgaatagaagaatgagtgaatgaatgaatagacaaaaggcagaaatccagcctcaaagarcttacagtctggtaagaggaataaaatgtctgcaaatagccacaggacaggtcaaaggaaggaggggctatttccagctgagggcaccccatcaggaaagcaccccagacttcctacaactactagacacatctcgatgcttttcacttctctatcaatggatcgtctccctggagaataatccccaaagtgaaattacttagcacgtccagttaggtagatccttgtgtacttcttggttgttcagagatcatcaaccagtgcaaacaatccccccatcaatacacagcagtgcctgcccctctccccccgaggtcttccgaggcccttcctccgtgcctgaaccccctggacatatcatatggcaaactgaagtgtccaacgagatataggaagtgaaacacgatgtacactgaaacgtgcaatacaaatatgcagcatgaagtgcctcggttcactaacccgagctacgctgggtgcttcttttctaccactttccttaatgcctatggacacctcattctgtggctgaagttccttgtgttcaattccccccatcttcaytgaacatcctgtgtagggacctcacccctgtcctgctagctttgcactgaggcaagttctgtccatgcctagtagtgccaccacctttactagatgagacttctaaagagcttggcatggaaggaaagcccgggggccttggaagccatcacttagaaactgggagagctccaggcaagccacctcatctctttgagcctcagtatcctcactcacatccctatggtcagtagagtgccaagcacatggtggacacgcagaagtattgatcatcttcctcacctcccctaggagagcccttgggaatccccatataatattctctgaagacctcaatccaatgagccaagtaattgactcggtagcaaactcatggaaaggacattagaagccaaaaggaggtagagtatgtcccagtacaataaccagcctctgatctcaaggaagaaagaacagagctgcaggtgagaagtgtgcgcctcaaatcaccaaagtgagagtggaaggagcacccaccagtcccttggaggcgatccctaagaccggtgagaatggcttcgaaaaatgtgatcgtcctcaaccccacagtcttgaacctaacaggagatcttgaagcctgaaagacaccactttaggatcaacagcagatctgtgactttccacagcaggcacacagaaccctagagttagtcgaggttggacataggaagggcttccaaacacacagagaaattcatggatcctaaattataaaggcaggttctttaaaagaaccaagatgattgtgagattacgtagagtttttttttgtttttcttgatacagagtctcgctctgttgcccaggcaggagtgcagtggcatgatctcagctcgctacaacctccacctcccgggttcaagcaattccctgccacagccacctgagtagctgggattacaggcacctaccaccatgcgcagctaatttttctatttctagtagagacgggatttcaccatcttgaccaggttggtcttgaactcctgacctcatgatccacccaccctggcctcccaaagtggtgggattacaggcatgagccactgcgcccggcctattctgagccttttgaagctgacgccagaggcgcgaagcccagcctctccccactggccatgtggaggctctysctgagtagtctctcagcctgcaggagccaaggatctggacccaagtgatgccccaacagtgggcaacttcccagtactgttaggagaatcccaagtctaatgcaaagttgattttttaccagcaatgaatgatagacatggtctccattgctcaaggctctgggaagatctagactagagaaaacgatcatcgacttctacccacacctgagggcctcagttcttccctctggtccatggctgccatggtaaccccttataaaggtgtttccccaggggtccctagagtcctctgagtcaccataattctggggtcaacagaagtggagaggtgagaggagacactcccctgccctggctggtcccacgtgttcctggcagtaacctgtctggggagcctcgccacccctgtgcccacctgcggagttatgcagtggtccccaactagggcccctgccaccctcattcctaaaggaggctggagacttcttccatggccgaaaatccacatctaagtccccagcactggctaaaaggccctgtcatgggggctccctgtcccagctgacattggaggaaggatggtgggggaggcagggaccttcttctacttggagctcagggaccctcttccattcgcacctggctcctcctctttgctggtgctggaaggagcaggggaaagtggtgactccaccctcccttggccccatatttttcggagctggtatcatcgatgacacccctcttggatcctcacacaggcctgcctggagaacagctcacagcacagtgccctcccagcaggtgatgagtctggggtgctggtccggtaatgcttcaggagtgacggcagaaaaaggagctctgtcttcccctctgaaagtagggagatggcagggccccagcattcacatcctaggccacaggggtgtgggtgttcaatgttggttgccaacaccacagccaatcacttctagaagcatttgcttgtttgcttgcttgtgtttctacagtgtcaagtgctacatgctcttaaactcagggtgggggaagatttcaccactggagagggtggtctttcctgctcttatccctgggggcatctgatgcttgtgacttccagatggtatggaaatagccccaaccctgggcaccaggagacaggaggctcagtcctggccttctccgcctcagccttgtcctgctgtgaggtttccacaaggcaccccatgccactgggccattctcacctgggaattgagaaagaacaatctgccccttatggaaagacaaaatgaggcaaagggcccctgtgttgggggcaggatccctgcactcagagggatttagaagctgaaataactgggttgggggcggtgactcacgccagtaatctmagtacttagagaggccagggagggtggatcccctaaagtcaagagttcgagaccagcctggccaacatagtgaaaccccgtctctactaaaaaagtacaaaatttagcctggcgtggtggcgggcgactgtaatcccagctactaaacagggtgaggcaggagaatcacttgaacccaggaggtggaggttgctgtgaggcaacatcatgccactgcmctccagcctgggtgacagaatgagactccaactgaaaaaaaagaaagaaagagagagagagagacaaagaggaaggaaagaaagaaagaaagaaagagaaagaaagaaagaaaaggaaaggaggaaggaaagaaaaagaaaaagaaagaaagagaaagaaagaaagaaagaaagaaagaaagaaagaaagaaagaaagaaagaaagaaagaaagaaagaaagaaactaaaataactaaataactgagtaacaccacactacctgttctggagaaaggacttttttcttgttgttgtggttgttgaaatggagtcacactctgtcgcccaggctggagtgsagtggcgcgatcttggctcacagcaacctctgcctcctggattcaagtgattctaccacctcaccctccggagtaactgggattacaggcttgcgccaccacacacagctacttttgtatttctagagagttggtgttttgccatgttggctagtctggccttgaactcctgacctcaagtgatccacccacctcagcctcccaaagtgctgggattacaggcatgagccaccgtgcccggcctggagaaaggactttaaatgacacaaagtgggaagagcaaggctgtggagatctgctgccctggctgaggtagctcatgcaatcagtctctctgagcctcagtctcctgatatgtgaaatgggatgatamtcatacctcctacacaagacaagtggcaggtcagacgtgagaatgcacaggcaggcccttcgcaactggataggctctatacaggtgtggaaaggaggaggagaaaaaagaggacgggcttccatggatggatagggcatctttcggcgtgatgtgttttgagttccaaagctggggaagagattcaaatcttcaagagctcttccaactttgagattctctgatggtttcagggctatgggaggaagcgcttgtggtccgtgtctgttcccgggatttcggtttcttggtttgtgtctctgctgcaggtccagggagctggggcaataccttgagagtctgagttcttcgtccccagkgacctgggggagccccccacccaaccccccctccgccccgccccaaggctcagggaaaggggagatcaaagtgtggggttggttccctctagtggtcagtgttagcactgcatccagctgactcaggtgggcccaggagtcgtcagcagaagtggaattcaggactgaatcatgctcacaacccccacaatctattggctgtgcttggccccttttcccaacacacacattctgtctggtgggtggaggttaaacatgcggggaggaggaaaggaataggatagagagtgggatgtggtcgataggggtctcaaggactggctatcctgacatccttctcckcattcaggttggccaccatggcctgctgccagagggcacccacctgaaccttaaagagaggacaagttgggtggtgtctgtggttgacactctgtgcacaaccctcacaacgctggtgacggtgggaagggaaagatgacaagccaggggacatgatgccagcatgtgtgggaggagcttccaaattatccattagcacaagcccgtcagtggccccatgcataaatgtgcacagaaacaggtgggggcaacagcgagagagaaggggccagggtataaaaagggcccacaagagaccagctccagcatcccaaggcccgactccccgcaccactcagggtcctgtggacagctcacctagcggcaatggctgcaggtaagcgcccctaaaatccctttgggcacaacgtgtcctgaggggagaggcggcgccctgcagatgggacgggggcactaacctcaggtttggggcttctgaatgtgaatatcgccatctaaggccagatatttggccaatctctgaatgttcctggtccctggagggatggagagagagaaaaagaaaacagctcctggaacagggagagtgctggcctcttgctctgcggctcccttcttgccctccggtttctccccaggctcccggacgtccctgctcctggcttttgccctgctctgcctgccctggcttcaagaggctggtgccgtccaaaccgttcccttatccaggctttttaaagaggctatgctccaagcccatcgcgcacaccagctggccattgacacctaccaggagtttataagctcttggggaatgggtgcgggtcaggggtggcaagaaggggtgactttcycccactggggaagtaatgggaggasactaaggagctcagggttgttttctgaagygaaaatgcaggcagatgagcataggctgagccaggttcccagaagagtaacagtgggagctggtctccagcatagaaagcagtggtccttcttggtggggggtccttcccctaggaagaagcctatatcacaaaggaacagaagtattcattcctgcatgactcccagacctccttctgcttctcagactctattccgacatcctccaacatggaggaaacgcagcagaaatccgtgagtggatgctgtctcccctaggcggggatgggggagacctgtggtcagagcccccgggcagcacagccactgccggtccttcccctgcagaacttagagctgctccacatctccctgctgctcatcgagtcgcggctggagcccgtgcggttcctcaggagtaccttcaccaacaacctggtgtatgacacctcggacagygatgamtatcacctcctaaaggacctagaggaaggcatccaaatgctgatgggggtgagggtggcaccaggggtccccaatcctggaagcccactggcttcgagggctgggggagagaaacactgctgccctcttttcagcagtcaggcgctgacccaagagaactcaccwtattcttcatttcccctcgtgaatcctccaggcctttctctacaccctgraggggaaggaggaaaatggataaatgagagagggagggaacagtgcccaagcgcttggtctctccttctcttgcttcactttgcagaggctggaagacggcagccacctgactgggcagaccctcaagcagacctacagcaagtttgacacaaactcgcacaaccatgacgcactgctcaagaactacgggctgctccactgcttcaggaaggacatggacaaggtcgagacattcctgcgcatggtgcagtgccgctctgtggagggcagctgtggcttctaggggcccgcgtggcatcctgtgaccyctccccagtgcctctcctggccctgaaggtgccactccagtgcccaccagccttgtcctaataaaattaagttgtattgtttcatctgactaggtgtccttctataatattatggggtggaaggtggtggtatggagcaaggggtaggtggraagacgacctggagggccttcagggtctattgggaactaggccactgaaatataagaggtttggctgttcctgggccagaaaaaggctgacatatcactgctgtctattactcactaaggccattccaccagctcagtggtcccagcttgctggtcayagctcattggtcatcccagagatgacttgaaggcatttcttcctcccccaccatcaccagcaacaccaaacctagccccccaggagcgggaagaaatgaaaacaagatgggctattaagtgcagaggcaaaaactccccaacaggtgaggaaacaatggcatagaattacttgtgttcggaagaattttaagatgartattccttaagcccaactactctcgggaaatgagaacaatgcaaaaatgagtttgagacatatggwwccagagcatttggaatctgaattagggcaagggaagtggaagagagattttatttgcgggttgtaaatgcagtgccaacaggtgccaggtagataacaacgtaagcaatgagggctggatggcaggggataaatcccagatgacactcgcttcccttcaggggatgcaacacagaagggtgggaaccagcacaatctgcagaactcaagcccctgctgaggtgggacccagcccgcctgtcaccatcaggactgcagggacacggcttccagaccttctgattctttgagacagccaggacatccagactgttacgggaaatctaatatttaaataatggcaacacatactgaaaatcttttaagggcaaaaattaacccaaacacacatggtctccaagctgtctgtgagcaattttgttctaagagatgttgattggggtaayttggtgtaagggaaagaatcagaaagatttgggctgtatgcaatttagtgtcgctgaataaattacttgaccaagctgagataataatatattgctttacaaggattatgtgaggattaaatgcaatggtatttttgacatattatagtactgaagaaattgtagttatttctgcattgaatttttggatgttttataataataataaacatctgagatgtttattatttccaaataagcactaaagagcggtggttagttaagagtttactctcccaagcaccttggctaagtgactggtgacctaaatctatactaagatgctcacaggaactctagtatccaaaaatgatttcatgaagtcaggaattattttacaatgcaaataatcaaccccctaattaatcttctttagaagttctgattcttatgtgccataatgaatttttttgataacgagacccacttgtgttcatttttggctattttgcagttaataactcagtccttgggaagtggttcaaagctgaactaatcagaactctagagctgctgcatttctcagctcagaagacattcctgcatcttacgttgttcttctactattggaatttaaaattacggcattttggagttagaagggcctcataagtcagtctagtttcttctactttgggaatcttatcctacagcgtccattacagtcagtattccaattacaagtgtgtagcactagaaccaagggaatccctttcacaaggctcttcattctaataaaccactctcattgcagaaaactatttcttgcacaaagctggaatcaatattcctgcaatgtccttcatttggccttaaaattatttagaaatctcagtctttagaagtcgatggaatgagcacaattataattatctctcggcttgcgtgttttaaaaggaaatgtgagccatcttaataagtatttgttgaatgcacgtgacagtggaatgacaatgtccagcgcctacttgggtggctaagagggttctaaagtggggtggtcataacatataactgaactgcagggggagccacacgccagagactgtccacccagctcccctcgggtataggagaatccactcaaccactgctggttgagaattagaaagatactacctgactttgcacattttagaatataaaaagaccttaaagaccatctgctttaaactctttgatttacctactgttagtctacctttcagctcatcaacttggtgtggacggcaatttccgctgcaaatttgagatgcctagggtgttttctaaacgatgcattcgtgagccctcactccctgagattctgatataattagcctggaatgtggtccaggcaagagtagtttgaaaactttcccaggtgattctatcatgtaaacaaggttgagaaccactgtgttagggaccgcaaagatgagacccatgtgttcacagctgttgtattggtggaacagggaaaacggagaaaaaggagacgagaggcctgggccagttgtggtgccacctgctcctaattccaaccagtcatctaaaaagtgtttatcgtgagccagtcacagaaagacaaatactctctgattccagttagatgaggtactcagagcagtcaaattcgtagagacaaaaagtaggatggtggctgccagtggctgtggggagggatggaatagggagccatttaacgascacagggtttcagctgtgcaagatgaaaagggttctggagatggttggtggtgagggttgcatgacgatgtcaatgtacttgacgtgaccgaactgtacacgtaaaatggttaagatggaaatgtttatatcttctcacaactaaaaattgttaatagtttcttttgtttttgtttttgtttttgagacagaggctggagtgcagtggtggatcttggctcactgcaacctccgcctcctccygggttcaagtgattctcatgcctcagcctcctgagtagctgggattataagtgtgcaccaccacacagggcagatttttgtatttttggtaaagacagggtttcgccatgttggccaggctggtctcaaactcctggcctcaggtgatccaccctccttggcctcccaaagtgataggattacaggcgggagccaccaggcctggcccttaatggtattttctaatgaaaactcttcctgaagataagattatcgagactcgcacagggaagagttcagcaggcagagctccagtcatccttgacccctggcataatgttttactgactctgtcatttttttgaatttaccctaacctaaaatgaccacttctgaatatcttccatgagcattgttgaaatacacatggttggttttgtccctttatacacagttgagagcagaactgaccccktcctttttcttctgaattgtagggtctgggcttctcagccaagacaagctgacactttgcctggatgcttctttaattcagaaggccctggagtgctgaggcacacaatgagtacctctgggattagggtcaccaactcgtcctggtttgcaggagactttctcaatgtcaacactgaaagtcccacgttccttccaggaatccctcagctcaatgcaaactcagctcacaggactggtcaccctattagtagtcctaaatcttagggcaccaaactggggggaaagtaggggaaggagcaagaaaaagactagaaaaaccggaaagctgtgcacagtgtatatgacctttgatggccctcatggttatcatggatttctgattcttgctttgagtttactgtgattataatgatgtgcttaattaccactagaattatcagtgtaataataaaaaccaacaaatgtgaacacatgtctccagcaccatgctagtttattacaagtattatgtcatttctttctaactataattctctaaggtaaatactattattaatcctatggtaagaagtcccactaacgatgtaacttatgctttctcaggtctagagagaaagacaccagaatgtcaccctgaccatccttgagagcataaatggccaggcactgtggctcacgccagtaatctcagcactttggagggctgaggcgggaggaggtcacaagttcgagataagcctggccaacatggtggcaccccgtctcttactaaaaaatacaaaaattagccaggtgtggtggtgcacacctgtattcccagctacgaaggcatgagaatcgcttgagcccgggaggcagtgttgggctgggcccatcawgccactgcactccagctgggtggctgaggaagattctctctcaaaaataataagaaagaagataaaattttggagtattaaaggccactcttcctctggagataatcaaggtagctgcaatttaagtatgagctggttgctttaatgttcagaaagaatatgatcaaaaccatttagagggtggggcctcctcctatagacaatgaaggcaactacccttagaagctctattatactggaaaagagatatgagatccttcttgctttaagaatcaatgaagccgggcgtggtgactcactcctgtaatcccagcactttgggaggccgaggtgggcagatcacctgaggtcaggagtttgagaccagcctggccaacatgacgaaatcctgtttctactaataacacaaaaattagccaggtgtggtggtgcacacctgtaatcccagctactccagaggctgaggtaggaaaattgcttgaagccaggaggcagaarttgcagtgagccgaggtcgtgccactgcattccagcctgggagacagagcgagactccgtctccaaaaaaaaaaaaagaatcaatgagaaaggcctgcctgatctctggttgtgtggatccttcgggaaggaaagtgaacagaggttccaagtctacaagggaaaaagcccagcctactctgaagagctttgcgggacggctcatccaaactactgagctctaagaactggaaagctggaaaccccagcaagaggacacctgcagagctggaccaggccccgaagaagcagatcatcctccctcagagatctacagcaggtgggaacccagatctgcagacccgcttggtttgagggtactgtgtgggaccatctgtcaacactgacaccctgtagcagtgagaagcaaaggcagcagccggctgagcctccaggctcgccctgctggaactagaaagtccaagtggcccccttcttcctccctttttggttttgtttgcttttgtttttgttttgttcaagatggkgtctcgctttgttgcccaggctggartgcaatggcacgatctcrgatcactgcaacttctgcctcccacagtcaagcgattctcctgcctcagcctccccagtagctgggattacaggtgcacaccaccatgcctggctcattttccccttccttkttggattcgctgtgcttcaaggcactgaggccatgaggcagggtttgcagatacaggrtawctacagccctgatgcgactgatcctgacaccaaaatggctgtggatccctgcatggtgtggctgtatactcctgtctcttaaacctgcttcttaacttacttccccaaatgctcaattcagggaaggtggatgatttatattagactcacatgatgaaggagcagtagctccacctagtggaaacattgaggttgaaaaggtcatgttcggggatgatgctattttataaagtcaagatatttcgtgtccctccaggaagccttccttgattcgagttatgctttctcttaacaatctgttttcccagtcataggagttcatgcacaaatgtaatctcctacttgtttgtcttgctttcctaataaatttgtggaagccaggaacaatgttttgttcaccactgtatccccactgccttgtatgtggtgaaaccaaagggttacttttacacttaatctatagcaccagactcaggggaggtctgggaagaatgggaaaacgttttccctctgctgtctgatgccatggttttttctagctggtatctgcaatttggaaagctatggacctctctctatctggaagtctgaactttagcttttctttttgcttgtgtttcctttgttttgcttttgagacagggtctggctatgtcacccaggctggagtgcagtgcatgatctcaactcgctgcaaccctccacctcccgcgcccaagtgatcctcccacctcagactctcaagtagctgggactacaggcacgtgccactatacctggctaagttttgtgttttttgtagaaatggggtttgccatgttgcccaggctattcgcaaactctggggctcaagtgattcgcccgcctcagcctcccaaagtgctgggattacacgctgagccaccgccccggsctgaatttcagttttgaaagcagtttacataggctgccaccctgagctaatgcaccccctgccccgggctggttgtttatgctatcaacacggtattttttccttagaaattgtacttaaagttataaaatgcagccgggagcggtggctcatacctgtaatcccagcactttagaaggccgaagtgggtggatcacgagatcaggacttcaagaccagcctggccaagatggtgaaaccctgtctctactaaaaatacaaaaaattakctgggcatggtgatgggcacctgtaatcccagctacttgggaggctgaggcagagaaatccttgaacccaggaggtagaggtggaagtgagccaaaatcacgccattgcactccagcctgggcaatagagcgagactgcatctgaaaaaaaaaaaaagtgataaaatgcaaccatttgacataacaagagctttcagcaatgacacagaagggaagggaactgcatttggacatcataaaaccacttttatttttaccatagcaacattccagtgaacatttcttgactgacttgggagaaaakatctggttttgtgattcctcacgccttctccgagggtgaatatactctttccgaaggacagggaaggaggctgaaccataaaatcatatgaacattttcacaagaggattcctcttgaagcttcaaggaaattgtttacagtcagaaraaaatatgcacttcttgatgaaaacagagagtaaacattgcaactctaacctagacacctatatgggtaaaaaaaagaaaactggcaaatgcgaactcacagttgatcactctatgaaaaggaattcagagatgtttggagctcttaacctaagaggccaatttcatggaagaactctaccttctacttcagagacagaacactgggctagatasgatgcttgtctggcccgaagtggaatttcttaccatctgtatactcccccaagacccacaacagatggttactgagttgcagcttgccactgatccttaatgatgtcaacaagctcagctctgggagctggcactccasaagcccaggtcaggggagcaagggaaagtggagatgggaacagagctctgattcctrgccccatatttgatacttactcccttcaaagtcctgtccmtggactacaaatttagctcccagttagtaatcaaaaacccatgaaatatgagttgtatttctaagatatgcctgactgtagtatgatgtttaagagaaaagggcagtgagaaccatgaagaaacggcaagatcttttctttttttttttggatctaagagtggactgatgaagcacctggcaaggagcaagaggccttcttacaaatcaaacattgagactgagattcctaatgactagrgtgagctctaaagagaaaggtggctgggygcggtggctcacacctgtaatcccagcattttggggggccaaggtggscggatcacttgaggtcaggagtttgagaacagccyagccaacatggtgaaaccccatctctacgaaaaatacaaaaattagacaggcatggtggtatgcacctgtaatctcagctactggggaggctgaggcaggagaatcacctgaacccaggaggctgaagttgcagtgagccgagatcgcatcattgcactccagcctaggcgacaacagtgagactccatctcaaaaaaaaaaagagagagagagagaatggtgagattgtggacatattggacacacaggacatggggcatggggrcctgaaacacygttttacaggacagatgtacacaaataggaatgcagcctgccattgtgtttcttcctttctcctctatcccttctcccatccctgggaaaccacagtagcagaastctcattcaatcaaatagctgtcaattatatgagttgyacttttctcttcctgaacagcaaactggctttcctcctctttgtcctcctctttctgcctgtagagcaatttcytcctgtcyactttgcagggccgatagctcaaatacagtgctatggtgatgacacccactccaagggcaacggtaataatgacaaagagggtagagctkattccttcatccagtcctgcccaagcacagaagatagagttaggaaagtctgagagtacaaagatcacccaccccagcccaccaggcccacttctgagtctcattcttcccaacctagtagaatctttcttattttcatgcttggataagaatcccaaacccctgaggggtttccatcctgggcctggcagcagggcagcaaaggttaccttgaacaatgacagcaatgtctttgctgacagagcccagctggttagtggctgtgcagcagtaggttccagtgtggttctgggttgccttctgtggcacttcaaggtcaaagaccaccccattccaggtacacaccaaggctggagctgggtttccctttgggacgcaggcgagcgtgtgttccatcccttccagccaggtctgtttggcagagcaactggattcctctaaccatggcttgyctgcaaaaacagtttcccraagagctgagttcagtgcaccacactccctccctaccttcaycccctgctccctctcctcccctcacccaaatgctgtccccttcacycaacagctttccttcccaagggagcactagcagctccctgctttgagccaactcttctttcccactttccgtatgggcagggagtcccagatgaaacctagggtgttcttatggatttggactaaawtataatgctgctctgtccatggtggccctggggcccctgcttcccatgtttgtttctcggtgggtaaggagctaggtaacagtgaactcagagatgaggatttttctacttttctttttggttttttcgttgttttgtttgtttctttctttgtttgtttgcttgtttttgagacaaagtcagtctcacttcttcgccctggctggagtgcagtagtgtgatctcggctcatgacaacctctgcctcccrggttcaagcaattctcgtgcctcagccgctccagtaactaggattatcggcaaatgccaccacccccgctaatttttctatttttagtagagatcagtttcaccatgttggccacgctggtctcaaactcctgacttcaggtgatccacatgtctcagcctcccaaagtgttgggattacaggcatgagccaccacgccggcctatcctgagccttttgaagctgacgccagaggtgcaaagcscagcctctccccactggccacrtagaggctcttgttgggtagtctctcagcctgcagcagccagggatctggcctcaagtgatgccccaacagtgagcgacttcccagtactgtcaggggaatcccaagtctaattcaaagttgattttttaccagcaatgaatgatagacatggtctccattgctcaaggctctgggaagatctagactagagaaaatgatcattgacttctacccacacctgtgggcctcagttmttccctctggtccatggttggcatggtaaccccttacaaaggtgtttccccaggggttcctagagtcctctgagtcaccataattctgcggtcaacagaaatggagaggtgagaggagacactcccctgccctggcaggtcccacatgttcctggcagtaacctgcatggggagcctcgccacccgtgtgcccacctgcggagttatgtagtggtccccaactagggcccctgccaccctctttcctaagggaggctgcagacttcttccatggccaaaaatccacatctaagtccccagcactggctaaaagrccctgtcatgggggctccctgtcccagctgacaytggaggaaggatggtgggggaggcagggaccctcttctacttggagctcagggaccctcttccattcccacctggctcctcctctttgctggtgctggaaggagcaggggaaagtggtgactccaccctcccttgaccccatatttctcagagctggtatcatcgatgacacccctcttggatcctcctacaggcctgcctggagaacagctcacagcacagtgccctcccagcagatgatgagtctggggtgctagtccagtaatgcttcaggaatgacggcagaaaaaggagctctgttttctgctctgaaagtggggagatggcagggccccagcattcacatcctaggccacaggggtgtgggtgttcaatgttggttgccaacaccactgccaaccacttctggaagcgtttgcctgtttgtttgcttgtgtttctacagagtcaagtgctagatgctcttaaactcaggggggaagatttcaccactagagagggtsstctttcctgctgccatctctgggggcatctgatgcttgtgacctccagattatattgaaatagccccarctctgggcaccaggagacaggaggctcagtcctggccttctctgccttcaccttttcctgctgtgaggtttccacaaggcaccccatgccactgggccattctcacctgagaattgagaaagaacaatctgccccttatggaaagacaaaatcaggcaaagggccccttgtgttgggggcaggatccctgcactcagagggatatagaagctgaaataactgggttgggagcggtggctcatgccagtaatctcagtactttgggaggccagggagggtggatcacctaaagtcaagagctcgagaccagcctggccaacatagtgaaaccccgtctctayttaaaaagtacaaaacttagcccggcatagtggcgggcgcctgtaatcccagctactagggagrctgaggcgggagaatcactggaacccaggaggtggaggttgctgtgaggcaacatcatgccactgcactccagcctcrgagacagaatgagactccatcaaaaacaagaaagaaagaaagacaaagagagaaagaaagaaagaaagaaagaaagaragagagagagagagagagagagagaaagaaagaaagaaagaaagaaagaaagaaagaaagaaagaaagaaagaaagaaagaaggaaagaaagaaaggaaactaaaataactaaataactgagtagcaccacaccacctgctctggagaaaggacttttgttgttgttgttgttgttgttgtcgttgttgtggttgttgaaatggagtctcactctggcgcccaggctggagtgccatggcccaatcttggctcacggcaacctctgmgtcctgggttcaagcgattctacctcctcaccctccggagtaactgggattgcaggcttctgccaccacacacagctacttttgtatttttaagagatggagttttgccatgttggctagtctggccttgaactcctgacctcaagtgatccacccacctcagtcttccaaagtgctgggattacaggcatgagccaccatgcccggcctggagaaaggactttaaatgacgcaatgtgggaagagcmaggttgtggagatctgctgccctggctgaggtagctcatgcaatcagtctctctgagcctcagtctcctgatctgtgaaatgggatgatastcatacctcctacacaagacaagttgcaggtcagacgtgagaatgcacaggcaggcctttgacaactggataagctctacacaggtctggaaaggaggaagagacaaaagaggacgggcttccatggctggatagggcctctttcggcgtgatgtgttctgagttttaaagctggggaagagactcaaatcttcaagagctcttccaactttgagattctctgttggtttcaggactatgggaggaagcgcttgtggtccgtgtctgttcccgggatttctgtttcttggtttgtatctctgctwcaggtccaaggagctgrggcaataccttgagtctgggttattcrtccccagkgacctgggggagccccaccgcctccgccccaaggttcagggaaaggggagagcaatgtgtggggttggttctctctagtggtcagtgttagcactgcatccagctgactcaggtgggcccaggagtcatcagcaaaagtggaattcaggactcaatggtgctcagaacccccacaatctattggctgtgcttggccccttttcccaacacacacattctgtctggtgggtggaagttaaacacgcggggaggaggaaaggaataggatagagagtggaatggggtcggtaggggtctcaaggactggctatcctgacagccttccccgcgttcaggttgaccaacatggcctgcagccagagggcacccacctgacccttaaagagaggacaagttgggtggagtctgtggctgacactctgtgcacaatccttacaacactggtgatggtgagaagggaaagacgacaagccagggggcatgatcccagcatgtgtgggaggagcttccaaattatccattagcacaagcccgtcagtggccccatgcataaatgtacacagaaacaggtggggtcaagcagggagagagaactggccagggtataaaaagggcccacaagagaccggctctaggatcccaaggcccaactccccgaaccactcagggtcctgtggacagctcacctagtggcaatggctccaggtaagcgcccctaaaatccctttgggcacaacgtgtcctgaggggagaggcagcgccctgtagatgggacgggggcactaaccctcaggtttggggcttatgaatgtgagtatcgccatctaaggccagatatttggccaatctctgaatgttcctggtctctggagggatggagagagagaaaaaaaacaaacagctcctggagcagggagagcgctggcctcttcctctccggctccctccattgccctccggtttctccccaggctcccggacgtccctgctcctggcttttgccctgctctgcctgccctggcttcaagaggctggtgccgtccaaaccgttccgttatccaggctttttgaccacgctatgctccaagcccatcgcgcgcaccagctggccattgacacctaccaggagtttgtaagttcttggggaatgggtgcgggtcaggggtggcaagaaggggtgactttcccccactggggaagtaatgggaggagactaaggagctcagggttgttttctgaagcgaaaatgcaggcagatgagcataggctgagccaggttcccagaaaagcaacaatgggagctggtctccagcatagaaaccagcagtccttcttggtggggggtccttctcctaggaagaaacctatatcccaaaggaccagaagtattcattcctgcatgactcccagacctccttctgcttctcagactctattccgacaccctccaacatggaggaaacgcaacagaaatccgtgagtggatgccgtctcccctaggcggggatgggggagacctgtggtcagggctcccgggcagcacagccactgccggtccttcccctgcagaatctagagctgctccgcatctccctgctgctcatcgagtcgtggctggagcccgtgcggttcctcaggagtatgttcgccaacaacctggtgtatgacacctcggacagcgatgactatcacctcctaaaggacctagaggaaggcatccaaacgctgatgggggtgagggtggcgccaggggtcrccaatcctggaaccccactggcttcgagggctgggggagagaaatactgctgccctctttktagcagtaaggcgctgacccaagagaactcaccttattcttcatttcgcctggtgaatcctccaggcctttctctacaccctgaaggggagggaggaaaatggatraatgagagagggagggaacagtgcccaagcgcttggcctctccttctcttccttcactttgcagaggctggaagacggcagccgccggactgggcagatcctcaagcagacctacagcaagtttgacacaaactcgcacaaccatgacgcactgctcaagaactacgggctgctctactgcttcaggaaggacatggacaaggtcgagacattcctgcgcatggtgcagtgccgctctgtrgagggyagctgtggcttctaggtgcccgmgtrgcatcctgtgacccctccccagtgcctctcctggccctgaaggtgccactccagtgcccaccagccttgtcctaataaaattaagttgtatcatttcatctgactaggtgtcattctataatattatggggtggaaggtggtggtatggagcaaggggtaggtggaaagaagacctggagggccttcaaggtctattgggaactaggccactgaaatataaraggtttggctgttcctgggccagaaaaaagctgacacatcactgctgtctattactcactaaggccattccaccagctcagtggtcccagcttgctggtcacagcycattggtcatctcagagatgacttgaaggcatttyttcctcccccaccatcaccagcaacaccaaacctagccccccaggagcggaaagaaatgaaaacaagatgggctattaagtgcagaggcaaaaactccccaacaggtgaggaaacaatggcatagaattacttgtgttcggaagaattttaagatgagtattccttaagcccaactactctcgggaaatgagaacaatgcaaaaatgagtttgagacatacagaaccagagcatttggaatctgaattagggcaagggaagtggaagagwgattttatttggggttgtaaatgcagtgccaacaggtkccaggtagataacaaygtaagcaatgagggctggatgggaggggataaatcccagatgacactcrcttcccttcgggggatgcaacacagaggggtgggaaccagcacaatctgcagaactcargcccctgctgaggtgggacccacccagcctgtcaccatcaggactgmagggacacggcttccagaccttctgaccttttgagacagccaggacatccagacttttacaggaattctaacatttaaacactggcaacacatattgaaaatcttttaagggcaaaaattaaccsaaacacacatggtctccaagctgtctgtgagcaattttrttctaagagatgttgattggggtaacttggtgtaagggaaagaatcagaaagatttgggctgtatgtaatttagtgcccccgaataaattacttgaccaagctgagataataatatattgctttacaaggattatgtgaggactaaatgcaatggtatttttgatatattatagtactcaagaaattctagctatttctgcattgaatttttggatgttttgtgttttctgatggagtgtctaaatacctgtagtgaaattatattgttttcctaatgacaattaggaaataataaacatctcagatgtttattatttccaaataagcactaaagagcggtggttagttaagagtttgctctcccaagcaccttggctaagtgactggtgacctataaatcgatgctaagatgctcacaggaactctagtatccaaaaatgatttcataaagtcaggaattgttttgcaatgcaaataatcaaccccccaattaatcttctttagaagttcgattcttaaatgctataatgaattttcttgataatgagacccacttgtattcatttttggctattttaccattaataactcagtccttgggaagtggttgaaagttgaactaaacagaattctggagctgctgcatttctcagctcagaagccattcctgcatcttgcattgttcttctactatcgggctttaaaattatggcattttggagttagaagggcctcataagtcagcctagtttcttctactttgggaatcttatcctacaacatccattacagtcagtattccatttacgagtgtgtagcactagaaccaagggaatcactttcacaaggctcctcattctattaaaccactctcattgcaaaaaactatttcttgcacgaagctggaatcaatattcctgcaatgtccttcatttggccttaaaattatttagaaatctcagtctttagaagttgatggaatgagcacaattataattatctctcggcttgcgtgttttaaaaggaaatgtgagccatcttaataagtatttgttgaatgcacgtgacagtggaatgacaatgtccagcgcctacttgggtggctaagagggttctaaagtggggtggtcataacatgtwactgaactgcaggsggagccacactccagagactgtccacccagctcccctcgggtataggaaactccactcaaccactgctggttgagaattagaaagatactaccaactttgcacattttaaaatataaaaagaccttaaagaccatctactttaaactctttgatttacccactgttagtctacatttcagctcatcaacttggtgtggacrgcaatttccgctgcaaatttgagatgcctagggtgttttytaaacgatgcattcgtgagccctcactccctgagattctgatataattagactggaatgtggtccaggcaagagtaatttgaaaactttcccaggtgattctaacatgtaaacaaggttgagaaccaccgtgttagggaccgcaaagatgagacccatgtgttcacagctgttgtactggtggaacagggaaaacagagaaaaaggagatgagaaaaaggagaaaaaggagatggcagttgtggtgccacctgctcctaattccaaccagtcatctaaaagtgtttatcgtgagccagtcacaaaaagacaaatactctccgattccagtcagatgaggtactcagagcagtcaaattcatagagacaaaaagtaggatggtggctgccagtggctgtggggagggatggaatagggagctatttaatgagcacagggtttcagctgtgcaagatgaaaagggttctggagatggttggtggtgagggttgcatgacgatgtcaatgtacttgacatgactgaactgcacaggcaaaatggttaagatggaaacgtttatatcttctcacaactaaaaattgttaatagtttctttttgttttgtttttgtttttgtttttgagacagaggctggagtgcagtggtgggatcttggctcactgcaacctccgcctcctcccrggttcaagtgattctcatgcctcagcctcctgagtagctgggattataagtgtgcaccaccacacagggcagatttttgtatttttggtaaagacagggtttcgccatgttggccaggctggtctcaaactcctggcctcaggtgatccacccaccttggcctcccaaagtgataggatcataggcaggagccaccaggcctggcccttaatggtattttctawygaaaactcttcctgaagataagattagtgagactcgcacagggaagagttcagcaggcagagctccagtcatccttgacccctggcataatgttttactgactctgtcattttttttgaatttaccctaacctaaagtgaccaattctgaatttcttccatgagcattgtcgaaatacacatggtgggttttgtccctttatacacagttgagagcagaactgaccccttcccttttcttctgaattacagggtctgggcttctaggccaagacaagctgacattttgcctggctgcttctttaattcagaaggccctgaagtgctgtggcacacaatgagcaccgctgggattagggttaccaactcgtcctagtttgcaggagactttctcaatgtcaacactgaaagtcccacgttccttccagggatccctcagctgaatgaacactcagctaacaggactggtcaccctattagtagtcctaaatcttagggtaccaaactgtggggaaagtaggggaaggagcaagaaaaagactagaaaaaccggaaagctgtgctcggtgtatatgacctttgatggccctcatggttatcatggatttctgattcttgctttgagtttactgtgattataawgatgtgcttaattaccacyagaattatcagtgtaataataaaaaacaactaatgtgaacacatatctccagcaccatgctagtttattacatgtattgtgtcatttctttctaattataattctctaaggtaaatactattattaatcctatggtaagaagtcccactaacgatgtaacttatgctttctcaggtctagagagaaagacaccagaatgtcaccctgaccatccttgagaggataaacggccaggcacggtggctcacgccagttatctcagcactttggagggctgaggcgggaggasgtcacaagttcgagacaagcctggccaacatggtggcaccccgtctcttactaaaaatacaaaaattaccaggtgtgatggtgcacacctgtattcccagctactgaggcrcgagaatcacttgagcccaggaggcagagttgcactgagcccatcatgccactgccctccagctggatggctgagcaagattctctctcaaaaatagtaagaaagagggtaaacttttggagtattaaaggccactcttcctctggagataatcaaggtagctgcaatttaagcataagctggttgctttaatgttcagaaagaatatgatcaaaaccatttagagggtggggcctcctcttatagacaatgaggcagctacccttagaagctctattatactggaaaagagatatgagacccttcctactttaagaatcaatgaagccgggtgtggtggctcacgcctgtactcccagcattttgagaggccaagctgggcagatcacctgaggtcaggagtttgagaccagcctagccaacatgatgaaatcctgtttctactaataacacaaaaattagccgggtgtggtggcgcacatctggaatcccagctactccagaggctgaggcaggaaaattgcttgaagctgggaagcagaagttgcagtgagccgagattgygccactgcactccagcctgggagacagagcgagactctgtctccaaaaaaaaaaaaaaagaaaagaaaaaaaagaatcaatgagaaggggctgcctgcctgaccactggttgtgtggatccttcgggaaggaaagcgaacagaggttccaagtctacaagggaaacagcccagcctactctgaagagctttgcgggacggctcatccaaactactgagctctaagaactggaaccctggaaaccccagcaagaggacacccgcagctggaccaggccccgaagaagcagatcatcctccctcagagatccacagcagctgggaacccggatctgcagacccgcttggtttgagggtactgtgtgggaccatctgtcaacactgacaccctgtggcagtgagaagcaaaggcagcagccggctaagcctccaggatctccctgctggaactagaaagtccaagtggcccccttcttccctctttttttkgttttgtttgttttgttttttgtttgtttgcttttgtttttgttttcttcaagatggggtgtcactctgttgcccaggctggagtgcaatggtgcaatcttggctcactgcaacctcagtatcccrggttcaagcgattcttctgcctcagcctccccagtagctgggattacaggtgcacaccrscatgcctggctcatttttcccttcctttttggattcgctgtgcttcaaggcactgaggccatgaggcagggtttgcagatacagggtaactacagccctgatgcgactgatcctgacaccaaaatggctgtggatccctgcatggtgtggctgtatactcctgtctcttaaacctgcttcttaacttacttccccaaatgctcaattcagggaaggtggatgatttatattagactcacatgatgaaggagcagtagctccacctagtggaaacattgaggttgaaaagktcatgttcsgggatgatgctattttacaaagtcaagatatttcgtgtccctccgggaagccttccttgatccgagttatgctttctcttaacaatctgttttcccagtcataggagttcatgcacaaatgtaatctcctacttgtttgtctagctttcctaatatatttttggaagccaggaacaatgttttgttcaccactgtatccccactgccttgtatgtggtgaaaccaaagggttacttttacacttaatctatarcaccagactcaggggaggtctgggaagaatgggaaaacgttttccctctgctgtctgatgccatggttttttctagctggtatctgcaatttggaaggctatggacctctctctatctggaagtctgacctttagctttcatttttgttcctttattttgcttttgagacagggcctggctccgttgcccaggctggagtgcagtgcatgatctcaactcgctgcaaccctccacctcccgtgctcaagtgatcctcccacctcagactctcaagtagctgggactacatgcatgtgccmctatacctggctaagttttrtgttttttgtagaaatggggttttgccatgttgcccaggctattcgcaaactccagggctcaagtgattcacctgcctcagcctcccaaagtgctgggattacaggcgtgagccaccacaccarcctgaatttcagttttgaaagcaggtcaaataggctgctgccctcagttaatgcacccccggccctgggctggttgtttatgctatcaacacggtattttttccttagaaattgtacttaaagttataaaatgcagccgggagtgatggctcaggcctgtaatcccagcactttagaaggccgaggtgggtagatcacgaggtcgggacttcaagatcagcctggccaaggtggtgaaaccctgtctctactaaaaatacaaaaaattagctggtcatggtggtgggcgcctgtaatcccagctactcttaatctatagaggctgaggcagagaattgcttcaacccgggggtggagtttgaagtggrcygaaatcacaccactgcactccagcctaggcaaagagcgagactccatctaaaaaaaaaagttataaaatgcagccatttgacataagagcttttagcaatgacacagaagggaagggaactgcatttggacatcataamaccacttttatttttaccatagcaacattccagtgaacatttcttgactgatttgggagaaaacatctggttctgtgattcctcacgcctwctccgagggtgaatatactctttcycaaggacagggaaagaagctgaaacataaaatcatatgaacattttcacaagaagattcctcttgaagcttcaaggaaattgtttacagacagaagaaartatgcacttattgatgaaaagggagagtaaagattggaactttaacctagatgcccatatgggtaaaaaaaagaaamctggcaaatgcgaactcacagttgatcactctatgaaaaggaattcagagatgtttggagctcttaacctatgaggccaatttcatggaagaactctaccttctccttcagagacagaatactgagctagataggatgcccgtctggcccraagtggaatttcttaccatctgtatactcccccaagacccgcaacagatggttactgagttgaagcttgccactgatccttaatgatgtcaacaagctcagctctgggagctggccctccagaagcccaggtcaggggagcaagggaaagtggagatrggaacagagctctgattcctggccccatatttgatacttactcccttcaaagtcctgtccttggactacagatttagttcccagttagtaatcagaaaaccatgaaatatgagttgtatttctaagatatgcctgactttagtatgatgtttaagagaaaagggcagtgagaaccatgaagaaacggcaagatcttttctttttttttttttggatctaagagtggactgatgatgcacctggcaaggagcaagaggccttcttacaaatcaaacattgagactgagattcctaatgaatagagtgagctctaaagagaaaggtggctgggcgcggtggctcacacctgtaatcccagcaytttgggaggccaaggtggscggatcacttgaggtcaggagtttgagaccagcccagccaacatggtgaaaccccatctctacgaaaagtacaaaaattagacaggcatggtggtgtgcacctgtaatcccagctactggggaggctgaggcaagagaatcacctgaacccgggaagctgaagttgcagtgagcccgagatcgcatcattgcatccagcctagggcacaacagcgagactccatctcaaaaaaaaaaaaagagacagagagagaaaggtgagcttgtggacatattggacacacaggacatggggcatgggggcctgaaacaccgttttacaggacagacgtacacaaaggggaatgcagcctgccattgtgtttcttcctttctcctctatcccttcttccctccctgggaaaccacagtagccagaagtctcattcaatcaaatagctgtcaattatatgagttgtacttttctcttcctgaacagcaaatggctttcctcctctttgtcctcctctttctgcctatagagcaatttgcctcctgtccactttgcagggccgatagctcaaatacagtgctatggtgatgacacccactccaagggcaacggtaataatgacaaagagggtagagctgattccttcatccagtcctgcccaagcacagaagatagagttaggaaagtctgagagtacaaggatcacccaccccagcccaccaggcccacttctgagtctcattcttcccaacctagtagaatctttcttattttcatgcttrgataagaatcccaaacccctgaggggtttccatcctgggcctggcagcagggcagcaaaggttaccttgaacaatgacagcaatgtctttgctgacagagcccagctggttagtggctgtgyagcggtaggttccagtgtggttctrggttgccttctgtggcacttcaaggtcaaagaccaccccattccaggtacacaccaaggctggagctgggtttccctttgggacgcaggygagcktgtgttccatcccttccagccaggtctgtttggcagagcaactggattcctctaaccgtggttkgtctgcagaaacagtatcccaaggagctgagttcagtgcaccacactccctccctacttcaccccctgctccctctcctcccctcacccaaatgctgtcccctycacccaacagctttccttcccaagggagcactagcagctccctgctttgagccaactcttctttcccactttccgtatgggcagggagtcccagatgaaacctagggtgttcttatggatttggactaaawgataacsctgctctgtccatggtggccctggggcccctgcttcccatgtttgyttctcrgtgggtaaggagctaggtaacrgkgaactcagagatgaggatttttctacttttctttttggttttttttggttgtttgtttgttttggagacaaagtcagtctcactycttcgcccwggstggagtgcagtggcgcgatctcggctcatgacaacctctgcctcccaggttcaagcaattctygtgcctcagccgctccagtaactaggattacaagcgcatgccaccacacccggctaatttttctatttttagtagagatcagtttcaccatgttggccacgctggtctcaaactcctgacttcaggtgatccacatgtctcagcctcccaaagtgttgggattacaggcatgagccaccacgccggcctatcctgagccttttgaagctgacgccagaggtgcaaagcgcagcctctccccattggccatgtggaggctcttgttgggtactctctcagcctgcaggagccagggatctggcctcaagtgatgccccaacagtgggcgacctcccagtactgtcaggggaatcccaagtctaattcaaagatgattttttactagcaatgaatgatggatgtggtctccattgctcaaggctctgggaagatctagactagagaaaatgatcattgacttctacccacacctgtgggcctcagttcttccctctggtccatggttaccatggtaatcccttataaaggtgtttccccaggggtccctagagtcctctgagtcaccataattctggggtcaacagaagtggagaggtgagaggagacactcccctgccccggctggtcccacgtgttgctgtcagtaacctgcctggggagccttgccacccctgtgcccacctgcggagttatgcagtggtccccaactagggcccctgccaccctcattcctaagggaggctggagacttcttccatggccgaaaatccacatcgaagyccccagaactggctaaaaggacctgtcatgggggctccctgtcccagctgacattggaggaaggatggtgggggaggcagaaagctacatggagctcagggaccctcttccattcccacctagctcctcctctttgctggtgctggaaggagcaggggaaagtggtgactccaccctcccttggccacatatttctcagagctggtatcattgatgacacccctcttggatcctcacacaggcgggcctggagaacagcccacagcacagtgccctcccagcaggtgatgagtctggggtgctggtccgataatgtttcaggaatgatggcagaaaatggagctctgtyttcygctctgaaagtggggagatggcagggccccagcattcacatcctwrgccacaggggtgtgggttttcaatgttggttgccaacaccacagccaaccacttctrgaagcatttgcttgtttgcttgcttgtgtttctacagagtcaagtgctagatgctcttaaactcaggggggaagatttcaccactagagagggtgctctttcctgctstcatctctgggggyatctgatgcttgtgacctccagattatattgaartagccccaaccctgggcaccaggagacaggaggctcagtcctggccttctctgccttcaccttgtcctgctstgaggtttccacaaggcaccccatgccactgggccattctcacctgagaattgagaaagaacaatctgccccttatggaaagacaaaatsaggcaaagggccccttgtgttgggggcaggatccctgcactcagagggatatagaagctgaaataactgggttgggagcagtggctcacgcaagtaatctcagtactttgggaggccagggagggtggatcacctaaagtcaagagttcgagaccagcctggccaacatagtgaaacccccgtctctactaaaaaagtgcaaatcttagcccggcatagtggtggacgcctgtaatcccagctacttgggaggctgaggcgrgagaatcaccggaacccaaaggtggaggttgctgtgaagcaacatcatgccactgaactccagcctgggtgacagaatgagactccatctcaaaaaaaaaaaaaaaaggaaatgaagctaaaataactaaataactgagtagcaccacactacgtgctctggagaaaggattttttttttttttttttttgagatgtagactcgctctgtcatccaggctggagtgcagtggcgcaatcttggctcacagcaacctctgcctcctgggttcaagcgattctcctgcctcagcctcccaagtagctgggattacgggctcgtgccaccatgcccagctaatttttgtatttttaggagagatggagttttgccatgtgggttagcctggtcttgcactcctgaccttaagtgatccacccacctcagcctcccaaagtgctgggattataggcatgagccaccgtgcccggcctggagaaaggactttaaatgacgcaatgtgggaagagcaaggttgtgaagatctgctgccctggctgaggtagctcatgtaatcagtctctctgagcctcagtctcctgatctgtgaaatgggatgatagtcatagctcctacacaagacaagyggcagktcagacgtgagaatgcacaggcaggccyttgrcaactggataagctctacacaggtctggaaaggaggaggagacaaaagaggaggggcttccatggctggatagggcgtcttttggcgtgatgtgttctgagttttaaagctggggaagagactcaaatcttcaagagctcttccaactttgagattctctgttggtttcaggactatgggaggaagcgcttgtggtccgtgtctgttcccgggatttctgtttcttggtttgtatctctgctacaggtccaaggagctggggcaataccttgagtctgggttattcgtccccagggacctgggggagccccccccccccacacccacacccacccccacccccacccccatccccacgccccgcccccgcccccgccccaaggctcaggtaaaggggagagcaaagtgtggagtttgttccctctagtggtcagtattagcactgcatccaggcgggcctgtctcagrcgagcccaggagtcagcaaaagtggaattcagcactgaatcatgcccagaacccccgcaatctattggctgtgctttggccccttttcccaacacacacattctgtctggtgggtggaggggaaacatgcggggaggaggaaaggaataggatagagagtgggatggggtcggtaggggtctcaaggactggctatcctgacatccttctccgcgttcaggttggccaccatggcctgctgccagagggcacccacgtgacccttaaagagaggacaagttgggtggtatctctgctgacattctgtgcacaaccctcacaacgctggtgatggtgggaagggaaagatgacaagtcagggggcatgatcccagcatgtgtgggaggagcttctaaattatccattagcacaagcccgtcagtggccccaggcctaaacatgcagagaaacaggtgaggagaagcagcgagagagaaggggccaggtataaaaagggcccacaagagaccagctcaaggatcccaaggcccractccccgaaccactcagggtcctgtggacagctcacctagcggcaatggctgcaggtaagcgcccctaaaatccctttgggcacaatgtgtcctgaggggagaggcggcgtcctgtagatgggacgggggcactaaccctcaggtttggggcttatgaatgttagtatcgccatctaagcccagtatttggccaatctctgaatgttcctggtccctggagggaggcagagagagagagagaraaaaaaaaacccagctcctggaacagggagagcgctggcctcttgctctccagctccctctgttgccctccggtttctccccaggctcccggacgtccctgctcctggcttttggcctgctctgcctgtcctggcttcaagagggcagtgccttcccaaccattcccttatccaggctttttgacaacgctatgctccgcgcccgtcgcctgtaccagctggcatatgacacctatcaggagtttrtaagctcttgggtaatgggtgcgcttcagaggtggcaggaaggggtgamtttcccccgctgggaagtaatgggaggagactaaggagctcagggttgttttctgaagtgaaaatgcaggcagatgagcatacgctgagtgaggttcccagaaaagtaacaatgggagcwggtctccagcatagaccttggtgggcggtccttctcctaggaagaagcctatatcctgaaggagcagaagtattcattcctgcagaacccccagacctccctctgcttctcagagtctattccaacaccttccaacwgggtgaaaacgcagcagaaatctgtgagtggatgccttctccccaggtggggatggggtagacctgtggtcagagcccccgggcagcacagccactgccggtccttcccctgcagaacctagagctgctccgcatctccctgctgctcatccagtcatggctggagcccgtgcagctcctcaggagcgtcttcgccaacagcctggtgtatggcgcctcggacagcaacgtctatcgccacctgaaggacctagaggaaggcatccaaacgctgatgtgggtgagggtggcaccagggatccccaatcctggggccccactggcttccagggactggggagagaaacactgctgccctctttttagcagtcaggcgctgacccaagagaactcaccgtattcttcatttcccctcgtgaatcctccaggcctttctctacaacctgraggggrgggaggaaaatggatgaatgagagagggagggaacagtgcccaagcgcttggcctctccttctcttscttcactttgcagaggctggaagatggcagcccccggactgggcagatcttcaatcagtcctacagcaagtttgacacaaaatcgcacaacgatgacgcactgctcaagaactacgggctgctctactgcttcaggaaggacatggacaaggtcgagacattcctgcgcatcgtgcagtgccgctctgtggagggcagctgtggcttctagctgcccgggtggcatccctgtgacccctccccastgcctctcctggtsgtggaaggtgctactccagtgcccaccagccttgtcctaataaaattaagttgcatcattttgtttgactaggtgtccttgtataatattatggggtggaggcgggtggtatggagcaaggggcaggttgggaagacaacctgtagggccttcagggtctattgggaaccaggctggagtgcagtggcacgatcttggctcgctgcaatctccgcctcctgggttcaagcgattctcctgcctcagtctcccgaatagttgggattccaggcatgcacgaccaggctcagctaatttttgtatttttggtagagacggggtttcaccatattggccagtctggtctccatctcctgacctcaggtaatccgcccgcctcggcctcccaaattgctgggattacaggtatgagccactgggcccttccctgtcctgtgattttaaaataattataccagcagaaggacgtccagacacagcatgggctacctgrccatgcccagccagttggacatttgagttgtttgcttggcactgtcctctcatgcattgggtccactcagtagatgcttgttgaattcctgggcctggggctgtgtcagctgcctcrtcccatcaccttctggcttattctctccctccgtatcttagctttttacttcatgggaatgtttccaattcgaaatttctattttaccgttatatatttacttttttgctgttttctcggcccccagtagattgttagctccagaagagaaaggatcatgtcttttgtttatctagatatgcccatctgcctggtacaatctctggcacatgttataggcaacaactacttgtggaattggtgaatgcacgaatagaagaatgagtgaatgaatgaatagacgaaaggcagaattccagcctcaggcagggcgcggtggctcacgcctgtaatcccagcactttgggaggtcgaggcaggtggatcacgaggtcaggagttcgagaccatcctggctaacacagtgaaaccccacctctaaaaatacaaaaaaattagctgggcaaggtggcgggygcctgtactcccagctactcgggaggctgaggcaggagaatgtcatgaaccccagggggcagagcttgcagtgagccgagatcgcgccactgcactccagcctgggtgacagagcaagactcggtctcaaaaaaaaagaaagaaagaaatccagcctcaaagagcttacagtctggtaaggggaataaaaatgtctgcaaatagccacaggacaggtcaaaggaaggagaggctatttccagctgagggcaccccatcaggaaagcaccccagacttcctacaactactagacacatctcgatgcttttcacttctctatcaatggattgtctccctggagaataatccccaaagtgaaattacttagcacgtcaggttaggtagatccttgtgtacttcttggttgttcagagatcatcaaccagtgcaaacaatccccccatcaatacacagcggtgcctgccccttgcctccccagaccttccgaggcccttcctccgtgcctgaaccccctggacatatcatgtggcaaactgaagggtccaacgacatacaggaagcgaaacacgatgtacactgaaaygtgcaatacaaatatgcagcatgaagtgcctcggttcactaacccgagctacgttgggtgcctcttttctaccactttycttaatgcctatggacacctcattctgtggctgaagttccttgtgttcaattccccccatcttcattgaacatcctctgtgcagggacttgacccctgtcctgctagctttgcactgaggcaagttctgtccatgcctattagtgccaccatctttactagatgaggtttctaaagagcttggcatggaaggaaagcccaggggccttggaagccattacttaggaactgggagagctccaggcaaaccatcttatctctttgggcctcagtatcctcactcacatccctatggtcagtagagtgccaagcacatggtggacacacagaagtattgatcatcttcctcacctcccctaggagagcccttgggaatccccayataatattctctgaagacctcaatccaatgagccgagtaattgactcagtagcaaactcatagaaaggacattagaagccaaaaggaggtagagtatgtcccagtacaataaccagcctctgatctcaaggaagaaagaacagagctgcaggtgagaagtgtgcgcctcaaatcaccaaagtgagagtggaaggagcacccaccagtccctcggaggcgattcctragaccggtgagaatggcttcgaaaaatgtgatcgtcctcaaccccacagtcttgaacctaacaggagatcttgaagcctgaaagacaccactttaggatcaacagcagatctgtgactttccacagcaggcacacagaaccctagagttagtcgaggttggacataggaagggcttccaaacacacagataaattcatggatcctaaattataaagggaggttccttaaaagaagcaagatgattgtgagattatcatcagcttttttttttctcttgatacagagtcttactctgtcacccaggctggagtgcagtggcatgatctcggctcgctacaacctccacctcccgggttcaagcaattccctgccacagcsacctgagtagctcggattacatgcgcctgccaccacgcgcagctaatttttgtatttttagtagagacgggatttcaccaycttgaccaggttggtcttaaactcctgacctaatgatccacmcaccttggcctcccaaagtggtgggattacaggtgtgagccaacgcacccgacctatccagagccttttgaggctgatgctagaggtacaaagcccagcctctccccactggccatgtggaggctcttgttgggtagtctttcagcctgcagcagcgagggatctggcctcaagtgatgccccaacagtgggcaacttcccagtactgtcaggagaatcccaagtctaattcaaagttgattttttactagcaatgaatgatagacatggtctccattgctcaagggaagatctagactagagaaaaggatcaccaacttctayccacacctgtgggcctcagttcttccctctggtccatggttgccatggtaaccccttataaaggtgtttccccaggggtccctaacgtcctctgagtcactataactctggggtcaacagaagtggagaggtgagaggagacactccccttccctggctggtcccacatgttcctggcagtaacctcggcacccctgtgcccacctgtggagttatgcagtagtccccagctagagcccctgcccccctcattcctaagggaggcttcccttacgaatggccaaaaatccacatctaagtccccagaactggctaaaaggtcctgtcatgggggctccctgtcccagctgacattggargaaggatggtgagggaggcagggaccctcttctacttggagctcagggacccacttccattcccacctggctcctcctctttgctggtgctgggaggagcaggggaaagtggtgacaccaccctcccttgaccccatatttctcagagctggtatcattgatgacacccctcttggatcctcacacaggcttccctggagaacagcccacagcacagtgccctcccagcaggtgatgagtctgkggtgctggtccggtaatgcttcaggaatgatggcaraaaawggagctctgtcttccgctctgaaagtggggagatggcagggccccagcattcacatcctaggccacaggggtgtgggttttcaatgttggttgccaacaccacagccaaccacttctagaagcatttgcctgtttgcttgcttgtgtttctacagcrtcaagtgctacatgctcttaaactcagggtgggagaagatttcaccactacagagggtgttctttcctgctctcatctctgggggcatctgatgcttgtgacctccaggtggtatggaaatagccccaaccctgggcaccaggagacaggaggctcagtcctggccttctctgccttcaccttgtcctgctacgaggtttccacaaggcaccccatgccactgggccattctcacctgggaattgagaaagaacaatctgccccttatggaaagacaaaatcaggcaaagggccccttgtgttggggrcaggatccctgcactcagagagatttagaagctgaaataactgggttgggggcrgtgactcacgccaktaatctcagtactttgggaggccagggagggtggatcacctaaagtcaagagttcgagaccagcctggccaacatagtgaaaccccgtctctactaaaaaagtacaaaacttagcccggcatagtggtgggcacctgtaatcccagctacttgggaggctgaggcgggagaatcactggaacccaggaggtggaggttgcagtgaggcaagatcatgccactgcactccagcctgggagacagaatgagactccatcaaaaacaagaaagaaagaaagaaggaaggaaggaaagaaggaaggaaggaaggaaggaaggaaagaaagaaagaaagaaagaaagaaaaagaaagaaagaaggaaggaaggaaagaaggaaggaaggaagaaaggaaggaaggaaagaaagaaagaaagaaaaagaaagaaagaaagagaaagaaaaaggaaagcaagaaagaaaagaaagaaagaaagaaagaaaaagaaagaaggaaagaaaagaaactaaaataactaaataactgagtagcaccacaccacctgctctggagaaaggacttttgttgttgttgttgttgttgtcgtcgttgttgtggttgttgaaatggagtctcactctggcrcccaggctggagtgccatggcccaatcttggctcacggcaacctctgcgtcctgggttcaagcgattctacctcctcaccctccggagtaactgggattgcaggcttctgccaccacacacagctacttttgtacttttaagagatggagttttgccatgttggctagtctggccttgaactgacctcaagtgatccacccacctcagtcttccaaagtgctgggattacaggcatgagccaccrtgcccggcctggagaaaggactttaaatgaygcaatgtgggaagagcaaggttgtggagatctgctgccctggctgaggtagctcatgyaatcagtctctctgagcctcagtctcctgatctgtgaaatgggatgatastcatasctcctacacaagayaagtggcagrtcagacgtgagaatgcacaggcaggcctttgacaactggataagctctacacaggtctggaaaggaggaagagacaaaagaggacgggcttccatggctggatagggcmtctttcggcrtgatgtgttctgagttccaaagctgggaagagactcaaatcttcttttttttttctttttttttaattattattattcttttactttaagttttagggtacatgtgcacaatgtgcaggttagttacatgtgtatacctgtgccatgctggtgtgctgcacccattaacttgtcatttagcattaggtatatctcctaaagctatccctccccctccccccaccccacaacagtcyccagagtrtgatgttcccctgagactcaaatmttcaagagctcttccaaccttgagattctctgatggtttcagggctgtgggaggaagcgcttgtggtccgtgtctgttcccgggatttctgtttcttggtttgtgtctctgctrcaggtccaaggagctgrggcaataccttgagtctgggttmttcgtccccagtgacctgggggagccccaccgcctccgccccaaggttcagggaaaggggagagcaatgtgtggggttggttctctctagtggtcagtgttagcactgcatccagctgactcaggtgggcccaggagtcatcagcaaaagtggaattcaggactcaatggtgctcagaacccccacaatctattggctgtgcttggccccttttcccaacacacacattctgtctggtgggtggaagttaaacacgcggggaggaggaaaggaataggatagagagtggaatggggtcggtaggggtctcaaggactggctatcctgacagccttccccgcgttcaggttgaccaacatggcctgcagccagagggcacccacctgacccttaaagagaggacaagttgggtggagtctgtggctgacactctgtgcacaatccttacaacactggtgatggtgagaagggaaagacgacaagccagggggcatgatcccagcatgtgtgggaggagcttccaaattatccattagcacaagcccgtcagtggccccatgcataaatgtacacagaaacaggtggggtcaagcagggagagagaactggccagggtataaaaagggcccacaagagaccggctctaggatcccaaggcccaactccccgaaccactcagggtcctgtggacagctcacctagtggcaatggctccaggtaagcgcccctaaaatccctttgggcacaacgtgtcctgaggggagaggcagcgccctgtagatgggacgggggcactaaccctcaggtttggggcttatgaatgtgagtatcgccatctaaggccagatatttggccaatctctgaatgttcctggtctctggagggatggagagagagaaaaaaaacaaacagctcctggagcagggagagcgctggcctcttcctctccggctccctccattgccctccggtttctccccaggctcccggacgtccctgctcctggcttttgccctgctctgcctgccctggcttcaagaggctggtgccgtccaaaccgttccgttatccaggctttttgaccacgctatgctccaagcccatcgcgcgcaccagctggccattgacacctaccaggagtttgtaagttcttggggaatgggtgcgggtcaggggtggcaagaaggggtgactttcccccactggggaagtaatgggaggagactaaggagctcagggttgttttctgaagcgaaaatgcaggcagatgagcataggctgagccaggttcccagaaaagcaacaatgggagctggtctccagcatagaaaccagcagtccttcttggtggggggtccttctcctaggaagaaacctatatcccaaaggaccagaagtattcattcctgcatgactcccagacctccttctgcttctcagactctattccgacaccctccaacatggaggaaacgcaacagaaatccgtgagtggatgccgtctcccctaggcggggatgggggagacctgtggtcagggctcccgggcagcacagccactgccggtccttcccctgcagaatctagagctgctccgcatctccctgctgctcatcgagtcgtggctggagcccgtgcggttcctcaggagtatgttcgccaacaacctggtgtatgacacctcggacagcgatgactatcacctcctaaaggacctagaggaaggcatccaaacgctgatgggggtgagggtggcgccaggggtcgccaatcctggaaccccactggcttmgagggctgggggagagaaayactgctgccctctttgtagcagtmaggcgctgacccaagagaactcaccttattcttcatttcgcctggtgaatcctccaggccyttctctacaccctgaaggggagggaggaaaatggatgaatgagagagggagggaacagtgcccaagcgcttggcctctccttctcttccttcactttgcagaggctggaagacggcagccgccggactgggcagatcctcaagcagacctacagcaagtttgacacaaactcrcacaaccatgacgcactgctcaagaactacgggctgctctactgcttcaggaaggacatggacaaggtcgagacattcctgcgcatggtgcagtgccgctctgtagagggtagctgtggcttctaggtgcccgcgtggcatcctgtgaccgacccctccccagtgcctctcctggccctggaaggtgccactccagtgcccatcagccttgtcctaataaaattaagttgtatcatttcatctgactaggtgtcattctataatattatggggtggaaggtggtggtatggagcaaggggtaggtggaaagaagacctggagggccttcaagrtctattgggaactaggccgctgaaatataagaggcttggctgttcctgggccagaaaaaggctgacacatcaccgctattactcactaaggccattccaccagctcagtggtcccagcttgctggtcacagctcattggtcatcccagagatgacttgaaggcatttcttcctcccccaccatcaccagcaacaccaaacctagccctccaggagcgggaagaaatgaaaacaagatgggctattaagtgcagaggcaaaaactccccaacaggtgaggaaacaatggcatagaattacttgtgttcrgaagaattttargatgartattccttaagcccaactactctcgggaaatgagaacaatgcaaaaatgagtttgagacatacagaaccagagcatttggaatctgaattagggcaagggaagtggaagagtgattttatttggggttgtaaatgcagtgccaacaggtgccaggtagataacaacgtaagcaatgagggctggatgggaggggataaatcccagatgacactcgcttcccttcrggggatgcaacacagaggggtgggaaccagcacaatctgcagaactcaagcccctgctgaggtgggacccacccagcctgtcaccatcaggactgaagggacacggcttccagaccttctgattctttgagacagccaggacatccagacttttacaggaattctaacatttaaacactggcaacacatattgaaaatcttttaagggcaaaaattaacccaaacacacatggtctccaagctgtctgtgagcaattttattctaagagakgttgattggggtaacttggtgtaagggaaagaatcagaaagatttgggctgtatgyaatttagtgctgctgaataaattacttgaccaagctgagataataatatattgctttacaaggattatgtgaggataaatgcaatggtatttttgacatattatagtactcaagaaattgtagttatttctgcattgaatttttggatgttttgtgttttctgatggagtgtctaaatacctgtagtgaaattatatwgttttcctaatgacaattaggaaatagtaaacatctgagatgtttattatttccaaataagcactaaagagcggtggttagttaagagtttrctctcccaagcaccttggctaagtgactggtgacctataaatcgatgctaagatgctcacaggaactctagtatccaaaaatgatttcatgaagtcaggaattgttttgcaatgcaaataatcaaccccctaattaatcttctttagaagttctgattcttatgtgctatcatgaattttcttgataacgagaaccacttgtgttcatttttggctattttacagttaataactcagtccttgggaagtggttgaaagttgaaataatcagaactctagagctgctgcatttctcagctcagaagacatttcttcatcttacatcattcttctactatcgggctttaaaattatggyattttggagttagaagggcctcataagtcagtctagtttcttctactttgggaatcttatcctacggcgtccattacagtcagtattccaattatgagtgtgtagcactagaaccaaaggaatcactttcacaaggctcctcattctattaaaccactctcattgcaaaaaactatttcttgcacaaagctggaatcaatattcctgcaaygtccttcatttggccttaaaattatttagaaatctcagtctttagaagtcgatggaatgagcacaattataattatctctcagcttgcgtgttttaaaaggaattgtgagccatcttaataagtatttgttgaatgcacgtgacagtggaatgacaatgtccagcgcctacttgggtggctaagrgggttctaaagtggggtggtsatracatataactgaactgcagggggagccacaygccagagactgtccacccagctcccctcgggtgtaggagaatccactcaaccactgctggttgagaattagatactagctgactttgcacattttagaayataaaaagaccttaaagaccatctactttaaactctgatttacccactgttagtctacatttcagctcatcaacttggtgtggacggcaatttcysctgcaaatttgagatgcctaggrtgttttctaaacgatgcatwcgtgagccctcactccctgagattctgatataattagactggaatgtggtccaggcaagagtartttgaaaactttcccaggtgattytaacatgtaaacaaggttgagaaccacygtgttagggaccgcaaagatgagacccatgtgttcacagctgttgtactggtggaayagggaraamrgagaaaaaggagatgagaggcctgggccagttgtggtgccacctgctcctaattccaaccagtcatctaaaaagtgtttatcatgagccagtcacaaaaagacaaatactctcygattccagtcagatgaggtactcagagcagtcaaattcatagagacaaaaagtaggatggtggctgccagtggctgtggggagggatggaatagggagctatttaatgagcacagggtttcagctgtgcaagatgaaaagggttctggagatggwtggtggtgagggttgcatgacgatgtcaatgtacttgacatgactgaactgtacasgyaaaatggttaagatggaaacgtttatatcttctcacaactaaaaattgttaatactttrtttttgtttttgtttttgagacagaggctggagtgcagtggtgggatcttggctcactgcaacctccgcctcctcccgggttcaagtgattctcatgcctcagcctcctgagtagctgggattataagygtgcaccaccacacagggcagatgtttktatttttggtaaagacagggtttcgccatgttggccaggctggtctcaaactcctggcctcaggtgatccacccttcttggcctcccaaagtgataggattacaggcgggagccaccaggcctggctcttawtggtattttctawtgaaaactcttcctgaagataagattagcaagactcrcacaaggaagagttcagcaggcagagctccagtcatccttgacccctggcataatgttttactgactctgtcattttttttgaatttaccctaacctaaaatgaccacttctgaatttcttccatgagcattgtcsaaatacacatggtgggttttgtccctttatacacagttgagagcagaactgaccccttcccttttcttctgaattayagggtctgggcttctaggccaagacaagctgacactttgcctggatgcttctttaattcagaaggccctggagtgctgaggcacacaatgagcaccgctgggattagggtcaccaactcgtcctggtttgcaggagactttctcaatgtcaacactggaagtcccacattccttccaggaatccctcagctcaatgcaaactcagctcacaggactggtcaccctattagtagtcctaaatcttaggggaccaaactggggggaaagtaggggaaggagcaagaaaaagagtagaaaaatcagaaagctgcrcacggtgtatatgacttttgatggtgctcaaggttaccatggatttctgattcttgctttgagtttactgtgattataatgatgtgcttaattaccaccagaattatcagtgtaatcacaaaaaccaacaaatgtaaacacatgtctccagcaacatgctagtttattgcaagtattatgtsatttctttctaagtataatcttctaaggtaaatactattattaatcctatggtaagaagtcccactaaagatgtaacttactctttctcaggtctaaagacaaagacgccagaatgtcaccctgaccatccttgagaggataaactgccaggcacagtggctcaagccagtaatctcagcactttgggaggccgaggcgggaggagatcaggagttcaagacaagcctggccaaaatgatggcaccccgtctctactaaaaatacaaaaattagccaggtgtggtggtgcacacctgtattcccagctactgaggcacgagaatcgcttgagcccgggaggcagagttgcgctgagcccatcatgccactgcactccagctgggtggctgagcaagattctctctcaaaaataataagaaagaggataaaattttggagtattaaaggccactcttcctctggagataatcaagatacctgcaatttaagcgtgagctggttgctttaatgttcagaaagaataygatcaaaatcatttaggggtggggcctcctcctatagacaatgaggcagctacccttagaagctctatcatactggaaaagagatatgagacccttcctgctttcagaatcaatgaagccaggcgtggtgactcacgcctgtactcccagcacattgggaggccaaggtgggcagatcacctgaggtcaggagtttgagaccagcctggccaacatgatgaaaccctgtctctactaataacacaaaaattagccgggtgtggtggcagacacctgtaatcccagctactctagaggttgagmagggaaaattgcttgaagccgggaagcagaagttgcagtgagccgagattgcgccactgcactccagcctgggagacagagcgagactctgtctccaaaaaaaataaaaagaaaagaaaaaaaagaatcaatgagaaggggctgcctgcctgaccactggttgtgtggatccttcgggaaggaaagcgaacagaggttccaagtctacaagggaaacagcccagcctactctgaagagctttgcgggacggctcatccaaactactgagctctaagaactggaaccctggaaaccccagcaagaggacacccgctgctggaccaggccccgaagaagcagatcatcctccctcagagatccacagcaggtaggaacccagatctgcagacccgcttggtttgagggtactgtgtgggaccatctgtccacactgacaccctgtggcagtgagaagcaaaggcagcagccggytgagcctccaggatctccctgctggaactagaaagtccaagtggcccccttcttccctctttttttggttttgtcttgttttttgtttgtttgcttttgtttttgttttcttcaagatggggtgtcactctgttgcccaggctggagtgcaatggcacgatctcggctcactgcaactctgcctcccaggttcaagcgattctcctgcctcagcctccccagtagctgggattacaggtgcacaccggcatgcctggctcatttttcccttcctttttgrattcgctgtgcttcaaggcactgaggccatgaggcagggtttgcagatacaagrtaactatagccttgatgtggctgatcctgacaccgaaatgtctgtggatccctgcatggggcagctctatactcctgtctcttaaacctgcttcttaacttacttccccaaatgctcaattcagggaaggtggatgatttatattagactcacakgatgagagagcagtagctccacctagtggaaacattgaggttgaaaaggtcatgttccgggatgatgctattttacaaagtcaagatatttcgtgtccctccaggaagccttccttgatccgagttatgctttctcttaacaatctgttttcccagtcataggagttcatgctcaaatgtaatgaacttttttgttcattacatacttgtcttgctttcctaataaatttgtggaagccagggacaatgttttgttcaccactgtatccccactgccttgtatgtggt

SEQ ID NO: 9882 - DNA, 20631 bp, Homo sapiens
tgggcttggagcatagcgtggtcaaaaagcctggataacggaacggtttggacggcaccagcctcttgaagccagggcaggcagagcagggcaaaagccaggagcagggacgtccgggagcctggggagaaaccggagggcaatggagggagccggagaggaagaggccagcgctctccctgctccaggagctgtttgttttttttctctctctccatccctccagagaccaggaacattcagagattggccaaatatctggccttagatggcgatactcacattcataagccccaaacctgagggttagtgcccccgtcccatctacagggcgctgcctctcccctcaggacacgttgtgcccaaagggattttaggggcgcttacctggagccattgccactaggtgagctgtccacaggaccctgagtggttcggggagttgggccttgggatcctagagccggtctcttgtgggccctttttataccctggccagttctctctccctgcttgaccccacctgtttctgtgtacatttatgcatggggccactgacgggcttgtgctaatggataatttggaagctcctcccacacatgctgggatcatgccccctggcttgtcgtctttcccttctcaccatcaccagtgttgtaaggattgtgcacagagtgtcagccacagactccacccaacttgtcctctctttaagggtcaggtgggtgccctctggctgcaggccatgttggtcaacctgaacgcggggaaggctgtcaggatagccagtccttgagacccctaccgaccccattccactctctatcctattcctttcctcctccccgcgtgtttaacttccacccaccagacagaatgtgtgtgttgggaaaaggggccaagcacagccaatagattgtgggggttctgagcaccattgagtcctgaattccacttttgctgatgactcctgggcccacctgagtcagctggatgcagtgctaacactgaccactagagagaaccaaccccacacattgctctcccctttccctgaaccttggggcggaggcggtggggctcccccaggtcactggggacgaakaacccagactcaaggtattgccycagctccttggacctgyagcagagacacaaaccaagaaacagaaatcccgggaacagacacggaccacaagcgcttcctcccacagccctgaaaccatcagagaatctcaaggttggaagagctcttgaakatttgagtctcaggggaacatcayactctggrgactgttgtggggtggggggagggggagggatagctttaggagatatacctaatgctaaatgacaagttaatgggtgcagcacaccagcatggcacaggtatacacatgtaactaacctgcacattgtgcacatgtaccctaaaacttaaagtaaaagaataataataattaaaaaaaaagaaaaaaaaaagaagatttgagtctcttcccagctttggaactcagaacacatcaygccgaaagakgccctatccagccatggaagcccgtcctcttttgtctcttcctcctttccagacctgtgtagagcttatccagttgtcaaaggcctgcctgtgcattctcacgtctgayctgccacttrtcttgtgtaggagstatgastatcatcccatttcacagatcaggagactgaggctcagagagactgattrcatgagctacctcagccagggcagcagatctccacaaccttgctcttcccacattgcrtcatttaaagtcctttctccaggccgggcayggtggctcatgcctgtaatcccagcactttggaagactgaggtgggtggatcacttgaggtcagttcaaggccagactagccaacatggcaaaactccatctcttaaaagtacaaaagtagctgtgtgtggtggcagaagcctgcaatcccagttactccggagggtgaggaggtagaatcgcttgaacccaggacgcagaggttgccgtgagccaagattgggccatggcactccagcctgggygccagagtgagactccatttcaacaaccacaacaacgacracaacaacaacaacaacaacaaaagtcctttctccagagcaggtggtgtggtgctactcagttatttagttattttagtttcttttctttccttctttctttttctttctttctttctttcttttctttcttgctttcctttttctttctctttctttctttctttttctttctttctttctttccttccttcctttcttccttccttccttctttccttccttccttctttctttctttttctttctttctttctttctttctttccttccttccttccttccttccttctttccttccttccttctttctttctttcttgtttttgatggagtctcattctgtctcccaggctggagtgcagtggcatgatcttgcctcactgcaacctccacctcctgggttccagtgattctcccgcctcagcctcccaagtagctgggattacaggtgcccaccactatgccgggctaagttttgtacttttttagtagagacggggtttcactatgttggccaggctggtctcgaactcttgactttaggtgatccaccctccctggcctcccaaagtactgagattamtggcgtgagtcacygcccccaacccagttatttcagcttctaaatctctctgagtgcagggatcctgyccccaacacaaggggccctttgcctgattttgtctttccataaggggcagattgttctttctcaattcccaggtgagaatggcccagtggcatggggtgccttgtggaaacctcgtagcaggacaaggtgaaggcagagaaggccaggactgagcctcctgtctcctggtgcccagggttggggctatttccataccacctggaggtcacaagcatcagatgcccccagagatgagagcaggaaagaacaccctctgtagtggtgaaatcttctcccaccctgagtttaagagcatgtagcacttgaygctgtagaaacacaagcaagcaaacaggcaaatgcttctagaagtggttggctgtggtgttggcaaccaacattgaaaacccacacccctgtggcctaggatgtgaatgctggggccctgccatctccccactttcagagcggaagacagagctccwttttytgccatcattcctgaagcattaccggaccagcaccmcagactcatcacctgctgggagggcactgtgctgtgggctgttctccagggaagcctgtgtgaggatccaagaggggtgtcatcaatgataccagctctgagaaatatggggtcaagggagggtggtgtcaccactttcccctgctcctcccagcaccagcaaagaggaggagccaggtgggaatggaagtgggtccctgagctccaagtagaagagggtccctgcctccctcaccatccttcytccaatgtcagctgggacagggagcccccatgacaggaccttttagccagttctggggacttagatgtggatttttggccattcgtaagggaagcctcccttaggaatgaggggggcaggggctctagctggggactactgcataactccacaggtgggcacaggggtgccgaggttactgccaggaacatgtgggaccagccagggaaggggagtgtctcctctcacctctccacttctgttgaccccagagttatagtgactcagaggacgttagggacccctggggaaacacctttataaggggttaccatggcaaccatggaccagagggaagaactgaggcccacaggtgtggrtagaagttggtgatccttttctctagtctagatcttcccttgagcaatggagaccatgtctatcattcattgctagtaaaaaatcaactttgaattagacttgggattctcctgacagtactgggaagttgcccactgttggggcatcacttgaggccagatccctcgctgctgcaggctgaaagactacccaacaagagcctccacatggccagtggggagaggctgggctttgtacctctagcatcagcctcaaaaggctctggataggtcgggtgcgttggctcacacctgtaatcccaccactttgggaggccaaggtgkgtggatcattaggtcaggagtttaagaccaacctggtcaagrtggtgaaatcccgtctctactaaaaatacaaaaattagctgcgcgtggtggcaggcgcatgtaatccgagctactcaggtsgctgtggcagggaattgcttgaacccgggaggtggaggttgtagcgagccgagatcatgccactgcactccagcctgggtgacagagtaagactctgtatcaagagaaaaaaaaaagctgatgataatctcacaatcatcttgcttcttttaaggaacctccctttataatttaggatccatgaatttatctgtgtgtttggaagcccttcctatgtccaacctcgactaactctagggttctgtgtgcctgctgtggaaagtcacagatctgctgttgatcctaaagtggtgtctttcaggcttcaagatctcctgttaggttcaagactgtggggttgaggacgatcacatttttcgaagccattctcaccggtctyaggaatcgcctccgagggactggtgggtgctccttccactctcactttggtgatttgaggcgcacacttctcacctgcagctctgttctttcttccttgagatcagaggctggttattgtactgggacatactctacctccttttggcttctaatgtcctttctatgagtttgctactgagtcaattactcggctcattggattgaggtcttcagagaatattatrtggggattcccaagggctctcctaggggaggtgaggaagatgatcaatacttctgtgtgtccaccatgtgcttggcactctactgaccatagggatgtgagtgaggatactgaggcccaaagagataagatggtttgcctggagctctcccagttcctaagtaatggcttccaaggcccctgggctttccttccatgccaagctctttagaaacctcatctagtaaagatggtggcactaataggcatggacagaacttgcctcagtgcaaagctagcaggacaggggtcaagtccctgcacagaggatgttcaatgaagatggggggaattgaacacaaggaacttcagccacagaatgaggtgtccataggcattaagraaagtggtagaaaagaggcacccaacgtagctcgggttagtgaaccgaggcacttcatgctgcatatttgtattgcacrtttcagtgtacatcgtgtttcgcttcctgtatgtcgttggacccttcagtttgccacatgatatgtccagggggttcaggcacggaggaagggcctcggaaggtctggggaggcaaggggcaggcaccgctgtgtattgatggggggattgtttgcactggttgatgatctctgaacaaccaagaagtacacaaggatctacctaacctgacgtgctaagtaatttcactttggggattattctccagggagacaatccattgatagagaagtgaaaagcatcgagatgtgtctagtagttgtaggaagtctggggtgctttcctgatggggtgccctcagctggaaatagcctctccttcctttgacctgtcctgtggctatttgcagacatttttattccccttaccagactgtaagctctttgaggctggatttctttctttctttttttttgagaccgagtcttgctctgtcacccaggctggagtgcagtggcgcgatctcggctcactgcaagctctgccccctggggttcatgacattctcctgcctcagcctcccgagtagctgggagtacaggcrcccgccaccttgcccagctaatttttttgtatttttagaggtggggtttcactgtgttagccaggatggtctcgaactcctgacctcgtgatccacctgcctcgacctcccaaagtgctgggattacaggcgtgagccaccgcgccctgcctgaggctggaattctgcctttcgtctattcattcattcactcattcttctattcgtgcattcaccaattccacaagtagttgttgcctataacatgtgccagagattgtaccaggcagatgggcatatctagataaacaaaagacatgatcctttctcttctggagctaacaatctactgggggccgagaaaacagcaaaaaagtaaatatataacggtaaaatagaaatttcgaattggaaacattcccatgaagtaaaaagctaagatacggagggagagaataagccagaaggtgatgggaygaggcagctgacacagccccaggcccaggaattcaacaagcatctactgagtggacccaatgcatgagaggacagtgccaagcaaacaactcaaatgtccaactggctgggcatggycaggtagcccatgctgtgtctggacgtccttctgctggtataattattttaaaatcacaggacagggaagggcccagtggctcatacctgtaatcccagcaatttgggaggccgaggcgggcggattacctgaggtcaggagatggagaccagactggccaatatggtgaaaccccgtctctaccaaaaatacaaaaattagctgagcctggtcgtgcatgcctggaatcccaactattcgggagactgaggcaggagaatcgcttgaacccaggaggcggagattgcagcgagccaagatcgtgccactgcactccagcctggttcccaatagaccctgaaggccctacaggttgtcttcccaacctgccccttgctccataccacccgcctccaccccataatattatacaaggacacctagtcaaacaaaatgatgcaacttaattttattaggacaaggctggtgggcactggagtagcaccttccacsaccaggagaggcastggggaggggtcacagggatgccacccgggcagctagaagccacagctgccctccacagagcggcactgcacgatgcgcaggaatgtctcgaccttgtccatgtccttcctgaagcagtagagcagcccgtagttcttgagcagtgcgtcatcgttgtgcgattttgtgtcaaacttgctgtaggactgattgaagatctgcccagtccgggggctgccatcttccagcctctgcaaagtgaagsaagagaaggagaggccaagcgcttgggcactgttccctccctctctcattcatccattttcctcccycccctycaggttgtagagaaaggcctggaggattcacgaggggaaatgaagaatacggtgagttctcttgggtcagcgcctgactgctaaaaagagggcagcagtgtttctctccccagtccctggaagccagtggggccccaggattggggatccctggtgccaccctcacccacatcagcgtttggatgccttcctctaggtccttcaggtggcgatagacgttgctgtccgaggcgccatacaccaggctgttggcgaagacgctcctgaggagctgcacgggctccagccatgactggatgagcagcagggagatgcggagcagctctaggttctgcaggggaaggaccggcagtggctgtgctgcccgggggctctgaccacaggtctaccccatccccacctggggagaaggcatccactcacagatttctgctgcgttttcacccwgttggaaggtgttggaatagactctgagaagcagagggaggtctgggggttctgcaggaatgaatacttctgctccttcaggatataggcttcttcctaggagaaggaccgcccaccaaggtctatgctggagaccwgctcccattgttacttttctgggaacctcactcagcgtatgctcatctgcctgcattttcacttcagaaaacaaccctgagctccttagtctcctcccattacttcccagcgggggaaaktcaccccttcctgccacctctgaagcgcacccattacccaagagcttayaaactcctgataggtgtcatatgccagctggtacaggcgacgggcgcggagcatagcgttgtcaaaaagcctggataagggaatggttgggaaggcactgccctcttgaagccaggacaggcagagcaggccaaaagccaggagcagggacgtccgggagcctggggagaaaccggagggcaacagagggagctggagagcaagaggccagcgctctccctgttccaggagctgggtttttttttytctctctctctctctgcctccctccagggaccaggaacattcagagattggccaaatactgggcttagatggcgatactaacattcataagccccaaacctgagggttagtgcccccgtcccatctacaggacgccgcctctcccctcaggacacattgtgcccaaagggattttaggggcgcttacctgcagccattgccgctaggtgagctgtccacaggaccctgagtggttcggggagtygggccttgggatccttgagctggtctcttgtgggccctttttatacctggccccttctctctcgctgcttctcctcacctgtttctctgcatgtttaggcctggggccactgacgggcttgtgctaatggataatttagaagctcctcccacacatgctgggatcatgccccctgacttgtcatctttcccttcccaccatcaccagcgttgtgagggttgtgcacagaatgtcagcagagataccacccaacttgtcctctctttaagggtcacgtgggtgccctctggcagcaggccatggtggccaacctgaacgcggagaaggatgtcaggatagccagtccttgagacccctaccgaccccatcccactctctatcctattcctttcctcctccccgcatgtttcccctccacccaccagacagaatgtgtgtgttgggaaaaggggccaaagcacagccaatagattgcgggggttctgggcatgattcagtgctgaattccacttttgctgactcctgggctcgyctgagacaggcccgcctggatgcagtgctaatactgaccactagagggaacaaactccacactttgctctcccctttacctgagccttggggcgggggcgggggcggggcgtggggatgggggtgggggtgggggtgggtgtgggtgtggggggggggggctcccccaggtccctggggacgaataacccagactcaaggtattgccccagctccttggacctgtagcagagatacaaaccaagaaacagaaatcccgggaacagacacggaccacaagcgcttcctcccatagtcctgaaaccaacagagaatctcaaagttggaagagctcttgaagatttgagtctcttccccagctttaaaactcagaacacatcacgccaaaagacgccctatccagccatggaagcccctcctcttttgtctcctcctcctttccagacctgtgtagagcttatccagttgycaarggcctgcctgtgcattctcacgtctgamctgccrcttgtcttgtgtaggagctatgactatcatcccatttcacagatcaggagactgaggctcagagagactgattacatgagctacctcagccagggcagcagatcttcacaaccttgctcttcccacattgcgtcatttaaagtcctttctccaggccgggcacggtggctcatgcctataatcccagcactttgggaggctgaggtgggtggatcacttaaggtcaggagtgcaagaccaggctaacccacatggcaaaactccatctctcctaaaaatacaaaaattagctgggcatggtggcacgagcccgtaatcccagctacttgggaggctgaggcaggagaatcgcttgaacccaggaggcagaggttgctgtgagccaagattgcgccactgcactccagcctggatgacagagcgagtctacatctcaaaaaaaaaaaaaaaaaaaatcctttctccagagcacgtagtgtggtgctactcagttatttagttattttagcttcatttccttttttttttttttttgagatggagtctcattctgtcacccaggctggagttcagtggcatgatgttgcttcacagcaacctccacctttgggttccggtgattctcycgcctcagcctcccaagtagctgggattacaggcgtccaccactatgccgggctaagatttgcacttttttagtagagacgggggtttcactatgttggccaggctggtctcgaactcttgactttaggtgatccaccctccctggcctcccaaagtactgagattacttgcgtgagccactgctcccaacccagttatttcagcttctatatccctctgagtgcagggatcctgcccccaacacaaggggccctttgcctsattttgtctttccataaggggcagattgttctttctcaattctcaggtgagaatggcccagtggcatggggtgccttgtggaaacctcasagcaggacaaggtgaaggcagagaaggccaggactgagcctcctgtctcctggtgcccagggttggggctayttcaatataatctggaggtcacaagcatcagatrcccccagagatgasagcaggaaagagcaccctctctagtggtgaaatcttcccccctgagtttaagagcatctagcacttgactctgtagaaacacaagcaagcaaacaagcaaatgcttcyagaagtggttggctgtggtgttggcaaccaacattgaaaacccacacccctgtggcywaggatgtgaatgctggggccctgccatctccccactttcagagcrgaaracagagctccattttctgccatcattcctgaaacattatcggaccagcaccccagactcatcacctgctgggagggcactgtgctgtgggctgttctccaggcccgcctgtgtgaggatccaagaggggtgtcatcaatgataccagctctgagaaatatgtggccaagggagggtggagtcaccactttcccctgctccttccagcaccagcaaagaggaggagctaggtgggaatggaagagggtccctgagctccatgtagctttctgcctcccccaccatccttcctccaatgtcagctgggacagggagcccccatgacaggtccttttagccagttctggggrcttcgatgtggattttcggccatggaagaagtctccagcctcccttaggaatgagggtggcaggggccctagttggggaccactgcataactccgcaggtgggcacaggggtggcaaggctccccaggcaggttactgacagcaacacgtgggaccagccggggcaggggagtgtctcctctcacctctccacttctgttgaccccagaattatggtgactcagaggactctagggacccctggggaaacacctttataagggattaccatggtaaccatggaccagagggaagaactgaggcccacaggtgtgggtagaagtcaatgatcattttctctagtctagatcttcccagagccttgagcaatggagaccacatccatcattcattgctagtaaaaaatcatctttgaattagacttgggattcccctgacagtactgggaggtcgcccactgttggggcatcacttgaggccagatccctggctcctgcaggctgagagagtacccaacaagagcctccacatggccaatggggagaggctgcgctttgcacctctggcgtcagcttcaaaaggctcaggataggccggcgtggtggctcatgcctgtaatcccaacactttgggaggctgagacatgtggatcacctgaagtcaggagtttgagaccagcgtggccaacatggtgaaactgatctctactaaaaatagaaaaattagccgggtgtggtggcatgcgcttgtaatcctagttactggagcggctgaggcacragaattgcttgaacctgggaggcagaggttgtcatgagccgagatcgcgccactgcactccasccwgggcgaagragtgagactgactttgtctccaaaacaaacaaacaaccaaaaaaaaccaaaaagaaaagtagaaaaatcctcatctctgagttcmcygttacctagctccttacccacygagaarcaaacatgggaagcaggggccccagggccaccatggacagagcagsgttatcwtttagtccaaatccataagaacaccctaggtttcatctgggactccctgcccatacggaaagtgggaaagaagagttggctcaaagcagggagctgctagtgctcccttgggaaggaaagctgttgggtgraggggacagcatttgggtgaggggaggagagggagcagggggtgaagtagggagggagtgtggtgcactgaactcagctccttgggatactgtttctgcagacmaaccacggttagaggaatccagttgctctgccaaacagacctggctggaagggatggaacacamgctcrcctgcgtcccaaagggaaacccagctccagccttggtgtgtacctggaatggggtggtctttgaccttgaagtgccacagaaggcaaccyagaaccacactggaacctaccgctrcacagccactaaccagctgggctctgtcagcaaagacattgctgtcattgttcaaggtaacctttgctgccctgctgccaggcccaggatggaaacccctcaggggtttgggattcttatcyaagcatgaaaataagaaagattctactaggttgggaagaatgagactcagaagtgggcctggtgggctggggtgggtgatccttgtactctcagactttcctaactctatcttctgtgcttgggcaggactggatgaaggaatcagctctaccctctttgtcattattaccgttgcccttggagtgggtgtcatcaccatagcactgtatttgagctatcggccctgcaaagtggacaggaggcaaattgctctataggcagaaagaggaggacaaagaggaggaaagccatttgctgttcaggaagagaaaagtacaactcatataattgacagctatttgattgaatgagacttctggctactgtggtttcccagggagggaagaagggatagaggagaaaggaagaaacacaatggcaggctgcattcccctttgtgtacgtctgtcctgtaaaacggtgtttcaggcccccatgccccatgtcctgtgtgtccaatatgtccacaagctcacctttctctctctgtctctttttttttttttgagatggagtctcgctgttgtgccctaggctggatgcaatgatgcgatctcgggctcactgcaacttcagcttcccgggttcaggtgattctcttgcctcagcctccccagtagctgggattacaggtgcacaccaccatgcctgtctaatttttgtacttttcgtagagatggggtttcaccatgttggctgggctggtctcaaactcctgacctcaagtgatccgsccaccttggcctcccaaartgctgggattacaggtgtgagccaccgcgcccagccacctttctctttagagctcactctattcattaggaatctcagtctcaatgtttgatttgtaagaaggcctcttgctccttgccaggtgcatcatcagtccactcttagatccaaaaaaaaaaaaagaaaagatcttgccgtttcttcatggttctcactgcccttttctcttaaacatcatactaaagtcaggcatatcttagaaatacaactcatatttcatggttttctgattactaactgggaactaaatctgtagtccaaggacaggactttgaagggagtaagtatcaaatatggggccaggaatcagagctctgttccyatctccactttcccttgctcccctgacctgggcttctggagggccagctcccagagctgagcttgttgacatcattaaggatcagtggcaagcttcaactcagtaaccatctgttgcgggtcttgggggagtatacagatggtaagaaattccacttygggccagacgggcatcctatctagctcagtattctgtctctgaaggagaaggtagagttcttccatgaaattggcctcataggttaagagctccaaacatctctgaattccttttcatagagtgatcaactgtgagttcgcatttgccagktttcttttttttacccatatgggcatctaggttaaagttccaatctttactctcccttttcatcaataagtgcataytttcttctgtctgtaaacaatttccttgaagcttcaagaggaatcttcttgtgaaaatgttcatatgattttatgtttcagcttctttccctgtccttgrgaaagagtatattcaccctcggagwaggcgtgaggaatcacagaaccagatgttttctcccaaatcagtcaagaaatgttcactggaatgttgctatggtaaaaataaaagtggtkttatgatgtccaaatgcagttcccttcccttctgtgtcattgctaaaagctcttatgtcaaatggctgcattttataacttttttttttagatggagtctcgctctttgcctaggctggagtgcagtggtgtgatttcrgyccacttcaaactccacccccgggttgaagcaattctctgcctcagcctctatagattaagagtagctgggattacaggcgcccaccaccatgaccagctaattttttgtatttttagtagagacagggtttcaccaccttggccaggctgatcttgaagtcccgacctcgtgatctacccacctcggccttctaaagtgctgggattacaggcctgagccatcactcccggctgcattttataactttaagtacaatttctaaggaaaaaataccgtgttgatagcataaacaaccagcccagggccgggggtgcattaactgagggcagcagcctatttgacctgctttcaaaactgaaattcaggytggtgtggtggctcacgcctgtaatcccagcactttgggaggctgaggcaggtgaatcacttgagccctggagtttgcgaatagcctgggcaacatggcaaaaccccatttctacaaaaaacayaaaacttagccaggtatagkggcacatgcatgtagtcccagctacttgagagtctgaggtgggaggatcacttgagcacgggaggtggagggttgcagcgagttgagatcatgcactgcactccagcctgggcaacggagccaggccctgtctcaaaagcaaaataaaggaacaaaaatgaaagctaaaggtcagacttccagatagagagaggtccatagccttccaaattgcagataccagctagaaaaaaccatggcatcagacagcagagggaaaacgttttcccattcttcccagacctcccctgagtctggtgytatagattaagtgtaaaagtaaccctttggtttcaccacatacaaggcagtggggatacagtggtgaacaaaacattgttcctggcttccaaaaatatattaggaaagctagacaaacaagtaggagattacatttgtgcatgaactcctatgactgggaaaacagattgttaagagaaagcataactcggatcaaggaaggcttcccggagggacacgaaatatcttgactttgtaaaatagcatcatcccsgaacatgamcttttcaacctcaatgtttccactaggtggagctactgctccttcatcatgtgagtctaatataaatcatccaccttccctgaattgagcatttggggaagtaagttaagaagcaggtttaagagacaggagtatacagccacaccatgcagggatccacagccattttggtgtcaggatcagtcgcatcagggctgtagttaccctgtatctgcaaaccctgcctcatggcctcagtgccttgaagcacagcgaatccaaaaaggaagggaaaaatgagccaggcatgsyggtgtgcacctgtaatcccagctactggggaggctgaggcagaagaatcgcttgaaccygggatactgaggttgcagtgagccaagattgcaccattgcactccagcctgggcaacagagtgacaccccatcttgaagaaaacaaaaacaaaagcaaacaaacaaaaaacaaaacaaacaaaacmaaaaaaagagggaagaagggggccacttggactttctagttccagcagggagatcctggaggcttagccggctgctgcctttgcttctcactgccacagggtgtcagtgttgacagatggtcccacacagtaccctcaaaccaagcgggtctgcagatccgggttcccagctgctgtggatctctgagggaggatgatctgcttcttcggggcctggtccagctgcgggtgtcctcttgctggggtttccagggttccagttcttagagctcagtagtttggatgagccgtcccgcaaagctcttcagagtaggctgggctgtttcccttgtagacttggaacctctgttcgctttccttcccgaaggatccacacaaccagtggtcaggcaggcagccccttctcattgattcttttttttcttttctttttttttttttttggagacagagtctcgctctgtctcccaggctggagtgcagtggcrcaatctcggctcactgcaacttctgcttcccagcttcaagcaattttcctgcctcagcctctggagtagctgggattccagatgtgcgccaccacacccggctaatttttgtgttattagtagaaacaggatttcatcatgttggctaggctggtctcaaactcctgacctcaggtgatctgcccagcttggcctctcaaaatgctgggagtacaggcgtgagccaccacacccggcttcattgattcttaaagtaggaagggtctcatatctcttttccagtataatagagcttctaagggtagctgcctcattgtctataagaggaggccccaccctctaaatggttttgatcatattctttctgaacattaaagcaaccagcttatgcttaaattgcagctaccttgattatctccagaggaagagtggcctttaatactccaaaagtttaccctctttcttactatttttgagagagaatcttgctcagccatccagctggagggcagtggcatgatgggctcagtgcaactctgcctcctgggctcaagtgattctcgygcctcagtagctgggaatacaggtgtgcaccatcacacctggtaatttttgtatttttagtaagagacggggtgccaccatgttggccaggcttgtctcgaacttgtgacstcctcccgcctcagccctccaaagtgctgagataactggcgtgagccaccgtgcctggccgtttatcctctcaaggatggtcagggtgacattctggtgtctttctctctagacctgagaaagcataagttacatcgttagtgggacttcttaccataggattaataatagtatttaccttagagaattataattagaaagaaatgacacaatacatgtaataaactagcatggtgctggagatatgtgttcacattagttgttttttattattacactgataattctrgtggtaattaagcacatcwttataatcacagtaaactcaaagcaagaatcagaaatccatgataaccatgagggccatcaaaggtcatatacaccgagcacagctttccggtttttctagtctttttcttgctccttcccctactttccccacagtttggtaccctaagatttaggactactaatagggtgaccagtcctgttagctgagtgttcattcagctgagggatccctggaaggaacgtgggactttcagtgttgacattgagaaagtctcctgcaaactaggacgagttggtaaccctaatcccagcggtgctcattgtgtgccacagcacttcagggccttctgaattaaagaagcagccaggcaaaatgtcagcttgtcttggcctagaagcccagaccctgtaattcagaagaaaagggaaggggtcagttctgctctcaactgtgtataaagggacaaaacccaccatgtgtatttcgacaatgctcatggaagaaattcagaattggtcactttaggttagggtaaattcaaaaaaaatgacagagtcagtaaaacattatgccaggggtcaaggatgactggagctctgcctgctgaactcttccctgtgcgagtctcactaatcttatcttcaggaagagttttcrwtagaaaataccattaagggccaggcctggtggctcctgcctatgatcctatcactttgggaggccaaggtgggtggatcacctgaggccaggagtttgagaccagcctggccaacatggcgaaaccctgtctttaccaaaaatacaaaaatctgccctgtgtggtggtgcacacttataatcccagctactcaggaggctgaggcatgagaatcacttgaaccygggaggaggcggaggttgcagtgagccaagatcccaccactgcactccagcctctgtctcaaaaacaaaaacaaaaacaaaacaaaaagaaactattaacaatttttagttgtgagaagatataaacgtttccatcttaaccattttgcctgtgcagttcagtcatgtcaagtacattgacatcgtcatgcaaccctcaccaccaaccatctccagaacccttttcatcttgcacagctgaaaccctgtgctcattaaatagctccctattccatccctccccacagccactggcagccaccatcctactttttgtctctatgaatttgactgctctgagtacctcatctgactggaatcggagagtatttgtctttttgtgactggctcacgataaacacttttagatgactggttggaattaggagcaggtggcaccacaactgccatctcctttttctcctttttctcatctcctttttctctgttttccctgttccaccagtacaacagctgtgaacacatgggtctcatctttgcggtccctaacacggtggttctcaaccttgtttacatgttagaatcacctgggaaagttttcaaattactcttgcctggaccacattccagtctaattatatcagaatctcagggagtgagggctcacgaatgcatcgtttaraaaacaccctaggcatctcaaatttgcagcggaaattgcygtccacaccaagttgatgagctgaaatgtagactaacagtgggtaaatcaaagagtttaaagtagatggtctttaaggtctttttatattttaaaatgtgcaaagttggtagtatctttctaattctcaaccagcagtggttgagtggagtttcctatacccgaggggagctgggtggacagtctctggagtgtggctccscctgcagttcagtwacatgttatgaccaccccactttagaaccctcttagccacccaagtaggcgctggacattgtcattccactgtcacgtgcattcaacaaatacttattaagatggctcacatttccttttaaaacacgcaagccgagagataattataattgtgctcattccatcaacttctaaagactgagatttctaaataattttaaggccaaatgaaggacattgcaggaatattgattccagcttcgtgcaagaaatagttttttgcaatgagagtggtttaatagaatgaggagccttgtgaaagtgattcccttggttctagtgctacacactcgtaaatggaatactgactgtaatggatgttgtaggataagattcccaaagtagaagaaactaggctgacttatgaggcccttctaactccaaaatgccataattttaaagcccgatagtagaagaacaatgcaagatgcaggaatggcttctgagctgagaaatgcagcagctccagaattctgtttagttcaactttcaaccacttcccaaggactgagttattaatggtaaaatagccaaaaatgaatacaagtgggtctcattatcaagaaaattcattatagcatttaagaatcgaacttctaaagaagattaattggggggttgattatttgcattgcaaaacaattcctgactttatgaaatcatttttggatactagagttcctgtgagcatcttagcatcgatttataggtcaccagtcacttagccaaggtgcttgggagagcaaactcttaactaaccaccgctctttagtgcttatttggaaataataaacatctgagatgtttattatttcctaattgtcattaggaaaacaatataatttcactacaggtatttagacactccatcagaaaacacaaaacatccaaaaattcaatgcagaaatagctagaatttcttgagtactataatatatcaaaaataccattgcatttagtcctcacataatccttgtaaagcaatatattattatctcagcttggtca

SEQ ID NO: 9883 - DNA, 16211 bp, Homo sapiens
agaggacatgttggaagatctgttctccactctgaccaactcttttcttccctcagagcgttctaccaaggagaagcagagctcagaggaagaagaaaaggaaacaagaggggttcagaagaggcgaggagggagcacagtacccaaagatgggccagtgagacctcagaacgctgaagaagaaaaaagaggcttaggtaagggccagagttggtgataaatttgggcaagggacatcatcacaaaycacatggaatatgtgctgtgggtaatggcaggtatctgagaaacactaaaggactgggtgtaaagtggtctctgaggggaggtgtgagaatarctgaccaagactggaacaagtggtgatggaagcctctgatcattttctcttcttgtcctgtacaagacctgcgtgtgtyggggtacctgaatctggctgctgacttggcacacaacttcactgatggtctggccattggggcttcctttcgagggggccggggactagggatcctgaccacaatgactgtcctgctacatgaagtgccccacgaggtcggrgactttgccatcttggtccagtctggctgcagcaaaaagcaggttggtgatgtctgccaaacacagctgcctcaaaccctttatytctcctcactcaccctaaacccaaacagcctcttattagttccaaacaattcatactgtcattgacaagtcctctagaaatgagggggaagaagttctggttactttgtcctttagctcagtatttcttaaactggtctataaaccatctgaatggtttagtggagtcttacacacacacgcctactcaatcagaaagtctgtggaaaggacctctgatctcttaagatttttcagaaattgtctattctagactgctccctcttctctttttattttgatgtttagtttccaaatccatgtcccctatacctataccccaccagccacttctaaaccactgataatctttagctattggtgagtgcytttttctcttttctgcccatcaggcgatgcgtctgcaactactgacagcagtaggggcactggcaggcacagcctgtgcccttctcactgaaggaggagcagtggrcagtgaaattgcaggtggtgcaggtcctggctgggtcctgccatttactgcaggtggctttatctacgtagcaacagtgtctgtgttgcccgagctgctgagggaggcatcaccattgcaatcacttctggaggtgctggggctgctggggggagttatcatgatggtgctgattgcccaccttgagtgaggggtggataaactacccctgccccaaacctctacccctaactccaggtcaggggtgcgtagaggttgggggccctggccagggacatctgccaaaggaaggaactgtagcctgggagaatggttactttggcattagggccttcaagggctggcagtcttacagaggctggagcggtgagaatgagaggccagagggaccatagtgttgggcactgtctgaccatgttgcatttggaaggctaaatggggccatgaagaaggctggaagggacagggggtgatggcagcctacctggtgtcccctaccccacctgttctcggagaaccaagttgctacacaggaagttctccaaggtccagtttcctttctcccaccagttggtggaggcttcagggaagaccagagtcctggacagagagggtaacaggaggagtcggggataaacatcaaacatcaatcgtgtgtcctgatttgggagtgattggggggatggggtgggagagggttarttggtattctcatggcctgattttttttgtttctattccttttatatcactgtgtttgaatcgagggggaggggtggtaaccggaaataaagacctccgatcttccgccccacatgcagtctttgtctttttggggggaatggggccccttgtcttctccacacccggggcccctaagcagcagtgtcgggccacgccccctckgtgggaggtcggcctgcgctggtggccgcagatggcctaaggctggcgggcctttgattggccccggctttgcccttgccacgcccctctgcgctgggattggcttagtgctgggattcccacccacccacagcccgccatggcgtctcagctccagaaccgactccgctccgcactggccttggtcacaggttgagggggttctttccccgggcggtttggggtattggagtgaggtcaggggcgtgcccttggagtgcgcggccgctgtgacctctggccccttacccacattttactttctgccctgtgacctctgatccctgccctctcctccccgtgcccggtccggcgtgttctgtcctacctcaggtgcggggagcggcatcggccgagcggtcagtgtacgcctggccggagagggggccaccgtagctgcctgcgacctggaccgggcagcggcacaggagacggtgcggctgctgggcgggccagggagcaaggaggggccgccccgagggaaccatgctgccttccaggctgacgtgtctgaggccagggccgccaggtgcctgctggaacaagtgcaggtgaacgcyaggccactttccccctctaaagctctratattgcctccactgccccggctttttgtggggggtttttgatgcgtaacctccccctcccataggcctgcttttctcgcccaccatctgtcgttgtgtcctgtgcgggcatcacccaggatgagtttctgctgcacatgtctgaggatgactgggacaaagtcatagctgtcaacctcaaggtggcgatctctgaacctgcgacgtttggcccccttagcctggggagggagttggaggagggctgtcaccccagctgatcttttctcccttgttaccctttcccgccagggcaccttcctagtcactcaggctgcagcacaagccctggtgtccaatggttgtcgtggttccatcatcaacatcagtagcatcgtaggaaaggtcaggttgagttggacgaggtcagccagccaagtggtatagagaggagaacccctccttragactcctgactcattccacatctctgactcacctataggtggggaacgtggggcagacaaactatgcagcatccaaggctggagtgattgggctgacccagaccgcagcccgggagcttggacggttggtcagatgcttgagggtgctggggagcacctggggggtctgagggaggtaccagcattcagccctctccagaatcggcagccactctccttcccacagacrtgggatccgctgtaactctgtcctcccagggttcattgcaacacccatgacacagaaagtgccacagaaagtggtggacaaggtaggaggctgtgggtggagggcagaatcattcagagactcaatctctctgggcttcacagagagagagagagagagagagagagaatactgggcacagttcctggcaaacattaaatattcaatgaatgtatgagaaatgaagacaaaaaarggtcacagactcagtcttcaaaaaaatccataaaagaagctttcacccacatgagtatttccttacagattactgaaatgatcccgatgggacacttgggggaccctgagggtgagcactgaatgtagtggggtccctgggaagggggcctgaatraagagatccccaaagtttggggattttctaggggactggtggttggtgtctgtggagaggtttgtggggagggatgtctttggtgggagattatggctgttttgggtctatgggagtgagcagaattctgccctctccccaccattctcatagatgtggcagatgtggtcgcattcttggcatctgaagatagtggatacatcacagggacctcagtggaagtcactggtatgaggccagcatggggagggagagggcagagaagtagaacccagactatatgagaaagcaagtaaggggagtctggagccactgggaagggcagaggttcccaaggccagggacagaagtgggtaccccctagcccatttgtgtctccacccatgcatctgtccaaatgtttctgcccctcccaggaggtcttttcatgtaactgcctcaaggaccctggactctgctcacccccccaccactctgcctggcctcctgctgatgaggactctaagttcccaggatacaaaaggggtggcagtgtatggttcaggaatgctgaatatgggaagcaggggtgcttgtgaccctaataaattccaagtcctcttccctgccacctccggctcttcttgtgtccaagccctcakacccttccccacctccccctcctttccctttcccgaaggattgttccctttctctgcctggtctcccagggcaacccccgccgccgggtgtgagaggaaagagtatgtgtcactgtgtatgcgtgacactccgggtctttttgragggaggggttcgtgcgtcacccctttccactggttctgcagcaccagtcccctccccccaactccctgggttcttatggtccccaagggtgatttgttcatggccccatcttggtgtccagtctggccttgaaagggggtcttggaacaggtggccctcccccacccctctcctttctctgagtccccccctcccctttctctccaccttacaatagctgcagccggcctggggtcggatgggggggattaggggagggggccaggattaggggaatgaaccagccgatgaaaggggctggagagagcaggagggagggggctgggaagaggaggagaaggggagggggtctgcgctaatcgactctggcgcccacataaggactggccacggactgaaggagaggacagggaagtaggggggaactggggtggggggcgagggcacccactgctgccttgtcccagggacaggccaccccctggcagccgcagcccaagtccgggagcctcagctcgggcggggacaagatgcccatcagggtctctaactgccccccaccccctcgccctgtatccctctcattccctacactcaatggggatcgctctgccccttcctcttctctttcctccccatccccttcgtttactctagagtcctcgaagaggcttctgcccacttcccactccagacattctgcccctgtgtaccccacccacacgcgcacccccccttcccaatgggagctccatcttgtgtatgtccctgtttccgcgtggtgtctcyattccccctttcctcccgtgcgcctccctcccttccccgccccgggccgcggctcctgattgtccaaacgcaattctcgagtctatggctccggccgagagttgagtctggacgtcccgagccgccgcccccaaacctcgagcgggagagcgggtcggagggtctagggagagccaaagcagagggtggagggagtccccagggtggtaaggggaatcccgggcacatcgggacctaggtgtgttctcrggactagaaggctaaagcggcagatcttttgcagccttttcccccgggatcctggaatgggggttacggagaagtgaggggggttgatccccagagtcgccagggtacgcagagtgggggaggtagcccttttcacgagccctctgtcccctcctggggtcccagatattccaggccccggccccccggagctgaggccccgcgtgggggcctctggaagggaaccgaggctaaggttgttggccgcgcgacggtgctgggccgggggcggagaccgtggttccctaagtggcgcagaactcccgggacgcaggatcctcacgcgggacgagcccgtcccgtgggcgggagaaccgcggcgtccacgkcccgtcccacccgcgccgcgaatggtgggtgacgtctccgccggcggggggagcgggtgtagcggaggagcaggcggaagtgacgtagggccccagcgcccgggccatggcggcggcggtggcgggagctgctgtctgagcagcggttgcggaccgagcgaacttggcccaggagcccgggcctagggagaggcgcggcggcggcgggagcgcgaacggctggagctgggtgaggggcagtgccggcgcgggggcgggagcgggggcggagagggkcgcttctggaggggcggggtctacgcgaggggcggcccccctgacgcmctcctccccttccccccacccccagccttcttcgccttctcctcggctgtggagccctggtggggggtctgcgcccggtcaccatgacgacgccggcgaatgcccagaatgccagcaaaacgtgggaactgagtctgtatgagctgcaccggaccccgcaggtgacaggcattctccctttcaggcttaccccctcccccmaamccttatatccacagaccgcatcacacagcttcttttccgtaatttgctctattctgccttgcctggccctacctttgaatcaccttaatctttccaaagcactttcgcatttagctcatttaatcctcaaaacagccctgccagagaggtggaacaagtattattatcttcatttgaaagatcacaaacacaaaaattaccttccctgttcctcattcagtgtcataagtcagtgcayataagactcactttgggagtttattaaaagcagagcttcatgccccccaacattctgattcagtagtgaattgggttctcagaatctgaatttttaacaggcaccctatggggttctaatacaggtagcaccaggactttaaaaaattttgttgaatagtttttcccaaccacagatttgtgccatcttcactcctaggccacttagccacctcagatcctcctattccaaagctcctactcttagttaatggacactaaagtctgtcttttctccatttgctccaagtcatcagtccttctctttctcagaattcttgtctcctatagagaccaacatgggtcttctcactgtatttctcaaaattcttattttatgggctrctgtttctaaaacccctttccctctaacccacaccacctttctactcactgatgccttcaggaagccataatggatggcacagagattgctgtttcccctcggtcactgcattcagaactcatgtgccctatctgcctggacatgctgaagaatacgatgaccaccaaggagtgcctccacagattctgctctgactgcattgtcacagccctacggagcgggtaataggagagacatgtttgagatgagatgaaggggtacaaagttagggccctctcactggtcttggttcagcctaggcttcagtwcccttgactgaccactcagggcttcccttctcctaccccaggaacaaggagtgtcctacctgccgaaagaagctggtgtccaagcgatccctacggccagaccccaactttgatgccctgatctctaagatytatcctagccgggaggaatacgaggcccatcaagaccgagtgcttatccgcctgagccgcctgcacaaccagcaggcattgagctccagcattgaggaggggctacgcatgcaggccatgcacaggtgtgagggtcaggagagaagcagaactgatgggatgggtccgtgggtcagtccttgttgcctgctagcttctaagcctcagcatcctaggagctgaccacakactgatcattagggctggaaatcatgggtgtaaattgcagtttcttagtaaacaactggccctgctcttcttaagaaaaatatagggctgggcacagtgactcacatctgtaatcccagcactttgggaggtgaggatgggaggatcacttgagcccaggagtttgagaccaccttgaataacatagggaaatctcatctctacaacaaattaaacatttagctgggcatggtggcacatgcctgtagtcctaccttcttgggaggctgaggtaataggatcacttgagcctgggaagaaagtggatgttgcagtgaaccatgatcacaccactgcacactgcactccagcctgctgggcgacagaacaaggccctgtcacaaaaaaaaaaaaaggaaaaatgtagtttaccccatgactttctagaagttagaacagtagagcgattttgagaataagccccggattcatactgctggaagttaaatcacctcctaggccagcatctctcagtctttcatgtgtatccagattacctgtagatcttcagatgcaaactgtgattcagtaggtctagagttgggcccgagagtctgcatttcacaagctcacaggggatgtgtatgctgctaccgcactttgagaggtgacagcctatgatcactaacaagttacttaacctctctaagcctcagtttcctcagccataaaatagaggtaatataattacctgtgtcataggattcattgtattaggtaaggggattggtgcaaaacacttagtatactgagtgcttagcacattgtgtttaataaatattaggtatcgtcattaggatttttcttatctcttaattctctgaagtttaaagtctaagccctttatcctggatgccttctaaccttaaccacttgcttctacagggcccagcgtgtgaggcggccgataccagggtcagatcagaccacaacgatgagtgggggggaaggagagcccggggagggagaaggggatggagaagatgtgagctcagactccgcccctgactctgccccaggccctgctcccaagcgaccccgtggagggggcgcaggggggagcagtgtagggacagggggaggcggcactggtggggtgggtgggggtgccggttcggaagactctggtgaccggggagggactctgggagggggaacgctgggccccccaagccctcctggggcccccagccccccagagccaggtggagaaattgagctcgtgttccggccccaccccctgctcgtggagaagggagaatactgccagacgaggtgaggagccctgtctttccccagccactgagaaaccaaagatcacctagakttccatcagaagtgggctttgcccaaacccaaaataccaccccaacccagaatccattttggaaagcccctacctccagtcctcatctgaggcgctctggctctaagcctgtcctccctcccattccaggtatgtgaagacaactgggaatgccacagtggaccacctctccaagtacttggccctgcgcattgccctcgagcggaggcaacagcaggaagcaggggagccaggagggcctggagggggygcctctgacaccggaggacctgatgggtgtggcggggagggtgggggtgccggaggaggtgayggtcctgaggagcctgctttgcccagcctggagggcgtcagtgaaaagcagtacaccatctacatcgcacctggaggcggggcgttcacggtgagagcttctgagggcagtggtagaagaggggagaggagggagggtggtctgggccacatagaaccatgagcctggtctaactcatcagcactcttcccctatacatcctctatctctttctatgtcccctctcctttcccatcatccatgtccttttttgccttatcgcttttattattccttttttctttcctcctcccttggtcaccttttgcctctcattcatttccttttccatcttctccaactttcctctctctttycccctctctcccttttaccccctcctcagacgttgaatggctcgctgaccctggagctggtgaatgagaaattctggaaggtgtcccggccactggagctgtgctatgctcccaccaaggatccaaagtgaccccaccaggggacagccagaggaaggggaccmtggggtatccctgtgtcctggtctatcaccccagcttctttgtcccccagtacccccagcccagccagccaataagaggacacaaatgaggacacgtggcttttatacaaagtatctatatgagattyttytatattgtacagagtggggcaaaacacgcccccatctgctgccttttctattgccctgcaacgtcccatctatacsaggtgttggagaaggtgaagaaccctcccattcacgcccgcctaccaacaacaaacgtgcttttttcctctttgaaacctgcagttctgtgtgtctgtttatcaggggtgtacaagaaaaagaaaggaaaatagattggggagggaggcctagaaataatgtaaaatcagccttggaaatggggagaaaatgtcgggttattcgagatatgtcgtcggaaactccaaattagcaaatatgtatgaaaataggaaccatctatgaagctggaagagaggataaaaaacagaggtgccaagttagaccccaaactttcccccctaaaacctgagtcgcccaggctgaaatccagggtttcaacaccaaagggaaagcaggaaaatggctcaaaagagaaagggatgtgtgtagatgtgggaatgaccgtgatgtttggaagtcactgcgagcagccggtttctatagctggaaagagggagggaggtggagaggactgcggagaagctccctgttcgacatcccagtccccgggccacctcccaaaaamgggcaggctgggctgcagactcggagtgtgagtgcacagcctttgcccgccgggcagcggggctgagcggagggagggtcgcctgggaacactagttctgtgctcgtccaggcagcggctgagagcagaggagtgggggcatcaaggaaagccgcggctgccttactggcctcgagttccgcgagcggggctgggcaccaagcctgaggctggggggacaggggcgcacgactgcactcccggtccggggcagtgcaggtattcggggaagaggaatcgcctctccagaaccgactgctgttccttccaccacccgtaacctctctgcccctcacttcctgtttcctctgctctgggtacccccagcccctctggccccaaattcctcccccatgctcagttctctgtctcactggcagaggagccggccgtgtttccccctaaagcccgcttggccctcccagttccgcagctgcgcggcccgcccgccgatcccatggctcccttctccacccttgggatttctcgtttgttcgcctcctctccggtaccctcaatcccgtagatgcaggtgggcatcctccagccccagcaagtactgcggaccagttgggctggctggcccctttcctgcagaagcagacaacacccacttctaccctcgtaggagcccctttctacactcacttccctggaacccgtgatcctgactcccctcctcccggaccccaagcatccaggacgtgtacggtataaggggaagttgtagtgggaggcaggtgggcgttgttcctggagtttcagggtagagaagcaggtggggaggagttgggtgagatacagaggtggaagccaaaagtctggagttaacctgacttctcttctggctccaggggctgccgggatcgtctgtcctcaccctccttgtcctccccagccctaaccacccggcagcctcttctctgtctctgctgcccgtcctgccttcactctgaaacagcctgccccctcccgggtccccagtcctcaccttygccccacacgcccccctctctatttatcacatttcctttcgtgtccccctaaccccatcgcttggtgcgagtgctctcttgccctcctctccccatgactgaacctcacagacatggctgtttatttaggtgacaccatgtgggagacacagaggaacccatttccatcctggctccactggggcatttcctttccaagtccttcagtccctcccaaccaagcctatgttactgggtcaggcaaggtgagagatataaagtatgcaaaagaaaacgttactattttgttgaggaacaagatacatgtggaatagttgacaatgcagaggaacagggtagaggaaggagggttgatacagtattagagtcagacaaacgtgggttcaaatcggctctgccacttacaaactgagccaccttgcacaaggcactgggtcttccctctgtttcttcacctgcaaaatgggggagagtaacaggttgccctgagaattgagagataatacaagtaaagttacacgcctaacagatcagtggctctcccagtgtggatcccagactagcagcatcagcatcgcctgggaacttgttagaaatgcaaattcttgggccccaccccagatctgctgtttaagaaactggagatggggccagcaattgcattttcccaagcccccaagtgcttctgatgttcacacaaggctgaggacactgaagaagatgccccacaaaatgttacggccttgccttatactataaagaatggcaaagggcccgtgtaggggtgctctgtgactcccaagcaggaggatcactgcaggccagtagggaggtgaggagcggcctcacagaggaggtgggactgggctgggraaggaaacagagaagcctttctgcmgtgggtgagggagatggggggaagctccctctcccttaccctacctaccacccagcacgattttacctctcaggcttctcagtctccaaagcagagcagaccatgtatctgaacgcggaagctgagctctggagcccagagcctcagggccctgagggaaggttcccccaggagacccctgcccaggcaaggcctaactctgagggccctgtccttgcctggcagccctcaacaccctgggaagctgctcacaggaggctgtgctctgggcttctccaccttcacagtccacctcagcgaggagggaggtgccgctgaaaccgccaaccacttcttcagttgggtgtggggcwtagcctctcctctcccacctctgtctcctctgcttcctcctcccccatgctgctctcacctctctcccctctccctgcaggctgggagcaaagggagaggaggaggagaagagaggacagacccagccctctacctactatggcactcctttacctgccagctgtcacaaccaacccttccccaactsccctacccgggacccccatctccacccacaaatccactcaaatttcctgcctggaatgtggagtctcttcccactgctctcacctctctcagcacagcctgggcaaggggcccttctcctscccctaatataggaagtacttcagccaaggggcccacctgaccctgtgcgaacactttcacacaggtgataggccctactcctgcagaaagtgtggccacagctcttgccacagctcacacctggcccagcactgcggcacacacctgcctgaacccaatcactgccaccagygtggcaagggcctctccccaaggctccagcccgttgcagcctgccactctacacacaggcaagcagccttacgtctgtgccacctaagccttcttgtggtagatgagggtgctggcccccactccaacctgcaacaccagcagcagaaccatacctgggggcgtccccatcacagtgaccagtgaggcaagggctatggacattgctcagggctggtgcagcaccagcaagtctgcagaagcaaaggctgcaggcatggtttctgatacagccccaggctggtgcagcatcaccagggccacatcagggacaggctctactgcttgcctctgtggctgtggtttcacttggaacacccacctgccatgacaccaggcctcatatgtggagaggaatgagatgaacacagtggggaggcagggaatcagagcccctgtggctgcatcaccgcccccaatctgcagcgctctatgagggtggcagggcagcctcagagacagacttcctccacctgtgggaggcataacagagcagagatccacccactcccagccagggtgaccttcagagcaaccataaggggtagctcgagtgtctcgcctgaacccactcaaagctggaatggccaggtccacttcactctagaccaaagtgccaagtcctaagggagctcccaagccaggaacttttctctggagaagaatccatacttctcagggtcttaaaaaattttgttttttatataaataagaggtcctggggcacttttccatctcctgtcctccatcggagaaatttcactaggctgtctcagacgtgctgttgtcgtggatggattagactccttgggactttcttgaagggtcattttaaagtgatagcttaggctgggcatgatggctcatggctgtaattccaacactgtgggaagccaaggtaggtggattacttgaggccaggagttcaagaccagcctgaccaaacctggcaaaaccctggctatacaaaaaacacaaaaattagcaaggcgtggtggcccatgcctgtaatcccagctactcaggaggttaaggcatgagaatcacttgaacctgggaggcggagtttgcagtggccgagatcacgccactgcactccagcctgggcgacagagtgaacctctayctcaaaacagaacaaacaaagaaaaaaatgcccttaagagttcttttataaaaataaaaacagaaaaaaaatagataacttaatttccagagatctccaggacaaccccstaccatcaaatcctagtcccccaactaatcccacccaacccccagaggctactgggttcttcctgcctcaggtgttcacactacacccggcgcccctatttgatgagccatcttcctgtgcctactccttgcttcaccaggtcctgttcttacgagtttactgttactcttcatgttatagggtaagtgagaccttattcttgtattaacttgccccagagtatactctttggaactcggcaatatttctccctatgatgtaccaaggaggttgattactgacacatgctagaagaaattaaatacgcttagtggtcaaaggattacttgagagactgctaatcatttccaccctttcgggaaatgtgtattgagtctaccatgtgtcaggagttgttctgggacctgggtatcatagtcatgtggcatagcccctgccttcgaaggatttgatgtaggggcggtttagaatgagcatctcaatattgaatccagcacctagtcctatccattttatctgctctaatatatctcaagtctgtccactcgttttcatccctccacatccctgggytagccaccatgtggaccatgtggccttctctgagtcattgcagtagctgaagaggctgrgaatggccttctctacagtatgacacacacctaagagggatcctttaaaaatgcaaatctgattgtttcagtcagcctccttaaacctattcagtggttttccattgatcttaggttaaagacccaagtccttaacctgacctctaaggccctgcaaggggtggcccctcctctccagcctcatctcccaccacaccccctcactcgtgtgctccagttgctgtccaccttgtgcttcctcctgcacagagtctccagggaggctggaccctctgtggaamggctccttcctctgttcctctcctcttagctcctcttcattcttcaggcctcaccttctcaatagcctcagggaagccttcctgaccttcttttcagggtcaaattctcctgttatgagcgctcacactaaggtgtacctttcctcagaggcacttggccctgttggagttctacatttgttgatgattatgtacagactgatgtctgtctgccccattgaatgtaagctccctgagggcagggactatgactgcagatgctcactcttgccactccctggacctaacactggatactttataaatagtggttgaatagatgcattcatggcaggatctgggcaggaggctagatatttcaggatttcagaggtgatgaattaaggccatgattctccctcctgtagctgcagcccaagaatcccatgtgctattacctaacactgttacttcctccttaattcctggcatcattcaggtccacagccctgccttcatcccaggcttcctccatcttgcctgtgagaccctctccctctttaactttttagttcccctttctggttttgcctcat

SEQ ID NO: 9884 - DNA, 13829 bp, Homo sapiens
  misc_feature (1)..(1909): n is a, c, g, or t
  misc_feature (8149)..(13829): n is a, c, g, or t
nnnnnnnnnnnnnnnnnnnnnnnnnnnnnnnnnnnnnnnnnnnnnnnnnnnnnnnnnnnnnnnnnnnnnnnnnnnnnnnnnnnnnnnnnnnnnnnnnnnnnnnnnnnnnnnnnnnnnnnnnnnnnnnnnnnnnnnnnnnnnnnnnnnnnnnnnnnnnnnnnnnnnnnnnnnnnnnnnnnnnnnnnnnnnnnnnnnnnnnnnnnnnnnnnnnnnnnnnnnnnnnnnnnnnnnnnnnnnnnnnnnnnnnnnnnnnnnnnnnnnnnnnnnnnnnnnnnnnnnnnnnnnnnnnnnnnnnnnnnnnnnnnnnnnnnnnnnnnnnnnnnnnnnnnnnnnnnnnnnnnnnnnnnnnnnnnnnnnnnnnnnnnnnnnnnnnnnnnnnnnnnnnnnnnnnnnnnnnnnnnnnnnnnnnnnnnnnnnnnnnnnnnnnnnnnnnnnnnnnnnnnnnnnnnnnnnnnnnnnnnnnnnnnnnnnnnnnnnnnnnnnnnnnnnnnnnnnnnnnnnnnnnnnnnnnnnnnnnnnnnnnnnnnnnnnnnnnnnnnnnnnnnnnnnnnnnnnnnnnnnnnnnnnnnnnnnnnnnnnnnnnnnnnnnnnnnnnnnnnnnnnnnnnnnnnnnnnnnnnnnnnnnnnnnnnnnnnnnnnnnnnnnnnnnnnnnnnnnnnnnnnnnnnnnnnnnnnnnnnnnnnnnnnnnnnnnnnnnnnnnnnnnnnnnnnnnnnnnnnnnnnnnnnnnnnnnnnnnnnnnnnnnnnnnnnnnnnnnnnnnnnnnnnnnnnnnnnnnnnnnnnnnnnnnnnnnnnnnnnnnnnnnnnnnnnnnnnnnnnnnnnnnnnnnnnnnnnnnnnnnnnnnnnnnnnnnnnnnnnnnnnnnnnnnnnnnnnnnnnnnnnnnnnnnnnnnnnnnnnnnnnnnnnnnnnnnnnnnnnnnnnnnnnnnnnnnnnnnnnnnnnnnnnnnnnnnnnnnnnnnnnnnnnnnnnnnnnnnnnnnnnnnnnnnnnnnnnnnnnnnnnnnnnnnnnnnnnnnnnnnnnnnnnnnnnnnnnnnnnnnnnnnnnnnnnnnnnnnnnnnnnnnnnnnnnnnnnnnnnnnnnnnnnnnnnnnnnnnnnnnnnnnnnnnnnnnnnnnnnnnnnnnnnnnnnnnnnnnnnnnnnnnnnnnnnnnnnnnnnnnnnnnnnnnnnnnnnnnnnnnnnnnnnnnnnnnnnnnnnnnnnnnnnnnnnnnnnnnnnnnnnnnnnnnnnnnnnnnnnnnnnnnnnnnnnnnnnnnnnnnnnnnnnnnnnnnnnnnnnnnnnnnnnnnnnnnnnnnnnnnnnnnnnnnnnnnnnnnnnnnnnnnnnnnnnnnnnnnnnnnnnnnnnnnnnnnnnnnnnnnnnnnnnnnnnnnnnnnnnnnnnnnnnnnnnnnnnnnnnnnnnnnnnnnnnnnnnnnnnnnnnnnnnnnnnnnnnnnnnnnnnnnnnnnnnnnnnnnnnnnnnnnnnnnnnnnnnnnnnnnnnnnnnnnnnnnnnnnnnnnnnnnnnnnnnnnnnnnnnnnnnnnnnnnnnnnnnnnnnnnnnnnnnnnnnnnnnnnnnnnnnnnnnnnnnnnnnnnnnnnnnnnnnnnnnnnnnnnnnnnnnnnnnnnnnnnnnnnnnnnnnnnnnnnnnnnnnnnnnnnnnnnnnnnnnnnnnnnnnnnnnnnnnnnnnnnnnnnnnnnnnnnnnnnnnnnnnnnnnnnnnnnnnnnnnnnnnnnnnnnnnnnnnnnnnnnnnnnnnnnnnnnnnnnnnnnnnnnnnnnnnnnnnnnnnnnnnnnnnnnnnnnnnnnnnnnnnnnnnnnnnnnnnnnnnnnnnnnnnnnnnnnnnnnnnnnnnnnnnnnnnnnnnnnnnnnnnnnnnnnnnnnnnnnnnnnnnnnnnnnnnnnnnnnnnnnnnnnnnnnnnnnnnnntgaggactccttatagtcagcctggtgatgctgcaggcaaaagcacagaagggctgcaggtctgggccccctttttgggtacgctggcccctatctcccttcaacctggtctgctcagggccccaaagctaggttcatccctttaggacagtgacagctcctcagccatcgacttctgtatataagcatgtcagatgaggccgagcaaagaaacactgaatttaataaagccaaggaaccaggagaactctccaacccaaatcaatcctcgatgtgtttttaattaagttatagcccttgtgattaaagagtgtgaatttcattactgtgaccatttatcaaggagcatacccgctgaacctttgtaacaggcagggaagaaggctttttattttcatcaacaccaagtgccctgtttgtatctcaactgactcatcaaggaaaactgtctcccctcccaagctgccacccactcagtaatgacaaagccatgcctgcccccacactgcccatcaataggccaaggcagatgagtatgaaacttctgattttgttcaagtgtcctccacaaccctcatccagccaggctactgcactgccaaagtgcaattcgggccccaggagtcaaggtgcatagagcaaggagcctaggcattctcagatgctggagttggcttgtcctgaaaaatgatacatttaaaactttggcctaaccacaactcaactagctacataaatgaatgagggctggaggagggaaggaaggagaagagacaccatattggatgttaacaattgaaaggcaacctcagggactctgactttgctagtttctagatgtgtgtgtgtgtgtgtgtgtgtgtgtgtacatgtgttctttgcaatttgggaaattgttttattgaagtgttatatgcaaggaagtgcccagatcatgcacatacaagttgatgaattccacaatgtgagcacactgtaaccagaacccagatcaccaaacagaaaactagcactctccagaaacccccagagtgctcctcatagtcactattgccccacgatagtaaccactatcctgatttctactggttttgtttatttttatattttacgtagatggaatcagaatcagacagaattccccccccccctttgtttttttgagacggagtctcgctttgtggcccaggctggaatgcagtggagtgatctcggctcacttgcaagctctgcctctcgggttcacaccattctcctgcctcagcctcccgagtagctgggactacaggcgcccgccaccatacctggctaatttttttgtattttcagtagagacggggtttcactgtgttagccaggatggtgtcgatctcctgacctcgtgatccacccgcctcggcctcccaaagtgctgggattacaggcgtgagccaccgcacccagccagaacttccctttttatgtccagcttcttttactcaatattatgtttgtgagatttgtatgtgaatatgccacaatttatttatccattccacttttttttttttttttttagacagggtgttgctctgttacccaggttgcagtgcagtggtatgatcacggctcactgcagctgtgacttcccaggctcaagcaatcctcccatctcagcttcctgagtagctgggacatgtcaggcacatgccactatgcctggataatatttttattattatttgtagagacagggtctcgccatgttgcccagactggtctcaaactcccgggctcaagcaatcctcctgcctcggcctctcaagatgctgggattaaggtgtgaaccactgcacctggctgtgttcgaatcttgatgggcgtgtgagccactgtgcctggctccattcaaatcttgatgggcatttgagttgcttctagtttggacggcattgtatcgagcaatgctgttacaaacatttgtgtacatatctattggtgaatatatatgtctttctgtgtgttatagtgcttagtagtggaattgttcggtcatgtatgtatgttcagctatagtagatacagctatattgccacagtgatttccaaagccgttgtacaatttacccacagtacatgagcattctacttagtctacattcatatatgagcattctggttggtccacatcctcaccaacacatggtattgtctatcttttttcttttagtctttctggcggatatgtagtcaccctgggttgcgttcctaggaaagtggactataagataaatattagtgtgcagaaagtttactggggagtgctcttaggaacagtatctttgagcaagtggagaaagcaggattaggcaggcgtagaggttggaccatgatgcagtcataacaaagaccttggccagtgccatggagaactctgaagctgggatgacccttcagaattgcctcagatttgggcaggggactgagcctttatacctcatatcaaccagtcattggatgcagacctccccagcaggaggaggaactaggctgtgagctgtcagtaatcgacacttacaggagtcagcgagatgagtacttcagtcctgatttgtggaggaggaatttgggaagcacactacagaattcactacagtagtggtattgcattgtggttttaaagtgcatttctctgatgactcctgaggttaagcatcttttggccatttagataacttcttttgagaaatgttcgtttgggccctttgccaagctttctattgggatgtcagtcttttttttatttgtaggaattctttacatgtttgaatagttctttaagatatatgtctctggaggcactgccagagacatacatctcaaataactatctggaatacataatatatattgtatataaagaatttttacaaatcaatgtgaaaaagacagaaatcccaatagaaaatttggcaaggaatctgaatatatactataaatgtcttcttccccttaaggatgaccttcttccactcaatgttttttgataaataaaagttgttgattttaatgtagtctaatgcatttttaaaaatattattaatgtgtttcgcatctcatttaaggtctttgcctacttcaaggtcatgaagatattctcctatgttttctataaaatatttactttttaccttttacacatcacctagaattggtttgggtgtatgatatgaactaggagtcacgatatatttttttctatgtgatattcaattgacccacaataatttatgaaaatgtaattttttttcataaagcaagtgaccatatatatgtgggtccatttctgaactctattctgttacattttcaaattgaatgtccttgcaccaatatcatactgtcttatttattacagcattcttaatatctgttagtattaaaagtttttttaagcctgcttgaatttttattgggattgtgtcaaatctatgtattaacttggagaaaattgagatctttacagtatttagtcttccaatacatgactaatagcacatccctccttttatttagattttctttaatttctttccagtgttttcttgttttcagtgtagagatcttgcacaccttagatttatttctaggtatttggtgttttctgatgttattataaatgaaatcttttataaatttattttgtctttttgttgctaatatataaaatgcaaatgatttttaaatatgtttactttgtatcccactgccttgctaaattcacttattaattctaatagtttgtctatggattttattggatttcttatggacccaatcatgtagtttgtgaataatagatttatgtattctattctgatccttatgcttttctcccatttccttagattattgaactacattggacctctgatataacatgaaacagaagtggtaatagtaggaaacgctttctcattctcaatctatgacgaaggattttaatacttcactgttaattacgatggctgctgtagggtttttttgtgtgtgacttctccttatcagatcagaaagttcccttcttagccaaagtaagcagtagccaacttgtcagggtgggagtcatattacaaaaccgagggcagtgaagaagctgaagaagaacaagaagagaaccttgaagcaagaggagactataaatattcagaaagagatagtttgatttttttggttgatgcctccaaggctatgtttgaatctcctagtgaagatgaattgacaccttttgacatgagcatccagtgtattcaaagtgtgtacatcagtaagatcataagcagtgatcgagatctcttggctgtggtgttctacggtaccgagaaagacaaaaattcagtgaattttaaaaatatttatgtcttataggagctggataatccaggtgcaaaatgaattctagagcttgaccagtttaaggggcagcagggacaaaaacgtttccaagacctgatgggccatggatctgactactcactcagtgaagtgctgtgggtccgtgccaacctctttagtgatgtccaattcaagatgagtcatacgaagatcacgctcttcaccaatgaagacaacccccatggcaatgagagtgccaaagccagccaggccaggaccaaagccggtgatctccgagatacaggcatcttccttgacttgatgcatctgaagaaacctggaggctttgacatatccttgttctacagagatatcatcagcatagcagaggatgaggacctcagggttcactttgaggaatccagcaagctagaagacctgttgcagaaggttcacgccaaagagaccaggaagcgagcactcagcaggttaaagctgaagctcaacaaagatatagtgatctctgtgggcatttataatctggtccagaaggctctcaagcctcctccaataaagctctatagggaaataaatgaaccagtgaaaaccaagacccggacctttaatacaagtacagacgatttgcttctgcctagcgataccaagtggtctcagatctatgggagtcgtcagattatactggagaaagaggaaacagaagagctaaaacggtttgatgatccaggtttgatgctcatgggtttcaagccattggtactgctgaagaaacgccattacctgaggccctccctgtctgtgtacccagaggagtcgctggtgattgggagctcaaccctgttcagtgctctgctcatcaagtgtctggagaaggaggttgcagcattgtgcagatacacaccccgcaggaacatccccccttattttgtggctttggtgacacaggaagaagtgttggatgaccagaaaattcaggtgactcctccgggcttccagctggtctttttaccctttgctgatgataaaaggaagatgccctttactgaaaaagtcacggcaactccagagcaggtggacaagatgaaggctatcattgagaagcttcgcttcacgtacagaagtgacagctttgagaaccccgtgctgcagcagcacttcaggaacctggaggccttggccttggatttgatggagccagaacaagcagtggacctgacattgcccaaggttgaagcaataaatagaagactgggctccctggtggatgagtttaaggagcttgttcacccaccagattwcaatcytgaagggaaagttaccaagagaaaacatgataatgaaggttctggaagcaaaaggcccaaggtggagtattcagaagaggagctgaagacccacattagcaagggcacgctgggcaagttcactgtgcccatgttgaaagaggcctgccgggcttacgggctgaagagtggkctgaagaagcaggagctgctggaagccctcaccaagcacttccaggattgaccagaggccatgcgtccagctgcccttccacagtgaggccaggctgcctggccttgtcctcagccagttaaaatgtgtttctcctgagctaggaagagtctacccgacataagtcgagggactttatgtttttgaggctttctgttgccatggtgatggtgtagccctcccactttgctgttccttactttactacctgaataaagagccctaagtttgtactaaaaagaaagaaagaaagaaagaaagaaagaaagaaagaaagttcccttcttagttttctaagagatttttgtttgttttttggtgttttattaaggnnnnnnnnnnnnnnnnnnnnnnnnnnnnnnnnnnnnnnnnnnnnnnnnnnnnnnnnnnnnnnnnnnnnnnnnnnnnnnnnnnnnnnnnnnnnnnnnnnnnnnnnnnnnnnnnnnnnnnnnnnnnnnnnnnnnnnnnnnnnnnnnnnnnnnnnnnnnnnnnnnnnnnnnnnnnnnnnnnnnnnnnnnnnnnnnnnnnnnnnnnnnnnnnnnnnnnnnnnnnnnnnnnnnnnnnnnnnnnnnnnnnnnnnnnnnnnnnnnnnnnnnnnnnnnnnnnnnnnnnnnnnnnnnnnnnnnnnnnnnnnnnnnnnnnnnnnnnnnnnnnnnnnnnnnnnnnnnnnnnnnnnnnnnnnnnnnnnnnnnnnnnnnnnnnnnnnnnnnnnnnnnnnnnnnnnnnnnnnnnnnnnnnnnnnnnnnnnnnnnnnnnnnnnnnnnnnnnnnnnnnnnnnnnnnnnnnnnnnnnnnnnnnnnnnnnnnnnnnnnnnnnnnnnnnnnnnnnnnnnnnnnnnnnnnnnnnnnnnnnnnnnnnnnnnnnnnnnnnnnnnnnnnnnnnnnnnnnnnnnnnnnnnnnnnnnnnnnnnnnnnnnnnnnnnnnnnnnnnnnnnnnnnnnnnnnnnnnnnnnnnnnnnnnnnnnnnnnnnnnnnnnnnnnnnnnnnnnnnnnnnnnnnnnnnnnnnnnnnnnnnnnnnnnnnnnnnnnnnnnnnnnnnnnnnnnnnnnnnnnnnnnnnnnnnnnnnnnnnnnnnnnnnnnnnnnnnnnnnnnnnnnnnnnnnnnnnnnnnnnnnnnnnnnnnnnnnnnnnnnnnnnnnnnnnnnnnnnnnnnnnnnnnnnnnnnnnnnnnnnnnnnnnnnnnnnnnnnnnnnnnnnnnnnnnnnnnnnnnnnnnnnnnnnnnnnnnnnnnnnnnnnnnnnnnnnnnnnnnnnnnnnnnnnnnnnnnnnnnnnnnnnnnnnnnnnnnnnnnnnnnnnnnnnnnnnnnnnnnnnnnnnnnnnnnnnnnnnnnnnnnnnnnnnnnnnnnnnnnnnnnnnnnnnnnnnnnnnnnnnnnnnnnnnnnnnnnnnnnnnnnnnnnnnnnnnnnnnnnnnnnnnnnnnnnnnnnnnnnnnnnnnnnnnnnnnnnnnnnnnnnnnnnnnnnnnnnnnnnnnnnnnnnnnnnnnnnnnnnnnnnnnnnnnnnnnnnnnnnnnnnnnnnnnnnnnnnnnnnnnnnnnnnnnnnnnnnnnnnnnnnnnnnnnnnnnnnnnnnnnnnnnnnnnnnnnnnnnnnnnnnnnnnnnnnnnnnnnnnnnnnnnnnnnnnnnnnnnnnnnnnnnnnnnnnnnnnnnnnnnnnnnnnnnnnnnnnnnnnnnnnnnnnnnnnnnnnnnnnnnnnnnnnnnnnnnnnnnnnnnnnnnnnnnnnnnnnnnnnnnnnnnnnnnnnnnnnnnnnnnnnnnnnnnnnnnnnnnnnnnnnnnnnnnnnnnnnnnnnnnnnnnnnnnnnnnnnnnnnnnnnnnnnnnnnnnnnnnnnnnnnnnnnnnnnnnnnnnnnnnnnnnnnnnnnnnnnnnnnnnnnnnnnnnnnnnnnnnnnnnnnnnnnnnnnnnnnnnnnnnnnnnnnnnnnnnnnnnnnnnnnnnnnnnnnnnnnnnnnnnnnnnnnnnnnnnnnnnnnnnnnnnnnnnnnnnnnnnnnnnnnnnnnnnnnnnnnnnnnnnnnnnnnnnnnnnnnnnnnnnnnnnnnnnnnnnnnnnnnnnnnnnnnnnnnnnnnnnnnnnnnnnnnnnnnnnnnnnnnnnnnnnnnnnnnnnnnnnnnnnnnnnnnnnnnnnnnnnnnnnnnnnnnnnnnnnnnnnnnnnnnnnnnnnnnnnnnnnnnnnnnnnnnnnnnnnnnnnnnnnnnnnnnnnnnnnnnnnnnnnnnnnnnnnnnnnnnnnnnnnnnnnnnnnnnnnnnnnnnnnnnnnnnnnnnnnnnnnnnnnnnnnnnnnnnnnnnnnnnnnnnnnnnnnnnnnnnnnnnnnnnnnnnnnnnnnnnnnnnnnnnnnnnnnnnnnnnnnnnnnnnnnnnnnnnnnnnnnnnnnnnnnnnnnnnnnnnnnnnnnnnnnnnnnnnnnnnnnnnnnnnnnnnnnnnnnnnnnnnnnnnnnnnnnnnnnnnnnnnnnnnnnnnnnnnnnnnnnnnnnnnnnnnnnnnnnnnnnnnnnnnnnnnnnnnnnnnnnnnnnnnnnnnnnnnnnnnnnnnnnnnnnnnnnnnnnnnnnnnnnnnnnnnnnnnnnnnnnnnnnnnnnnnnnnnnnnnnnnnnnnnnnnnnnnnnnnnnnnnnnnnnnnnnnnnnnnnnnnnnnnnnnnnnnnnnnnnnnnnnnnnnnnnnnnnnnnnnnnnnnnnnnnnnnnnnnnnnnnnnnnnnnnnnnnnnnnnnnnnnnnnnnnnnnnnnnnnnnnnnnnnnnnnnnnnnnnnnnnnnnnnnnnnnnnnnnnnnnnnnnnnnnnnnnnnnnnnnnnnnnnnnnnnnnnnnnnnnnnnnnnnnnnnnnnnnnnnnnnnnnnnnnnnnnnnnnnnnnnnnnnnnnnnnnnnnnnnnnnnnnnnnnnnnnnnnnnnnnnnnnnnnnnnnnnnnnnnnnnnnnnnnnnnnnnnnnnnnnnnnnnnnnnnnnnnnnnnnnnnnnnnnnnnnnnnnnnnnnnnnnnnnnnnnnnnnnnnnnnnnnnnnnnnnnnnnnnnnnnnnnnnnnnnnnnnnnnnnnnnnnnnnnnnnnnnnnnnnnnnnnnnnnnnnnnnnnnnnnnnnnnnnnnnnnnnnnnnnnnnnnnnnnnnnnnnnnnnnnnnnnnnnnnnnnnnnnnnnnnnnnnnnnnnnnnnnnnnnnnnnnnnnnnnnnnnnnnnnnnnnnnnnnnnnnnnnnnnnnnnnnnnnnnnnnnnnnnnnnnnnnnnnnnnnnnnnnnnnnnnnnnnnnnnnnnnnnnnnnnnnnnnnnnnnnnnnnnnnnnnnnnnnnnnnnnnnnnnnnnnnnnnnnnnnnnnnnnnnnnnnnnnnnnnnnnnnnnnnnnnnnnnnnnnnnnnnnnnnnnnnnnnnnnnnnnnnnnnnnnnnnnnnnnnnnnnnnnnnnnnnnnnnnnnnnnnnnnnnnnnnnnnnnnnnnnnnnnnnnnnnnnnnnnnnnnnnnnnnnnnnnnnnnnnnnnnnnnnnnnnnnnnnnnnnnnnnnnnnnnnnnnnnnnnnnnnnnnnnnnnnnnnnnnnnnnnnnnnnnnnnnnnnnnnnnnnnnnnnnnnnnnnnnnnnnnnnnnnnnnnnnnnnnnnnnnnnnnnnnnnnnnnnnnnnnnnnnnnnnnnnnnnnnnnnnnnnnnnnnnnnnnnnnnnnnnnnnnnnnnnnnnnnnnnnnnnnnnnnnnnnnnnnnnnnnnnnnnnnnnnnnnnnnnnnnnnnnnnnnnnnnnnnnnnnnnnnnnnnnnnnnnnnnnnnnnnnnnnnnnnnnnnnnnnnnnnnnnnnnnnnnnnnnnnnnnnnnnnnnnnnnnnnnnnnnnnnnnnnnnnnnnnnnnnnnnnnnnnnnnnnnnnnnnnnnnnnnnnnnnnnnnnnnnnnnnnnnnnnnnnnnnnnnnnnnnnnnnnnnnnnnnnnnnnnnnnnnnnnnnnnnnnnnnnnnnnnnnnnnnnnnnnnnnnnnnnnnnnnnnnnnnnnnnnnnnnnnnnnnnnnnnnnnnnnnnnnnnnnnnnnnnnnnnnnnnnnnnnnnnnnnnnnnnnnnnnnnnnnnnnnnnnnnnnnnnnnnnnnnnnnnnnnnnnnnnnnnnnnnnnnnnnnnnnnnnnnnnnnnnnnnnnnnnnnnnnnnnnnnnnnnnnnnnnnnnnnnnnnnnnnnnnnnnnnnnnnnnnnnnnnnnnnnnnnnnnnnnnnnnnnnnnnnnnnnnnnnnnnnnnnnnnnnnnnnnnnnnnnnnnnnnnnnnnnnnnnnnnnnnnnnnnnnnnnnnnnnnnnnnnnnnnnnnnnnnnnnnnnnnnnnnnnnnnnnnnnnnnnnnnnnnnnnnnnnnnnnnnnnnnnnnnnnnnnnnnnnnnnnnnnnnnnnnnnnnnnnnnnnnnnnnnnnnnnnnnnnnnnnnnnnnnnnnnnnnnnnnnnnnnnnnnnnnnnnnnnnnnnnnnnnnnnnnnnnnnnnnnnnnnnnnnnnnnnnnnnnnnnnnnnnnnnnnnnnnnnnnnnnnnnnnnnnnnnnnnnnnnnnnnnnnnnnnnnnnnnnnnnnnnnnnnnnnnnnnnnnnnnnnnnnnnnnnnnnnnnnnnnnnnnnnnnnnnnnnnnnnnnnnnnnnnnnnnnnnnnnnnnnnnnnnnnnnnnnnnnnnnnnnnnnnnnnnnnnnnnnnnnnnnnnnnnnnnnnnnnnnnnnnnnnnnnnnnnnnnnnnnnnnnnnnnnnnnnnnnnnnnnnnnnnnnnnnnnnnnnnnnnnnnnnnnnnnnnnnnnnnnnnnnnnnnnnnnnnnnnnnnnnnnnnnnnnnnnnnnnnnnnnnnnnnnnnnnnnnnnnnnnnnnnnnnnnnnnnnnnnnnnnnnnnnnnnnnnnnnnnnnnnnnnnnnnnnnnnnnnnnnnnnnnnnnnnnnnnnnnnnnnnnnnnnnnnnnnnnnnnnnnnnnnnnnnnnnnnnnnnnnnnnnnnnnnnnnnnnnnnnnnnnnnnnnnnnnnnnnnnnnnnnnnnnnnnnnnnnnnnnnnnnnnnnnnnnnnnnnnnnnnnnnnnnnnnnnnnnnnnnnnnnnnnnnnnnnnnnnnnnnnnnnnnnnnnnnnnnnnnnnnnnnnnnnnnnnnnnnnnnnnnnnnnnnnnnnnnnnnnnnnnnnnnnnnnnnnnnnnnnnnnnnnnnnnnnnnnnnnnnnnnnnnnnnnnnnnnnnnnnnnnnnnnnnnnnnnnnnnnnnnnnnnnnnnnnnnnnnnnnnnnnnnnnnnnnnnnnnnnnnnnnnnnnnnnnnnnnnnnnnnnnnnnnnnnnnnnnnnnnnnnnnnnnnnnnnnnnnnnnnnnnnnnnnnnnnnnnnnnnnnnnnnnnnnnnnnnnnnnnnnnnnnnnnnnnnnnnnnnnnnnnnnnnnnnnnnnnnnnnnnnnnnnnnnnnnnnnnnnnnnnnnnnnnnnnnnnnnnnnnnnnnnnnnnnnnnnnnnnnnnnnnnnnnnnnnnnnnnnnnnnnnnnnnnnnnnnnnnnnnnnnnnnnnnnnnnnnnnnnnnnnnnnnnnnnnnnnnnnnnnnnnnnnnnnnnnnnnnnnnnnnnnnnnnnnnnnnnnnnnnnnnnnnnnnnnnnnnnnnnnnnnnnnnnnnnnnnnnnnnnnnnnnnnnnnnnnnnnnnnnnnnnnnnnnnnnnnnnnnnnnnnnnnnnnnnnnnnnnnnnnnnnnnnnnnnnnnnnnnnnnnnnnnnnnnnnnnnnnnnnnnnnnnnnnnnnnnnnnnnnnnnnnnnnnnnnnnnnnnnnnnnnnnnnnnnnnnnnnnnnnnnnnnnnnnnnnnnnnnnnnnnnnnnnnnnnnnnnnnnnnnnnnnnnnnnnnnnnnnnnnnnnnnnnnnnnnnnnnnnnnnnnnnnnnnnnnnnnnnnnnnnnnnnnnnnnnnnnnnnnnnnnnnnnnnnnnnnnnnnnnnnnnnnnnnnnnnnnnnnnnnnnnnnnnnnnnnnnnnnnnnnnnnnnnnnnnnnnnnnnnnnnnnnnnnnnnnnnnnnnnnnnnnnnnnnnnnnnnnnnnnnnnnnnnnnnnnnnnnnnnnnnnnnnnnnnnnnnnnnnnnnnnn

SEQ ID NO: 9885 - DNA, 24607 bp, Homo sapiens
attacaggtatgagccactgagcccagccaccatctctacaaatttttttttttttttgagacggagtcttgctcggttgcctaggcagtgggtgtgatcttggctcactgcaacctccacctcccaggttcactgcctcagcctcctgagtagctggaactacaggcgcgtaccaccacacccaactaatttttgtactttttgtagagacggggtttcaccatgttggccaggctagtctcgaattcctgtcctcgtgatccgcccaccttggcctcccaaagtgctgggattacaggcacaactcagcagtaagcaagatccgtaataaacatttactttcttagcaaatcctcaaaaccataacatgaggtaggaacttttattatcacaagtccagagaggtaaagttacttgcccaatgccacacagcaagcaagtggcctgtccaggatgtgatcttaggtttgtctgactgcagagcccccaccctcactttccagtgtgtgtgagggggtcaggaacagagggaggactattgtaagcggagccccaggcactgtagggtcctggagaaataagggggcagtggtgccaggagctcaacaggggtgtccctggccctggtgcctgggagaaggagccgatgtaggtggaggtgcaagggcagctgggcagcctgggagggggtcaggtggaggcgtctgaggagggcttcatccaggacctggagcgggagaggtacgttgtgttcagccccacattttccaagcagctgagtacccagctctaagggaaatgggagtaaggcgggcgcttcctccattccccactgttctgcaactgttaatcatttcctctttgcacacagatgtgcacattcacacaggcactcacactgcagcagagactggctagggggtcacccaatcagtttcctcctaggcacacacctcaactccatttcccagccctctcacagcttggtgagacgtgagtgagctctagctgagtgaatgtgggtggcagtatgtatgccacttccacacctggcccagaaaaaccttatccacttgaacctacactgtctcccctcatctggctgggtatcaacagcctgggtccctgagtacttagtgcttgaagcagagcccactcccattatttgaccttaacatgagggcacagttcttgtgtgaagactctggtagtctgggcttagtgtgttagagcaggtagaggcatctggtgtcctaatacaygcatgcctttgaccctttgtaccagactcaaagaatggcagacttaagagggctttagaaattagccacatcaactcccttattgaacacatggacagaatgaagcccaagagagtgagtgttacttgcccaaggccacacaccaagatgtgggtacggatacagccttgggagccaaaagggctgcctcccagtagtcccaagctgcacagataaggtctggagatgctgcccatgctcacctctccctccacccctcagaaagcagcaggcaggtgggctggagtacctgtctttggggcttgttgttctcagctggcagcagaaatcgctggcccaggacagtgcccacacgggcagagtacatgtggtccccaagcacagggcagagctgtagtaccatgtgcacctgtagttgactggagaacactgggcaacaggaaagccaggagagacagtgggcagctactcgttctgtgccacccagtatcactcctccccttttcctttggggaaacaccaccccctttctcagatcatatgtttcagtgaggtcagtactatggcccctgcatccagagagggacacataacacgtcaggacgatcacagctrtcaatctgcctggctgtgggatccactcatgatgagatgcaaccctgatttaattgctgaagccaccgggcctaaggactgttctttcctgttggggtgctagcctgaagctgcctcctctagctgggcctggtcacatacacctctgggggccatcaaatgctccccaggctgctgctgataccactgtctccccagctccttgcctccctaagccaagtgcagttttttttttttttagccagcgtttcactctgtctcccaggctggagtgcaatggtgtgatcttcgctcactgcaacctctgtctcccaggttcaagcgattctcccgcctcagcctcccaagtagctaggattacaggtgcgtgccaccaactccagctaatttttgtatttttagtagagacagggtttcaccatgttagcctggctggtttcgaactcctgacctcaagtgatccatccgccttggcctcccaaagtgctgggattacaggcgtgagccaccgcgcctggctcaagtgcagttttttttttttttagatgaagtctcctctatcacctagactggagtgcagtggcatgatcttggctcattgcaacttctgcctcccaggttcaagcgattctcctgcctcagcctcccgagtagctggttttacaggcgcctgccaccrtgcccagctaatttttgtagtttttagttgaaacagggtttcaccatcttggccagactggtcttgaactcctgacctcgtgatccacctgcctcagcctcccaaatcaagtgcagttttaaaggctggctagggtgccagacctacctgtcagtggctgcagctggaccagggcacagccagagcctgtggctaccacacgaaagtgactgagagtcttcttgacaccttccaggatgtcctttcgggatggggccttcactggaactgtctgtggtgccagccaagagtgaacaagccttacacaggtctgggagctatacccagaccctccctgctcccaatagactccgggcagggccacagtataggcagtggtcacttgcctgttttaggggacaggagagccagccatccyaaatccatacccctgactcctctctgtaggggtamtatatctagaagcacccctcctcttcccagacccggactcacgagattgaccccatcaatgtgttccagtttcagggcagcctggatcttcccctcagaagsagctgggatcccatcagtgacagcactgagamaggggcaggaggaggtcacagggtggcttgctgggacctccccaccactctaggaacctcccagcacctctcaccagtaggtggctgtgggcctttgggctctccgtgcatgggtgaagtacttctggaggcgactagctgtctggggacagctggagaggagtacaagcccagagctttctctggaataagcagacaaatcacacaagttaaagtcccttgaactcgcccactaaaaagkaaactcttaggaacactgacctgcttcaggccaaacactaacaccaggactataacctagaccaactcctgagaaacaagtaaggtttccccttctttgataacaagactatgtagcttaatgtgtttctcattttgccccggcccccagggaactcagagccaaatgtcgtaacgattgtctaccatgtgccagaattctactagaaattctgtacatattagctcttaaataagttctctacaaaaaagctcatgagtttgtggaactgcagaaatatttcatctcaagtaccatctttaattgatggcagttagaggaaagagtatcatggatcgactagcaatgcctgccacgagtaccgtcatggagaaatgactgcacactgagcataggtattattttctctattttaccattaggggaactgaagctcagggagggtatttgttttgttttgtttttttgagacrgggtctcaytcaggttgtttaggcttgcgtacagtggcgggatctcagcttattgcagctgccatcttctgagctcaggtgattctcccatctcagccacccgagcactacaggcatgtgctgctctgcccagctaggtttttgtgtgtgtgtgtgtgtgtgttttattttgttttttaagtaaagatagggttttgccatgttgcccaggctggtcttgaacttctggactcaagcaatcctcccacctcggcctcccaaagtcctattgattataggcatgagccaccaygcggaaagttttgttgttgtttttccagagatggggtctattttgcccaggctggtctcgaactcctgggctcaagtgatcctcttgccttggcctccagaagtgttgggattacaggtgtgagtcactgtgcccagcgtcagggaggtgtcatgctttgcctggtatcacaccatttgtacttgaggatttgaacccagagccatcggcttcctcttcttcacagtacttgtatccacctctatgatctcaaaccttcccatggaaaatgtctcagcttatccccaagcagctgtttccccaccacagatggatgcctgtactcctagcttcctgtcacccctaccacttacttcccagatgctcggacaacctgaagctccygctccctgagccctagggactggctcagctctggcagcactgagaacaacgtcagctctcctggttttcctggaaagtaagaaagaaaaattacaagaggccaaagcttcatgccttcacttttccctccctcagwcacgaaacccccttccgctgcattcccttcccacatccccggcccatacctgtcactggtagaccctgtggcttgttcaacgtcactagaggtcctgaaacatacatcacacgaacatcagcaaaagcaacggtaaccctttatgcagcactaaagagtttccagagcactttctcaygcatcttagcacatgtccccatcatgactctcagacatgagttaactaccccacaccaaattcaacttctttctgttcctctgccacctcagagcctcggcacttgctgtttcctgtccccaaatttcccaggtctggctccctatcatcttggctcaaatgtcacatcacggagaggtctgaatctccaatctaatgtctgccttcctcctgcagttcctcaccatcataacaccctgttttagtttatgcatagcacttaccactagtaacttgttcatttattttctgacatccatttctcccgttagagagaaatccatttctcccctgagagcagaaaccatatctatctttttcagcactgtatagcctgcctagaacagtgcctggaacatagcatatgttcaagaaatagttgagaaaaggaataaatcactgaatagagagtggggttcagagaaattcagttattttcctaaagccgcacagcaagctgatcacagagcctaggtatgtctgactccaaagcctgtgttttgtccgtcgataaataatcattatttatttatttatttatttagactgagtcttgctctgtcatcccaggctggagcgcagtagcacgatgtcggctcactgcaacctctgctatccgggttcaagtgactctcctgcctcagcctcccgagtagctgggattacaggcggacgccgccacacctggctaatttttgtrtttttagtagagacggggtttcaccatgttggccaggctagtctcgaactcctgacctcaggtgatccgcccgcgtcagcaccstaaagtgccgggattacaggcgtgagccaccgcggccaataaacaataatctagtatagcaactcccgtaactgagcgccggctatgtgcaaggctcggtagttatttgcatcttctccccactcttaaccctactgcatcatggcagtagggttaaaagcggggagagggtgcaaattaggtggctygtcccagctcatgctgctagtgggaggcagaagcagggctgatcccgtggcttcaatggagagcccaactgcacgccgaggcagtcycctcccggtccttgtgcggccgtgcctctcacccytcacctttccggtccaccacggctgcccgcagcgcatcaaccagctcctcccgactgaggttttttggcagcagccccgcgaagggctggtccccgaggggccccgaccgttggcaggagccgcggggttgcctctgatgcctggacaaggagggagaagcaatgggagtcattccatcccgaggtgccacccattcctatctccggacgcctcttcccaaatcctgcggcctctgacaaatgcctcacaatgtctgggctgacctcgaaaattcaggtacgaccggtyccattctacagcggagggcaccgaggctcagagaggccaacggggctgttttcgggtaacatctacctgatccagatcccgcacgtgccttccccctgccctagcctccgtcccgcatgagagagggggtacttaatcaccgggcttcggtgccaaagcctgcgtcctcgggcactgggcgsacacccaggccccgccgccagccactccagaaccggcccaaaacacggcggccgtccatctccsgagccaggacagcgcgcatgtgcgtccagaggggcagacccgcgctccagccagcgcgctgattggtcagctggagtgtcaatsggaatggtgaccgggcgggactcagagcctgaggaggcggggcttttcctccgcccaggaaggaaatgcagaaatgccttcctatgcwtttagggagagcgctgyagcagaagaatttgatctgatcaaaaaacctgtcttagcaaaaaacctgaagccgcctttgcaaaaattatattacaaaattatgacagcgaaagagatctgatctaaccaacccgcagcttgcctttaacctctaaacggtccttggtcattcctgggcttgggccaagctaactttgggagaaattagttcgtagtctaaatgataattgcccttcccccgaactaaactggcttcatagagttaatgaaaggccaccaggttaggagtagtagagggacctgaattctgctaagggttagaggtaactgattaccagcggttattccggaggtcacagtgtttgcagcttccccagctcacgattgtccaacctgagattggcctttggagatgtctttccaggcttttgcatttctgacggccggatcaccccacccggaccctcaactcttggctctactagtcctgtggcccctcgargtcaggagatcgagaccatcctggctaacacggtgaaaccacgtctccaccaaaaatacaaaaaaattagccgggcgtggtggcgggcgcctgtagtcccagctactcgggaggctgaggcaggagaatggcgtgaacccgggaggcggagtttgcagtgagccgagatcgtgccactgcactccagcctgggcgacgagcgagactccgtctcaaaaaaaaaaaaaaagaaaaaagaaaaagaaagtagaagaacacagaaaaaaaagaataatataatgactgcccacattcctaccatcagaattagtcattgtgaaacaatatatatatgtataggtttcctgtttttcttgtttaagaaatgaaagggataaaagtaaattcccctttactgcgtgcttccagttttcactccctccccagtctccactttgagtttggtgtgaacattttcctaatgtgttttggtttttgttttttggagacagagtctcgctctgtcacccaggctagagtgcagtggcccgatctcgactcactgcaacttccacctcccgggttcaagcgattcccctgcctttgcctcctgagtagctggaattacaggtgcggtgcccgccaccacacccggctaattttttgtattttagtgacggggtttcaccatgtcgcccaggctggtctcgaactcctgagctcaggcaatccgcccgccttggcctcccaaagtgctaggattacagacgtgagccactgtgcccggccactaatgtgtttttttgcttgctctgtcatccaggctggagtgcagtggcacaatcacagctcactgcagcctcaacctcccaggctcaaacgatcctcccacttcagtctcctgaatagctgggactacaggtgtgcaccaccatacctagctttttttttttttttttttttttttaaagatatggggtctcacgatgttgcccaggctggtctcaaactcctgggctcaagataagaaaataaaaataacaaaataatttttaaaaaatcaaactcctgggtttaagggattcacccacctacttcggcctcccagagtgctgggattaaaggccgcacggggcctttgacagacacttctttttttttttccttcgagatggagtctcactctgtcacccgggctggagttcagtggcacgatcttggctcactgcaacstctgcctcctgggttcaagcaattctcctgccccagcctcccaagtagctgatactacaggcrtgcaccatcatacctgcctaattttttgtattttttagtagagatggggtttcaccatgttgaccaggctggtctcaaactcccgacctcaggtgatccacctgcctcagcctcccaaagtgttgggattacaggtgtgagccaccgtgcccggcctttgacggacactttctaataggctttttcatccagcattacacacccctatgaggaaggcagggtgggttggggccctgccttacagatgaggacacagtggctgttgtggttctttgtgtcccttaaaggcatgccaaaagctatgggtgggctcagaatgccccggaaggaagtcagataactgaaaagaacacttgcactggtcacaggaaaaccagcctgagctgccrgcagcctcygggaggtgttggkatggcctgcccctggtttccatgcgggtcctgacccagagagcaggccccaggggagtgggggtcagcagaggcaggatggggcccggtctgcttgtgagggagtgctgggagggtggagtctcactcttgaggcacagagctcagccagcggaagaggggatgcagggatcaagccccaggccctggggcctgaggtgtgagagctgtctttgatggttgaagccagccttcccaggccaggccaggccaggctgctctctctccccgaggatgcatttcttgctctgttatcagccctgagctctgagagaagggactttctttttttttttttgagacagagtcttgctctgttgcccaggctggagtacaatggcgtgatctcggctcgctacaacctctgccttctgggttgaagcgattctctagctgcagcctcccaagtaacagagattacaggcgcctgccaccacaccctgctaagttttgtattttcagtagagaaaggggttcaccatgttgaccaagctggtcttgaactcctggcctcaagttatccacccgactcggcctcctaaagtgctgggattactgtcatgagccactgaacctggccaggagggactttcttaagaaggtcacaagaggactcagcacctgccaactcccaagtagagcctgggcaggggtgggaggtgtccccggggaccccagtgcacgagagccctgtgcctgcacggccctccaccaggaggccaggcctcagaggcagkccagcattggagccacttaccacatgaacaaatgtctgtgtccccccaaactcatgtgttgacacctcatccccaaggtgatggcatctggaggtggcatctttgggaggtgatggggtcatgagggtggggcccttgtggttrggattagcgcccttatacaagaggccccagagagctccctcgccccttccgccatgtgaccacagtgggaagatggcaggcatgacccagaaagtgggccctcaccagacaccctgtatgccagctgatcttggactgccagcctccagaactgtgaacattatattgctgttgttagagagacccaatttacagtattttgtcacagcagccccaacagactaagacgtatgactgcaagctctgaaaatgcagccaacaccacatgttggaatcatgatatttgggatgtgttggggtaaaccacatgcattagtaaaataaactgttcaacacctgtgaaaaggagagaaaaaatataaataaatgaaataaactattactttctgaaggggtgggttgtccctccacacctgtgggtgtttcttgttaggtggaaygagagacttggaaaagaaaaagacacagagacaaagtatagagaaagaaataagggggcccaggggaccagcgttcagcatatggaggatcccgccagcctctgagttcccttagtatttattgatcattcttgggtgtttctcggagagggggatgtggcagggtcataggataatagtggagagaaggtcagcagataaacacgtgaacaaaggtctctgcatcatggacaaggtaaagaattaagtgctgtgctttagatatgcatacacataaaacatctcaatgccttacagagcagtattgttgcccgcatgtcccacctccagccctaaggcggttttcccctatctcagtagatggaacatacaatcgggttttataccgagacattccattgcccaggggacattccattgcccrgggacgggcaggagacagatgccttcctcttgtctcaactgcaaagaggcatgccttcctcttttactaatcctcctcagcacagaccctttacrggtgtcgggctgggggacggtcaggtctttcccttcccacgaggccatatttcagactatcacatggggagaaaccttggacaatacctggctttcccaggcagaggaccctgcggccttccgcagtgtttgtgtccctgggtacttgagattagggagtggtgatgattcttaacaagcatgctgccttcaagcatctgttgaacaaagcacatcttgcaccgcccttaatccatttaaccctgagtggacacagcacatgtttcagagagcacggggttgggggtaaggttatagattaacagcatctcaaggcagaataatttttcttagtacagagcaaaatggagtctcctatgtctamttatttctacacgacacagtaacaatctgatctctcttttccccacatttcccccttttcttttcgacaaaactgccatcatcatcatggcccgttcttgatggtcgctgtctcttcagagctgttgggtacacctgcagacttgaacaacagacaaaacaggcacacaaggattaatatgaaatttataatcgtagtacttccaatcgtcttaacccaagtgacagggttaagatttgtgaggccatcagcaactcctgcgattgcctcagttcctggcaccaaatttaaatgggcttttgatgttttgaaaatttgttcttttaatttggaaatgtctaaagtgagattatcttctcttgcctgtagatggcgtctaaccatgtcccagtgatgctcagactcattacaacttggggtgtaatacaaaaatctgacatattccagtcacattgtaactggaaacgatgttctaagctcatgagcctgtctcccatccaaatgacagtttgtctaaaatcattaatttgatttgccaatttttgatcaataccagattgtgaattccacaatcttgtagcatttttttgccaatcattaacaaagtttactgactgaacagaagagtgcagcgcaactcctgccacagcagccgtagctgtgactgcaattaatcccataagcactgtaattaaagtaaaaatgaatcttttggatctatttaaaatggcttttaatattcagtcaaaatatggacggatggcgaggcctcccacggtcggtccatggacacagggatccacacgccctctcttgctctcaccagcagaatacggtgctgccgattaaaagtcgaatcaatgcaagtaaactatctacttttyacaggttatagtttgagagtctggtttaataactatatttcctacaactagcatataagggggctttacacaactttgtaaaggaaccgttagactggaatttaggtcgatagtataaaacggctgatgatctcttgtttctaaagtttgatttccagaccaaatcctaatgtggtatgaggctacagtaagcctccataattctggatgttcaggaccagaaacaggacttattatttttggtcttggggtagagattcctttttctccccattcccagggatagaaagactgtaattttttatgcttatgtttgtctaaactttctgttaagtcrctttcaacagctggactcacttgtgccctgggacatgactgagtttgccctgagcaattgtggtagaattgacctcaaggtgcccaatctataatagttccaaattcattgttttgtaatattaccgcactattggccacacattcttcccaaactaaagcttctgtattttttgatcctttgggaattttcttggggcaaggtttccctttaggtctaaattttaatgatctttgataagaaaagtcttgtaaattatttacccgtggcctgagtgacatcctgcttaccgtgtgataagtgaatctactgatgggactgacagtaggtacttctaacaaccaattttggactgcaggcattaagcatcctggtgctctccctaggcaaataggaggataacgatacccartggaaatatttatcataatcccttcttcctcaggtttggcagggcagcgatcatctgtggggccaggtaccccatacactatcattaacatatacttcaataggattatccatccatgtgactggtgtttccatgtccgtggaggcgcttttctttgcatctctgatggattcattgtagaacttcaaatgtctagtgggtatccaaacaggaagctgattttctcctggtgaaacacaagcaaaacctctcccccacgtcaccaccttccctatttcccatgtcttatttttattatctttccaccaaatcagttttccttcatgtgggctgttctttttaccagtaagatgttgttctgcagaagtagtagtctgatttctataaatgtttaaaaaatttaaagtatagagtgctagattaagttgcatctgaggagtggtacactccttattgtctcccccttctttttgtttaactaattgagttttgagtgttctattagtactttcaactatggcctgtccttgggaattatagggaattcctgttgtatgtgaaatttttcactgatttaagaatctttggaaagctttactacaatatcctggtccattgtcagttttaattttttctcgaactcccattacagcaaaatacgataataaatgttttttaacatgggaagtactttcttgattatctggccctaaacaatgtaaaatcctagtactttgatacacttctgaggctgtgcctacgccgacaagtcctgtaacagccttttgtttaggccaattttttggccactgatttaaagcaatgagagacatctgctccagtgtctactaacccttcaaactgttttccttgaataatggacttacacacaggtctgttctctgagacctgacttgcccaatatgcagcctttcctgttggatcagtgcttccaaaccctcctgttctttttatctcactatttccaaccttaatataaggcaggagtaataattgagcaatcctgtctcctggactggcactccaaggaattgaagagctaataaccaattgaatttcacctttatagtctgaatcaaccacaccagtgtgaatttgaactccctttcgatttagacttgatcttcctaagattagtcctacagtcccctcaggcagtgggccatatacccctgtggggattttttgtgggggctcccctggaagcagagaaactgcttgtatagtacataaatctactgctgcactgccgcttgtggcgggggacaattgttgtattgtggtaactggctcattccctgaggcacttgggacagtgggggttgtcttccctgaaaaccctgaggaacaaagggctgaactgggaatgccccagtttgttgtggggccggactgaggctggcccctttgctcgtttcccgacaatggttgcccatttctatcaaatttagaacgacattgactagcccagtgttttcctttttgacatcttggacataagtcaggtggctctttacctgttgttgtagtcacttgaatagttatattctgtttatttgaggctgggcaattcttttttaaatgaccactttgaccacaattataacatttccctccaaatgttctaacttgtcctcctaaagcagctcccattagtgcttgagccataagcatagctttatgcatagctcctccgattccatcacaggcttttacatactctgagattacatctgatcctgcgggaaactttccttttaatggcttaatggctgattgacactcaggattggcattttcgtatgccatcaactccactatgaccttacgggcattttcatcggcaattgacttttgagcaacatcttggagccttgccacaaaatcagggtagggctctttagagccttgtcttgtattaaatgaggggcaggcggttcctgggtcttggattttttcccaggytctaaggcagatagctctaacttgctcaatggcctcattttgcattaatgcttgttgactaatagtgctccaattttgaccagttcccagtagttgatctgcatctatgttaactggaggattagcagccctattttttcggacctgttcttgtgccccattaatccaccaaatcttaaattgtaaaaattgagagggtgagagagacgattttgccagaatctcccaatcataaggaatgagtctatgtccgtgtgcaatggaatctaataatgtcctcatataaggggagttgggtccatactgttttattccctctttcatgtcttttagcatttttatagaaaaagacttgtatctggcctcaactgtgggaggctctccctcttgggctccttctccaggtggtatcagttctaacattagtgggaatggccacgcctcaatatctccttgctttcttgacttatcaataattttatgtaatgcactaccctgtctattaggtggtgctgtaggattaagtctcatagtgggcggctgagggtatggcgccctgccctgtggtgctgggagcattcctggatgtccatactgactttctgggggtggccgatactgaaattcagccggcagccagtattgataagctactggtggttgggtcttattttctctaacctgtgtttgaggttgtaatgttacgggcatctgacctgctggaagaggacttgtccctcgtggtttagactctgatggccccactaattctggacctttttcttctaattttaacgtttcagggtatatcacctgctgtaattgattatagtcaacattttgcattgastgagccattaccagctctactgcatattcacaatgtaaactttccatttctttccgggatttcctccccgcctcttctttacaatctattacacagccttcaggggcatcagaaactgaaacgctatcttcttctgtttgaaatggttctaaagctgctttaataatggcccaatcattccatactgtaagtgggatgattttaccctccctacttgcttgttttaattctttgccaatttttttccaatcttttagatctaaagttccctattctggaaaccatgggcaaaattgttctattgttcaaaatagcttgatcagattttttgtaggtactctaactcccccgctttttaaaagaattttaataaagctgagataagaggcatatttacttttagttttacttttagtttgcctcattgttaccccggcttcttccaagcgcacaagcttaccgcaaggctgactgtagacgtactcgggatctcttgtggacttgtcctcaaygaccacamtcgagcgtaccttcaccctagagaaaagcacccacgttgggcaccagatgaaggggtgggttgcccctccacacctgtgggtgtttcttgttaggtggaatgagagacttggaaaagaaagagacacagagacaaagtatagagaaagaaataaggaggcccaggggaccggcgttcagcatacggagaatccaccccagcctctgagttcccttagtatttattgatcattattgggtgtttctcggagagggggatgtggcaggatcatcagataacagtggagagaaggtcagcagataaacacgtgaacaaaggtctctgcatcatagacaaggtaaagaattaagtgctgtgctttagatatgtatacacataaacatctcaatgccttaaagagcagtattgctgcccgcatgtcccacctccagccctaaggcggttttcccctatctcagtagatggaatcgggttttacaccgagacattccattgcccagggacaagcaggagacagatgccttcctcttgtctcaactgcaaagaggcatgccttcctcttttactaatcctcctcagcacagaccctttacgggtgtcgggctgggggacrgtcaggtctttcccttcccacgaggccatatttcagactatcacatggagagaaaccttggacaatacctggctttcctagacagaggtccctgtggccttccgcagtgtttgtgtcccygggtacttgagattagggagtggtgatgactcttaacgagcatgctgccttcaagcatctgttgaacaaagcacaccctgcacagcccttaatccatttaaccctgagttgacacagcacgtgtctcagggagcacagggttggggataaggttacagattaaaatggagtctcttatgtctactttctatacagacacattaacaatctgatctctctttcttttccccacaaccaagggcccagctcctaacawgcaggtgtcaccagagagaaatgcaccactgtgcccagcaccatagctctggctcagagagtttgcctgagaaagcagcagacagaaaacaraaggtgcgwgttgctcccgaaggaactgacttcatgtgcaacagagctcggagaagtccaaggctaagcacactctccagaacagtggaggttgtgctgaaaggcaactgggaggcgacggagagcctgggaggtgcgggctacactggaggccagcaagtctgccagagagaaacagaaaaaaagacaggtgggaagagctctcctggggtcagaacaaagcttaatatcttctttgacaaagaacgtaacatcaaaatagccaactatgggtttagttcaacatttgcaaagagagacaacactgaaaagggaacgtttgatgggactctcccttatgcaggcccagaactcttcttgggccatgggtaccaatgccctgccatcaacgtttggagccttggcatcatcgtatgcaaaatggtggctggggccctgccattttatgagcagaactgtaaggatatactgaaaaaaaaaaaattaaaatagtatgctacttttttattcattttatggaaaaaaatatttaaaaattcttcacactcaaccccagggagcagctcccactggaccagctgttgaggaactcctgggtcaatagtgaccagaagacatgattcaagccatacagagagccactcctggactacccaggccccccaacaacccagctcatagtggccatgggattctaggaagaacatatcgaggaagtgatattaaaaaaatatatgatcatcccatggccacctacctaatcatggagttcagaaaagtgcagaggagaaagggctccaacatcggagcacaatccctccctcccggggatcccatctgtccttccccatctgccacagttaagtcaaccttccctgtccaacccagaagaggactcaaaaccagccgacctttcccactttctaattcacagaagcatgaacaccatcctgggagttagggcagaaccctacttggcctggagatgaagccagccattcccagcaaagccccccagcataagtctgtggcttcaccctccccagagcaccagcagccatggggaaaacctgaaggatccttgtctctgggaacccactgggaagtcggctcgctccatgtggaagacccagaagaggtggcttggtctgagggaacccccgggaagctggatggtataacctcaatctctgtgactaaaaggagccatggctaccatgggcaaaagatgtttcagtttcatgctgcaattatgttgtttctgactagcacaaaaaagtcaaagggagaaataaggcagcaccagtgaacccaatggacagctgggcccagacaaaaaccaagtgggtggggcagtcaagctacacttcctgtgttttattacatttattatgttcttcttaatattattttaattggcaaatcatgcttgtattcatttataagatacagtgcggggattagatagatgtgtgcaccatggaatgacaaaatcacactacatagtatctgcatcacctcagaaagacacattccacgtgatgtccctgaagtgtccatctaaaaaagttgacctcatagaaatagcgagtgggtcgatggtgaacgatggctgggastggtgtgtggaggggtggcagagggaagaaatgggggcttgtcggtcaaaaaaccacagtctcagttggaaaggaggaagaggttttgacatctagtgcacagcagggtgaccagagtcaatgagaatgtgttgcatatggcaaaacacctgagagggtccatgtcgaatcctggcattcagaatggagaaaataaaggccctgaggttcaagaacattaaaaaccttgtgacaggttgaccacgtgtagacttcaacggctgtgggtgagaactgggcaagatgccgatgctgccatttgcccagcacmtctggcccagaggcattcagcagaggacgcagatgtccaagctgctaccagggtcagtggaacaggattcaaaagtcaagagggcatctggcaaccctgtggcctccaaaggcctatcaaaagctataggtgagctgaagggcagcctagagactcctggagaccagagggcccctccaccccacctggcccggagcaccatctcttcctcctgtctgtcccctgcttcctctgtcctgccatctcccccttcctccaccctcagctccctgcagtcctctctccacctttccaaggtagaygcagcttgctgctctgctgtcctgagtccscactaagactgtggtttctggtccctgctgacctctgggacttgatttccctggccttttgccccacctcctttctgtttgtcccagccccacccccaactccctctcccccagctcctcctctgctattcctaatcccctcatcctgattgcttttttgctacattttctctagctaaatcatcttttatttacttgctaataatctatccatgggtcccctggaagtctgtcttgtgctacatacaatgatgaaaatctagggcccggtgtggtggctcaygcctgtaatcccagcactttgggaggccragrcgggcggatcacgaggtcaggagatygagaccatcctggctaacacrgtgaaaccccgtctctactaaaaatacaaaaaattagccgggcgtggtggcgggcgcctgtagtcccagctactcaggaggctgaggcaggagaatggcatgaacccrggaggtggagcttgcagtgagtggagatcctgccactgtactccagcctgggcgacagagcgaaactccgtctaaaaaaraaaaaaagaaaagaaaagaaaagaaaatctaggccgggtgctgtggctcacgcctgtaatcccagcactttgggaggccgaggcaggcagatcacaaggtcagggatttgagatcagtccgaccaacatgatgaaacctcgtctctactaaaaatacaaaaattagccgggtttgatggcgcatgcctgtaatcccagctattcaggaggctgaggcaggagaatcgtgtagacctgggaggcggatgttgcagtgagctgagattgtgccactgcactccagcctgggcaaaagagctagactccatctcaaaaaaaaaaaaaggaaagaaaatctggaaactgtaatttaactcctggccctagacaggactcargttttgtgaaagggaggaagaaaaaaaaagcaaaccccaccaaaccaacacctagtctaaagcctgatataaatgccattcaaaacatgtttcctcctttattctttttttttttttttttttgagacagagtctcgctctgtcacccaggctggggtgtagtggcgcaacctcagctcactgcaacctctgcctcctgggttcaagccattctcctccctcagcctcccagtcgctgggattacaggcacctaccatcatgcctggctacttttgtttttttgaatttttcgtagagatggggtttcaccatgttggccaggctgatctcaaacttccatcctcaagagatctgcctgcatcagcctcccaaagtgctgggattacaggcgtgagccactgcgcctggcctccttcctttattcttcaataaccaraaaattcttcctgaaaaaggtggcccctgagaccatttggaagcatcacaggggggaggggcaagggtcctgcgagctggtcttgccatcccttgtcccccagtttacatgaagccgagtttacatgaagccaagctccaragaagaggcagggcctgtggrgcatttggattacactccaagtctaattcccagtccagcaatcctgcccccagaggcttccttcatctttccacttagccaaggaaggagcaggtcagctcatgccccctgcctggatgcagacaacaaccatcagaaggccatccgtgtagccggggccccagaacaatgtctggaaatggctcaaggagctgaagccctttagcctcaagaagagcatgagggacccagcacccttctgaaacctaaactacattctggcctgagccattttgcactgtctgtgccctagaaagctgtgaaggcctgtaagtgggtcttcctgtttccctgtcttctgaggcccaggcctttcttagagcttccgtgggtcccacccttacacrcatcacaccgtgtctgggctctgcctgcctggcttacactccctacccccaaccactgccctatttccacccccgggacatcctgctgggcactgctgttccctctcttagaagattttcacaggtcctgcccttcccttttgccaattgatatcatttggctgtgtccccacccaaatctcaacttggattgtatctcccagaattcccatgtgttgtgggagggactcaggaggaggtaattgaatcatgggggccatgatttcccaagctattctcatgatagtgaataagtctcatgagatgtgatgggtttatcaggggtttccgcttttgcttctttctcattttctcctgctgccaccacgtaagaagtactttttgcctcctgccatgattctgaggcctccccagacatgtggaattgtaagtccaattaaacctcttttccttcccagtctcaggtatatttttatcagctgaatgaaacagactaatacaccaatcaagtgaatgtcacctcctcagagaaaccctccctgagcaccccatctgcagtagggtcaccccatcttccaccttcacttttcctggtgtttccttcttagcccctatttccatggggagtctttgctctgacagactagtctccctcacccacccggggccagcctgtctgtcttctctgtccctgtacatgggagatgatcaatgttcatttgttggcatcagtaaaacaggaaggcccctgaggtgcaaggattggaagcccttccccccaggtgaggaaagagccttgaggcagggtagaggacccgagttagtgccctctccctaccccgagggtcagccctgggcaggacgggccacggccccttggggcacctgttgcctgtgcccttgatgggtggcctgcaggggacgtggccgcacttggtcagtggtggttctrggkcagccacattcaggtgggcagcattttaggaaggacaaactccaaaacccaggctccaaaggatccacgggaaggtcgagaggctcaggggagtgtcctggtggctgggccagcgctttgaggcccctggggaaccagcagagagggcctgcgtgaggcatctggaggctctgagcacctctggaatcccagcgacctgcagaggttgcccgtctctgtgggggcagcagcgcctgaagggaggtggccatagcagcccacaggggcccaggrctgacsagctctgccttgggtgccaaggctgggcagggcctgtgcccttgggagtcctgtttcagacccacytcaaccacatggccctgccctcatcttatttgcctggacagcaaggcctgcagaaactgatttgctcatccaatttggggawcctgagctccctgctgggcaagcctgatggtttcacagctgcccatgatggtttcctcggcaacttcaaatcagactctgctccttagttgccagcacctttactaaagaaggtgggggcggtgggcagaaagcatgggggtgtcgtgtcatggtgacaggtgtaaggagmargcaaagagttttccacttccattgatggtagcagtggcggccacctgacccagggcaccatctcttcctcctgtttgtcccctgcttcctctgccctgccacctcccccttcctccccaatgaggtcactgcagttctctctccacctttccaagatagatgcaggttgctgctctcctgaggtccccactaaggctgtggcttctgatccccgctgatctcttggattttatttccctggccccctcccccacctcctttctatttgtcccacccccatccccaccttcctctgccattcctaatcctcccatcctgattcctcttctaggttttctctggctaaattatctttttttttttttttagtagagacggggtttcaccgtgttagccaagatggtctcgatctcctgacctcatgatccgcccgcctcggcctcccaaagtgctgrgattacaagcgtgagccattgtgcccggcctttctttttttcttttttttttttttttttgagatggagtctcattcagtcccccaggttggagtgcagtcgtgcattatcagctcactgcaacctccagctcccaggctcaagccattctcttgcctcagcctcctaagtagctgggactacaggcaagcaccaccacacctggctaatttttgtatttttggtagagaaagggtttcactatgttggccatggtgaaccgggtgatctgcccgcctctgcctcccaaagtgctgggattacaggcatgagccaccatgccctgccaattttctttattatatacttgctaatatctgtctccttacccaccccccaccccccaccagaccttgttttgtgcaacacagaatgatgaaaatctagaaacaggaatctcactcttggccctagccaggactcaggttttgtgaagcgggctggggcaggtggaaaagcaagccccaccaaaccaacacctagcctagagcctgagcgaagtgccactcaaaacacagctcctccctttactttcctgtaacccgagaattcttcctgaaaaaggtggcccctgagaacagtctaaaagtgtcacagggtggaggggcaagggtcctgagagctggtcttgccatctcttgtccccagttttcttgaagaagttgagctccagagaagaggcagggccagtggggcatttggattacgctccaagtctgattcctagtccagcaatcctgcccccagaggctccctttatctgtccccttggccaaggaaggggcagtcrccccctgccccctgcctggccacagacaaaaaccatcagaaggctgtctgtggggccccagaaccatgtggtaatcgcctaaggagttggagccctttagcctcaagaagagggtgggggacacagcacccttctgaaacctaaaccacattctggcctgagccgttttacactgtctgtgcaaaggttgtgagggcctctaagtgggtcctcttgtttccctgtcttctgaggcccagggctttctcagggcctccgtgggtcccccccctgcacccatcacatrgagcctgggtcctgtctgccaggctcacactccccacacccatcttgctgtcctatttccatccctacgacagccccctgggcactgccagtccctctcttagaagactttcacaggccctg

SEQ ID NO: 9886 - DNA, 17559 bp, Homo sapiens
atccatggtttcaagcatttactgggggccttggaacatatccccagaggataaggggggactgccatactactactatacacgtgatggagttgctataaataacagtgttatttataccctgggggatacatgacttgctgtcctggagaattgaaggacatcttgtttctaggcatgactggaacagagccccagtgttccagccagtccctgcctatttcaagatgttgccttcccagaatgttctacagttatcttgagaactgcaagtgagaaaagagggagaaccgggtcagtctaaggccacccagagttattatattgctataaataacaacattatatattagtcaatatatagtcatatattgaacatatagtcagcctaataatagggttctgtgactagttgttatagcataattatgaacagaacccccatgtatcaatttatatgaagatttatcaaaaatcttttgaaaactccatccagagagtctttactatagaggaattgtcacattgtccttgtgacaattaaatgtaaattatataattgcttatatttctttcattctatatctgccacaaagaacacaactttatagtttaattttaataactattgcaggacacttctctgggtggtcttggactgacccggktctccctcttttctcacttgcagttctcaagataactgtagaacattctgggaaggcaacatcttgaaataggcagggactggctggaacagctggggctctgttccagtcatgcctagaaacaagatgtccttcagttctccaggacagcaagtcatgtatcccccagggtacaaaacccagggtgagttgctttctggggtccctcagctgtggggcaagtgaggcatacacagacaagactccttccttctctggcagctttcctgagcctcaggggacccgctcataatgattcctaggcttccattgtcccttgctgcctgtctgtaagtaataaacctgattcatgtaacttgtgtgtgtgtggatgttctgtcccactggactcagagaagttggtaatcagtgcacagtgaacctgtttcgtatctatgttactaaaattcattcaacactgcatgaatatttacagtccactgatgctctgttgttgactgtgtcaacattgtctgtgttttccctgatcatattatagattcacatgtattcatgttactattctgattattataaacctcctaaatccaatggtaaatggaagcaataactaaacaaagaaacaaatgatgacttagcagagaccaggtcttttctggttcttttgtagagaagaaaagggatctatgaagtcagagttggggaagtgaggatgtacaagtgaggggataccttgcagagtctagaatcagcagggagctgcctcccttctcctctaggccatggggctgaaccctccacatcccccctctcctccatcaactacattatayagtccactgaaacacgcaggtctctggataagctgctgaaaggggacatagacattggaagtcagaatggaactgatctatttggatttggaaatactcatgagtacccagacttacagatgatattgtctggagcattatggtgcaacatccataaggtctctgggaaagcctgccttatattcccacacagagggtacaacagcagtaaactccacaacagagggatatgcctatccctgcggtccaggttaatgttataagcaacttttgccattagaattgtcctgacctgaatcaggatgctaagcattagtctagagacaatgtgtggccagacatagctttgatttgttggtgcatgtcttgtggggctatctgaggcatttcctgaattcttaattataaagcagtttccccactgccaatcacaaccagatatgatgataggttggctaagtatatatatttaacaggctacagagagagctatgaatactcatgaaagtagtgataagccctgtccagttcttgagactggatcagcttaaatagctgtgtctcatccaggaggcggcattacagatgggctaggcctctgcctctgatggagacaaacaaatttttaataagaggcatttctatggaaacagaagaaaaacaaagattaatgttgggcacaatttattcagatgttagactccaggatcttaattatagaggaggaaggaagaggcaatctgacacttttttctcacctatgttacaaggaataagctgcagcttgcagggcttcaggaaaaaggtactagcaatttcattgaatccaagtcagaaaagtaaaagaaaaaattggaaaacattagtttggggactcatagcccggaaataatttaggattcactccaaattgtagaaaataataaaaactcaacaacagtgaacaaaactagaatctaacaataagtgtactacatttttttccaaaacatactttttctctctccagtccctgtttttactaaagacaaatcacagtaggacaaatgtatttgcaaaataaattttagtcttactattcttggcctaagtgtttgcataaagtcagcaggaataattatttgtcatataggctcttttgaaaattggctttgctggaactttattccataaggaatcttggattagactttcaaagccttgagcccagccatggattcatctgtgcctgcaatacttgtatgatttgggtgaattcctcacttcaggtcccaagataacttggagctcctaggcctgtcagagaatgacattctttacttaccacaggtcaaaaaccctatacagggactgcatagacaatgcatgaggccagtttttccaaggggcttttatgggctttataagtcaactttgattccttaaagcagtatgaaagtgtgccattccaaccaaagccttggtaaagtaaccagtatctccagttgtgtcttgttagataagaaaacagattcttattgaacttatgcaaataacttaagtatactaacaaatggttttaaaattctggagaaagcaagtagagggaaagaaatgtgtttcaagttttgctcacaggagtgtactttatgcaattgttaaaagctgcaaatagctcaaaagaaaaagtttttctggattctgaaaaacaagagttagcaatgttttaaacaaaatgccataaaaagattttggtcttctgttggttcagtctatgtaattaagtcctgttccactcaatattcatgaacacattagctctctatgggagtcttggaagttttgcctctattctgatgccacaatctctgaagttatcagaaacctgcattcaagagcagctctcagagtcctatagctgattacaaaatcgtttgaaaataatcaaagtaaaacaattgtggatgacaaaagtcttagaataaccatgattaaagtctgaacatctctgtggcatgcagcaatttaatataacaattataattattacttatatactgagacataacagaattgcaagaatcatatacaattttggaacacacaccaataacacatttatacaaatacaacccaaagagatctgaaaaccattttgtacttgacaatacttcctgtatgattttaatatacagaacaagctgaatatgtccctattggactttaggggacccaatatctaaaagtgttaaccagatcaaaaaagggggcttaatttaaaatctgactgtggaaagtttgtcaaatatcaaaggtttaaacacttagtattataaaataaaattctaggtcaccattaataaaagggaaaaatctgtactcattaatagaggggaaacagctttccaaacaggacccaataaagatgcatgaggccagttgaatctgtctcctctcctctcgcttttttctgtcatttattccaaaggtaaacaaaaatatttcactatcttttaatattacatgcaaatcttgttcaaaagagaaagctaaatttcacctttgtttgcattagtgtactattaatgttaaacccaattcttaataaaaccttataaacaaaatctatccaatcttaattagtttgactataaggtaaaatttccagaaaccttttataatcctttacagctttctattaaacagcagatcaattctctaagaaaaccctgttactcagacacaggggcccagattccggccctgcatcagtgtgctttcatttcaatgttcaacccacaaaaaaactaaatcatccctttcaaatcttaggcaacttgcttatacccactgaacttcgtttataagatccacccttcacaaattcttcacaacttgcttaaactttcagttttgtcccattactcctctatgttaggacaatcttaacctctgaacaagacaaaattacattccctttaacaaaaaccatgttttcatgccttcttataatcttttaccaaaaacacattctactttccttacacaccttgcatgtaaaactatttttccagtagtcgcaagtacatattacaatgttaactcttagcaacttttattgttggtgaaaacctggcgagtaagcaattttaaccatgtataagattgcagaacacatgacttcccagcctagccagggggcctggctaacttcatatgtccccaggccttacctaggatctaattgctgtaaaacaggcaagtcaagcaattactaaaagtcgtagaagcagtttatgaccttaaaacatctagcaaacagtatccgatccccccaatttagaccaaatatctaaattttgaagatatttttattttactttaccaataatctttaagctgtctttatttttcaaagattgttagagacattgtgacttaaaaggcattaaagtctatttttctgacaaaatattttatttaagtgcttatcattcttaagccaataaattagaccactatcatatattctggtagcgaaacatcacacacatcatatataaatacacagatatggagatgatttggtagggtgacaaaagattagatgcaagaggaaggaggaacagacaggagcaggtgcagaattagacagatatccatcaactgaggaggttttagaggcagagcaggggctttaaaacaatatccatgcacatatagtgcaaatatcagccttaattaagttgatttcgaactacagagctctccaaaggagaatcattttaaaatattttattactagattttagtcaagagaaatggccaatatttctggcttttgaattcttttacctcctacatgaaatcaataagccttaactaayggtatgactttaccacaggtgcatgaagtatcttcaatgagacagcaagcggtttttacaagatctagaattgctccaaaggtagctcagagaaaagaaaatttcaagacaggaaatcagaagctgtccatgraagggaaaagaaccaataaatggcaaaawgtcacacacatagcgaatgggaaaggactaattacctaagctgggaattgaacccaggctgccagtgtraaaggccagaatcttagctcctgaactattgcacaaggtgaygactactgcttcttcccaggagtctagagcagtcatttttgagcttgcaaatgattttaactattcaagaaaatttagactagatataacacaatcatgtgtcctttttagtctcaagagtcaaagccctgtaacttaayggcgcaaggactttaaagacaatacagaaacttacatggatacaataacctttttaagtccataatttgaattagcttttaaataacttttgaattagacaaaatttttttttgtcaataagaacatattttccttgtcacattttctataaaactaggaagcaagaaattctttttttgaaaaagtgaaagcaattttattaagaaagtaaaggaatagccggctgtgtggcagcccgcgaggcggtccgcgggagcacactctgtgcagagactgggcggccagcctgcccttgctgtcgctgacggtgactgcgggaggccaggttgtttttcatcattcagaacattgcctgaagyagktccaccgtgccgttagtaacgaggaacatcgagccaaggcacctgtgccgtcagacgttgcctagcgttagaagcgagctggaatgcgtgaccaacatcaccctggcaaatgtcatccgacagctgggcagcctgagtaaatatgcagaggacatttttggagagctctttactcaggcaaatacctttgcctctccggtaagctcccttgctgagagggtcgatggactacaagttaaagtcactcagctggatcccaaggaagaagaagtgtcactgcaagkaatcaacacccgaaaagccttcagaagctccaccattcaagaccagaagctttttgacagaaactctctcccagtgcctgtcttagaaacatacaatacctgtgatactcctccccctctcaacaatcttaccccttacagggacgatggaacagaggcactcaaattctacacagacccttcatacttctttgatctttggaagaagaagatgctgcaggacaccarggatatcatgaaagagaaragaaagcayaggaaagaaaagaaagataatccaaatcgagggaatgtaaacccacgtaaaatcaagacacgwaaggaagagtgggagaaaattaagatggggcaagaatttgtggagtccaaagaaaagctggggccttttgggtatccacccaccttggtgtacyagaatggcagcaytggctgtgttgaaaacgtggatgcaagtagctatccaccaccatcacagtcagactctgcttcttcaccttctccttccttctccgaggacaacttgcctcctccaccagcagaattcagttacccagtggacaaccaaagaggatctggtttggctggacccaaaagatccagtgtggtcagcccaagccatccaccaccagctcctcctctaggctctccaccaagctctaaacccgggtttgctccaccacctgcccctccaccacccccgcctccaatgataggcatcccacctccaccaccgcctataggatttgggtctccagggacgcctccaccaccctcaagcccatctttcccacctcaccctgattttgctgcccctccacctcttcctccaccaccggcagctgactacccaactctcccaccacctcccttgtcccagccaacaagaggagcacctcctcctccccctcctcctcctccggggccccctcctccccctttcactggtgcagatggccagcctgctgtaccaccaccgctttctgacaccaccaagcccaagtcctccttgcctgccrtaagcgatgcccatagcgacctgctttcagccatctgtcaaggttttcagctgcgcagggttgaggagcagcaggaacaagagaagtgggatgtcgtgggcaatgacgtggccaccatcttgtctcgtcgcattgctgttgagtacagtgactcagaagatgactcctctgaatttgatggggacgactggtctaattaactctttctgcctgatgcccaccttctttttctttccttcctacttgccttctttgatgccaaccccaacagacccataggggagaaaagggaggaaaaacctaattttaaggggccgaagctttccctgaagcaaccaaagctatatccaagtgcttcctccaagtcacatgtatttcctcttcccattgtcaggccctgtggggctcctgagattcagtagctgggatgttccctctttccttcaagtgcctgttgcatgtttaaaggaaggagaaatcccaaagcagattcctttgattgggtttccgttggagatggggccttcccttaggagccatattcaactacagtcttctaaaacctgtgccctcagccacttcgaataatgccagccaccttctggttctaaagcagagggagtggccygaatggacacagctggcccctttcccgtacactgaaagggcagagcaggcckaaggctccaacggccaaactgcctcaccctctgccctaatcagcagggtgggcctgccttttgctaagcgatctctatgcctgggattccctttattccaggagacattaagcctctaaagaatgtctcayctcctctgcccaaaaatgatgctcttctgtaggctggtgttgttgcttccctcccaggatccctttggtgagtgtggtgttcaggatgcaccagcaccacctctacatgcyttcaggcaacacggcccagttttaacctctagtatccatgaccaaactatccctgacacataaggacaggggcctcttctggctgtcaggagcaaagcctgaagacttggagctgcaggactggaagaacagtggagccccgtgggtcccaccctttaaggatgctgaggcctagagatgggaagtgacttgctcaaggtcacacaattggatagtgacatagctagagcccagagttcctgattccaagtcacctgtgctttctgggaccaaagaatgggcacctgctggagtcttggcagagctttcttggctgtattgctactccagacctcaycataggttggggtcccagtaggagggctcagggtctgtgccagccctgtcagtgctgctcagaccttcatagcctctcttgtcattctttgttgccccttttctgtcaccaaccaaccacatagccttgggaccagcccctctgggggaccagaagtagtgagagaaggaaggggataggcagctttgacaggtgctgttttcaattcctctgcaactcctcccccttttatttccccaatttaaacaaagattctgccaactgtggaaacttcagtccctcaggctggcagctgtgctggtacctgcctgggggggcctggcagtygtgaagcaggctgaaaggcagaggggctccaggtcctgtttccagctcccctcactgcacatggtgaagctccctccctccccacttttcccagagctaatacacaggtgctattattcagaaaaaaactggtcagctctaaccaacagtgaggtttcttctcttctgccctaactattgtgtagcctcttatgctgaaattggcttctgccggcttatctggctttcagagccctgaaacaaagagaaacaggatctgtccctacccagcacagcaaatggttgtagtaattgccaaagccctcgtaaagccctccggcttgaggagacagtgtatagtcatgagttctgcctctgtgcccttgctggccgcttcccctttgccttctttcctggaactcagggtgtggggactgagcctgtaggggccagcakgccctcctgctgtggccactcccaagtgtgccctcttccctctctccagatcaggtgtctctagcacaggacttggcaccaagctccatgctgagacaccaggctatgtgggcccccaccttgtttcccagcctgtaccttggaagccgaaggtgctttcatcagaatcctaaaatggccgttgaaggcgcctgggccgcagcccagcagtagctggagaggcaggcagagggcagtggttctcccaaataggagacctggggcctggccaggccagggtttgggcctaatggctttgactgaattamccccatcctcctcctttctggaaaagggagagctagagccactcactgtcattctgctctgaccttgaagggggcggtgttggcctggcttctggaatggactgagtccatcgtggaaagggctgggggcaggaggaggtggggaggggcactgcctgcggaaggtaggattagatcattagctcagtgacctcctagggtttcgatgtgctgtgttctcatcctacagttggtttggtaatgatctgcaagtcccggagagcaacagcaaagctctgcctgatgctctcattaaaatctatgcagccaagttcagcactttgtcacagccggccttgcgaagcctcctcagctcggggggccggggacccagtgagctgggaggccctctgggctccacttatgcatatgcaccaaaaaaaaaaaggcttctttagacccagagccctttaagatgataaaggacccaatgcaggtaatcctgtttttggactcatgtaatgtagaatgctaaatttagtgattatttaatctgggcctaagctagtgagagtgtggaacaatggcccataatgactcctaagcggtgaagccagggggcctcctcccttcctggttcaccccgcccaggggacctgctcccattcctatggccctggggcccagcttccaatagtgtcagaagtgacttgtggctttgccttggttgtgagatgggtacattctaaaggagcagcccgggggagggggcaggcttagccagcccttggaggctcagagcagctggcccaggctccagctcgcctccagtggaagcccgagcgcygtcagaaacaaccctggccaatgtcaccgcagagccgaggcggtgttgtcagggctaatgtgaaatctcttcccgtggygctgatcctccgactctgcagcaccagcttggacagactgaggtctctgtggctttgctgactctgcttaagcattcccaccgggtcccagctctgctctaggactgcctcccactgcggcccctcacctgacctcagggcatggggagggagggagccagttccccaaggccaggggactttgctcctgagagatgtcagrcttcctggrggcatcaggctttgagytctgctggggtccagctgacctggcaccaggtgtcgcacagagatgtgcctcattctgtgcctcctgccgtgttcactttaactgtgcctcagtgtgggttagggaataattttgtcattgtattaagtttatccagttaattaacttgaggaactaaccaatttttaccttctgtctrgaatgatgtacatgtagtagagtaagccataatgytcccaaagtgccttgttttctctgatacaaacrtatttataaggacgtattccagtgggttcttgggtgtgtttgccacaacaagattttagggaaggggtgtatgtgtagtagggatgccgtttgaaaacaggccctcttcccctgaggaagggaaaggaactcttcagttggagatctgggcagtgggttaagccagacccctaaagtgaccctttcctcttctgccctattcttctcagaccctcygaaagacatccaatttttttaaagccctgtagctccaagcctggtctcatttgcttccctgccaggctcattgtgtgtataccacatttgtgccccactgacctgaaggttccatgtaactgtatacacatgaatacttaaatgccaacattttaaataatttgataaagtctttgtagccacaaaaaaaaaaaaaacgtaaaggaataaagaatggctacttcatgggtaagagcagtggcatgggctgctcgactgagtatatttatagttatttcttgattatatgctgtattaatccrttttcacactgctataaaagaacttccctgagactgggtgatttataaaggaaagaggtttaattgactcagttttgcgtggctggagaggcctcaggaaatgtataattatggcagaaggggaagcaggcaccttcttcacaagatggcatgggagaaaagagcaggggaaaccgtcacttatagaaccatcagatcctgtgagaactcactcactaccacgagaacagcatgggggaaactgcccccatgatcctgtcacctcccaccaggtccctcccttgacaggtgggaattatggggattacaattagagataaaatttgggtggggacacagagccaaaccatatcatatgctaaacaacgggtggattattcatgagttttctgggaaaggggtggggatttcccagaactgaggggtcctcctctttttagaccatatagggtaacttccagacattgccatggcatttgtaaactgtcaaggcaccggtggaagtgttttttagcatgctaatggattataattagcgtataatgagcactgaggattaccagaggtcactttcgctgccatcttggttttggtgggttttgactggcttctttactgtatgctgttttatcagcagggtctttgtgatctgaatcttgtgtggacattttatttcatcctgtgagataagaatgcctaacctcctgggaatgcagcccagtaggtctcagccttattttacccagcccctattcaagatggagttactctggttcgaacacctctgacatattcccccctcccttttacaagggaacccttaatcctagcaattgtagagggacaaagatccatcttctgtaattttcaggccaaacagggcgatgacattcctgcctaactactggggtgtcttgtatccagggtagagaggagctcagtgagaaaacatcattacactgagggccattcataactccgacttctgatcaaaggtgatatctggaagattggtatgtgttcaatttaagaaaacattgagtaagcttacctatccagcatttctacacagaatacagcaggaatatattccacaacagtaaagtaaaataagcaaaattattctaagtaaatgaaaaaaataaggcattcaatgaactgggcagctgttgggaccaaactgatatggggttgctagccaattccaatatgtgcccagaattagaatattgatccagatttctacagtacccatccctcttgtttcttctgagctccagttaaagatcactggttgattcacaggaataagtagggttagtctaaattgcaggaaaaaaaaaaacaaaaacaactgatgagactagaatctaataacaggtgtgccatagttcttgaaacataatttttctctttccagtcttcatttttattaaaaacaaatcataatagggctaatttgtttataaaatcagctttagtcttatacttggcctgtttatttgtataaagtgcagcaagaataattattttcacataggctttttaaaaattggctttgatgaaacttcgttccataaagaatctcagataagaccttttttaaagctgagccccagccatgggtttgtactgtcaaatgcctatacgagtcaggtaaattcctctcctcttgaggttccataattttggaacacataccaataacatatttattataaataaataaataaataaataaaacctttactcattaatacagggaagacttagttttccaaacaatctgtttctttcctttcctctctttttactataatttattcaaaaggcaaacaagaatctttcaatatttttaatataacatgaaaatcttgttcaagagagaaagacaatttcaccctttgcattggtgtgctattaatgtcaaccccaattcttaataaaaccttatagacaaatctatccaattttcatgcctgaccgtaaggtaagagtctcataaactttttataaccctttacagatttttgttaaagaacagatcagtgctctaagaaaaacctattgtgcttttattccaatgttcaacttatgaaaaaactgaatacccctttaactttagccagtgttcacacatagaatttcttttacaagattaatccttcataaaccttccataagttgctcaaaaktttagctttttcctatcaaacttaaaacaagactttaaccctttaatctaggcaaaaaaaaaaaaatccacattcccatgccttcttataatcttttaycaaaaacacattttactttccttacacaccttgcatgtaaaactgtttcctcagtagtttcaattacatgttacaatattaactcttagtaacttttatttttggtgaaaaacttagtaagtaagcaattttaattatgtactaggtgtggggcttaggacaccagacagaagtgcagataaagtctgactcttttcagcattgctaggggttatggctaactccacatgtccccaggccttatgtagaaactaatggctctaaagcaggtaagttgaacaattttcaaaagtcaaagaaataacttatgaccttaaagcattcatcaaacctaatatctgacctgcctaatttagaccaaatgtctaaattttgaagacatttttattttaccaataatctttaaaactatctttatttctcaaagattactaaagttatgtgaactaaaaggcattacagtttttatttttctaacaaaatatttgatcacacatcacacacacacacaacacatataaatacacaaacagtcagaagattctgtagttgtaagatttttcatttgccagtttttgtttctcaattggattactggcttcagggtagagccctttgaggaacagggccaggaaaccattcagtttcaagggcctagtaagcaggcacagctggaaggcaaaacagatcccccaaaattaagggtcccatttttataccagatcttagatcccaaagaggagggaatcagtccatctcccataaaagcccataactgccattagccagccctaaaagtatatttcctacttagtaattagacaccaaagttctctcataatgcgaagtaatttctgatacccccaaatgtcaaaaacatcagacaacacaatgtaaaacagaacagggccttagattttgggagagatctatccactttcaattcctggggtttcatgaggaaaacagaggtttttccccaaacagcgtgtgtggcacctcctctgttttccccaaagagtcccagcctgttagaaattttcttaggtcctctcatgtatgcatcaagagtggcaagaaaacaaaatggagaaaaatgacttttcagttgactgaaaagaaaaactttttctcaagaaaaacaagatttgagaaaaaaccataaaggccttttcaatatacccatagcttgaatatccacttttaattaagctgacttttaaccatagtgctctttttaaaaaagtcttttaaaatttcttattatccaacttttagccaagaaaaatggtcaatatttctggcttttgaactttaccaaagataacttcccaggtgctcagagaaaggaaaattcaagagggaagtcagaagttgttcatggagaggaagagaatcaacaagtggcaaaggtcacacagatatcaaccaaaaagtactcattccctagaccgggaattgagagcctgggctaccactgtaaaatggcaaagccttagctactgagctacagcactgagcagttttcattgctcttcctaggaatctagagtcagccaattttgagcttgcaaaggtttttaactgctctggataatttttaaggctaactataacatgaactccaaaattcctgttcccttgatggtggagaccaagagaaagtaccacccacctggttacaaagtcaagctcccaaggacataaaacaagatgagagggaaacttcatccagttttttttgtttgtttcacaggtctacaaccaggagtttcaacatgtggtctttgggcaggatggttgctctgagtaacagaaaatataggaaagggaaaggagagaaagagagagagggccaggcacagtggctcacacctgtaatcccagcacgttgggaggccgaggctggtggrtcacgaggaagagattgagaccatcctggccaacatgatgaaaccccgtctctactaaaaatacaaaaaaactagctgggcatgatgcgcacacctgtagtcccagctgcttgggagactgaggcaggagaatcacttgaacccgggaggcagaggttgcagtgagccgagatcgcgccattgcactccacctggccacagagcaagactccgtctcaaaaaaaaaaaaaaaaagagagagagagagagaaagcattccctgcggtggggaaggtgaagagctcagggaggccagagaargacctactcattgaagcaacactgaatcaaaagttcaaatggccacttgtcagttgtgaagggatcttttccagcagtcccatcagctctcaagtttccccttttgggaaggaaraagttccccatgttccacggtcttgtatatgcctaatcctgtcacccacagtcgtcagcaaagagtataagacagattaatccraagagaatagcggtggcattaatccataatgccaaattcatttttaaccaagagggactttactgagaggggcctttaaccctctaaatcttaggaaggactctaaccttcctaaattgggcctgagacccaagtttggtcaagaagccttgccttttattaagatgggcctttaaccctctctatcttaggagagtctatcctaagttgggcctctaactcaatcccaccctttacccaggtaaaatataccccaccacttacccaaaatcagccagttggtgctgcagtctatttcctctggatcagggggtctcctcagtagagtccctttgtggttcaccaggaagatgttagtggaaaggggtcccaatccagaccccaaaagagggttcttggatctcacacaagaaagaattcagggcgagtccacagagtaaagtgaaagtttattgagaaaataaagggataaagaatggctactccattggcacagcagccagaagcaagaagttctgaactgcctatcagatattaccattttataaatgagaaccagtccataattttggaacatgtttcctatataataaccctttcttagttggaaatgacccagacattcaacaagcatctacaatgattttaagaacttaaatcayacaaaaaagttttacttagaagcatttatctcatttatatgcatataattctcccatttttaaccgtttacttagattacttctgaaaactgagatcttaccacagaggtagtcattattgaaagttaattccctgttaaccattttaaagcttgtgaacatcatgtgttcatctaagtaagaaccttaaagttaaaacacataggcattttgttgataactcagaaggtttagctattttcctcaaacaatattaaatgtcttatcaaaaattacacaaagatcattctgtcttgggctgggtttatagttttgtaactcttatgccaaattttggcacctaatgatatctggcagagataaatatgaaaccgcttgatcaataarctcaaatgaaaatgtatgttgacaattcttaagatatttataatattattttaccaataatgtaaagccagcttatttattaaagattttacttaatttatgagtacgtcttaactctaaggaatttggttcct

SEQ ID NO: 9887 - DNA, 15046 bp, Homo sapiens
ctcagagtccctatgtgaaccccaatcagtcttccttgtagggctactgagggtggggtcagacctggggcttcaggggcctctgcccactctaacccccactccaccctaccccacccaggttcctcatcagtgaagcccaactaggggcttcccagagactggggaccagcttgaggggtgaagctgggctccagggtacttggtgcccctggaaggcctcggcatcatcagagccccgggtattgtctgaattgcacgcccccaatacctccagcccctccaagtacaacaaggccacgaggggcctctgctcctccttgaggccagggtagacaaggccctggttgcagggcagctaggggtctctgcattctccacatggtctcatgcccccttttgtcccctacaggaggacttgaggccatctgccccccaacaggagggtgwggcatccaaagagaaagaggaagtggcagaggaggtaggagctgggctcctggggtgcaccatkgggggttcctkggtagggaccccatcccccacagacgcactgcttccctcctgggctcccagggcccagaggggcctcctgaccttccacagcccctacagggactgtgtrcagggctaaccctgaacctgagtgggaggtccccccacggatgacccctcaggcatggggcacagaagacaacttttctcagccmactcagggtggcccattaaggctggggcctggagctgggtgtgcaggtcattctctctcccaggcccagagtgggggagactagagggctacaggccagcgtggatgacctgaagagygctcctctgccttggacaccatcccctcctagcacaaggagtgcccgccttgagtgacatgcggctgcccacgctcctgccctygtctycctggccacccttggcctgtccacctgtgctgctgcaccaacctcactgccctccctcggccccacccaccctctggtccttctgaccccacwtatgctgctgtgaattttttttttaaatgatkccaaataaaacttgagcccactcctgccatgcttcctctgggtgctgtgtagcttsaggaggggtccccaggtcctcccaggaacaggaacgggttcagcctgttgataggaccaggtatcctatagggacacacacagggcattcatgggacctgcgtgagccttcaggaacacccccaacccacccattgcctttaacatggaggaggcagcactgccttcggctccccaagacattcgacaggactcacagtcccatccacggggatagcttakctcagcctcaaggtagcccccgcctgcctgctctgagtccctgaggaacccactgtcagcaggaggtgaagataggctcctgggtcttccctccatgtgagttctgggctccagtgtcgcaagaggaacagggccacctaacatcctccctggggcagatggtgactttcaaagatggagaagtctaaacctagtgaggatgaagggcatcccacaggagagacagraggtggaccctgcggcgcctcccacctggccccagccagtctcatgctccccgctggacctggagctgggtaccccttgcacccctcctgcacccagaagcctgccagttgccaccaaaaacacaacagcagagacgcacgaagccgcaccttgacagaaaaatagtaaaaagcaacagctgctgaggtcctcacaggcgttgactgggcactgttctgagcacttcaccttatttaatcctcagaataaacctctcaggttggagctgtagatccaggttttgctgagacgcacaggactgggcagaagcccaggtggctccccagccctgctatggctgcatggaccccaaggtgcttacagtggattgcccccaacccaaagtttcaaaacaacccagggcttgctggccagtggcctacatgaaaggctgtttgcccagcccactctgaacaagcctgccgggcacgacgcaaaccacccatcatgtaggccactggccagcgtgtcctgggttgttttaaagccttgcatgccgggcrggcttgttcagaccagggttccctggggatcctggcttcccctttgatactcagatggtttgggctcaaagcatctcagtgccttgccccaggccttcaggcctgggtgttggagccagagcttgagtccgtccacatgtgacttcagacactgccctgtccacaccgcctccccatccagcctctgcagtggattcaagggcagcccaggaggctgggagcccagtcagacacagcggagccaggctgtatctgttgtctggccatgggcatccactgaggaggcagaacggagcagggggctgctggtctccacatccccaagcactgccatgggcaggcatgaagggtctggaagcagctcaggccagtcagggctgttcctgctccccagcccagacatgtacacattaagcaggcctrtatgaacccaggaggaggccacctggggcctgggtgtgcccgagagtcccctgggctgtgagagaaagcaaggaggagcaaggctrgtcaggtgatgggggtgagggagagggcacctatgcccggctcccagcgacaacctgccccaggtttcagggycctctgcctctgctggaggagcccagaggggtccctgctgcccctaccacagcccccctacaaccccctctcacatacactcagggcttgttcctggactcaaatgacaaacatcaccagaaagccccttcccagccatgggcactggcagtgctctttgcctttgaaacctcatgtgctctgcaccctgtgaggctgcttctgacctccctgcaggagcacggttgactccccttatccaccaggatacactcaagatgtttccagctgcctgcaaccccagatagtaccaaagcctacatatgtatcttcctacacgtacacatgtgcctccctatgatgaagtttatacattaggcacmgtaatagactaacaataaccagtaagaaaacggaacaattataacaatatactgtaatgaaagttatttaaaacatgaattgtttatttctagaattttcttttttttttttttttgagacggagtcttactctgtcatccaggctggagtggtggtgcgatctctgctcactgcaacctctgcctcccaggttcaagtgattctcctgcctcagcctcccaagtagcagggactacaggcgtgcgccaccacgcccagctaattttggtacttttagtacagacagggtttcaccatgttggccaggctggtctcgaactcctgacytcaagctatccacctacctcggcctcccaaagtgctgggattacaggcaggagccatcacgaccagctatttctggaattttccatttaacattttggaccttaccaattgcggtgcaggggccaagggaaaacttcccctttaccctctgaaggttcactgaaaagtcagctcatgaaagcagaatagaaatggaatacacattcattagcatgcaaggggaaatcagagtgactgccccaccacgaaatggggtacagatgagcaatggggaagtgtgggtaatttcagggggctagtaaatgattttcaggggaattcagtgggcttgaagaacatacagtggcctgggacaaagtctgttgggctcacagagcagacaacggtttgcaaaatctgtccaggtatgtgagcaggcttcagtctttcttcctgtgacagcagttcagtcagagaaaactccgggaagggaccagyggtcattgttttcttctttggtgggtccakacttaaggcasatgaggaacttcagagaacaacttcactgtatgctttggaagagacaaagggttggggggcctgtgggagtctggtcggagagaccttaaggcttcttcagttcagaatgtcacaccactatatttcggggtattggtttctgagccccaacaatgrgtaactgaaactgcagaaagcgaaatcacaaattagctgggggtggtggctcatgcctgtaatctcagctactcaggaagctgaggcagaactgcttgaacctggaaggcagaggttgcagtgagccaagatcccgccattgcactccagcctgggcaacaagagcaaaactctgtctccaaaaacaaaaaaaggraaaaaaaaaagtgacaccacagcaaactggggcgggggtgggggaaacggtaatgcggtaatgcgctccctccttctgcctctccttgtctgagaagccctggtgccctgcacgctctcacaaggtccactgctgagtcctgggcacccttcagccaatttaatcttcacacacacactttggggagacgctgtgatgtgatggggatgttgaggctcagagaagtgaggggcttgctctaagaatatctgaacccaagaggtttgactgtagtgcctgccgctagggccacgtggagctctctctaccaccatctgctgggggctggctgtctcttcccacagaggctgctcccttcctgtccagctcacagctcattgcccatggggcctggagcccagtggcaccaccagcctgtgataaactggaacactcgaaggcctgcctggctattgggcactaccggtgggatttcaggagggctggcagggctgtrgccagccaggcagggcatggctgagatgggctccccagagtccccaaggsatccatatggccrctcccagggcaaggcctcgctctgggagaggaggggcggggggctgggaggactgttgctrccgctttgttttgcctgagacctgctccctcccccttcctccrcctaatctcatcacctgcctcttccctttgcccagggttgacctcatctccattaatccataccgtgtgtgtgtgtgtgtgtgtgtgtgtgtgtgtgtgtgtgtgtgtgtgtgtacaggtgcacttccaaacaactccctctaggggctgaccccgcagcactagaagcagggtatgtgccagcagaccaagcctgtgtggcaggggcttcccagcgctccagaataggggagacmccagcagaggtgcaagaaacagccccggacaggaagcggtagagagacccagaaaggcagggtgggtgtgcactggcctccaggtcctgaaggcctactctggagtgggagtatacccagctgggtggggcctgacytacaccccttgtgtgccaggggaatgtatcttgcaagctgttttgctgcacccaaggatgaycttctccactcaggcccaggtccctaagtcccctcctaacagccacaagtcrtactctctagcgccttgcctgccccatctcaggaaaggtgacctgagaggcccaagcttattcctgccctccctgagccatgcttcctgcccaacttcctaaggcttcggtgacagacggcaatctccytgcctgggctgcacaggcacactgccctctcccccttggggttgcatggtctgcaagtgcacacacctgtatctcgccctctcaggggaaagatttaccaggccctctccggstgcatccactgggtctctggctacaggcagagagccagtcagcagtgcccctgcagctgtttggggctgggggctccgatgatgccagagccctagggtttacaggcacctaggcagattcgaggatccaagtcsctgccacatgcgtttgggtgagaccgacctcactgcctcagtttcctcctatacactgatgctatcaacaaaaatacccacttcaggaggtggttgtaaagattatacaagagactgcagagcgttaggcagcacctggcacaagacaaatgctcagtaaaagaccactgctgtcattaaggtcaacaccagccctgagctcctgccctggagctgacccagcgctcacrcccaggatcagaaagggagggctggggctgatgagctgggaggtggtgtgcgcccttctcctgcctccagctcctctctggacccctgtcctggcacctcttcggtccctggttcggtctgcccctttcccaccgcggcccgtcttaggccaggatgtgctccctgccctgcggactctggagcagggcccggccactccccggagcctgtatgacgggaaccgccccgmgccctctcccctacgcggggcaggccagccctggggcgccttaaaaaccggagctggcgcttggcatcgccactctgggcaggatccaacgtcgctccagctgctcttgacgactccacagataccccgaagccmtggcaagcaagggcttgcaggacctgaagcaacaggtggaggggaccgcccaggaagccggtgaggatagcgcgcgacctagggctcaggcaggggcacctgcgtggatgcgcaggcagaagcagcgggtcggcgcggtccgcaagttcctggaccggcagcttggctcggaaggctcggtcctccactgagacgcagggggcaggcagaacgcccaccccggcgagcagacagatggtgcccgcagggaggcagcggaacagaggctccggaggagccggagctgcgctgcgggcactgcgggagcccctccaaggaggccatgctggcgctgggcggcccgcccaggccctcaggagagggtgaaggtccaggacagggatcgggcgcggcccgccaccacttaaacccgcgcgcgccaccagaggctgccccagacctcaaagggctttgtttccatcccacccccatcgccgaaaagtaatcgtcgccttacctttaagtccccacctggcaaagaaggtccttagttcctccacctccagctctctcctccgtattctggaggtgacccagctgcggtgggggcgtgggagatgtcaggagaccactgggttggttcttcctgcacctagcccaggcttcgttaggactccagctccctgtcagtcctgcccatatcccagtcaggagacaatatccaaaccaaccccttacttcaccagtgctccaggggaggcccacagttcttcccttgagactgaaatgctaccaaggaagcctccgtgtcaggtcccttccttctgggcttcacttttccatctgagagctgggtgcaaaggatgggctgctttctgatgggttaatcgagacgaggttcccaggggcctctcagcacacttgcctgactaaccctttccggaggatgggatctgggtaaggcaggccctttcctgttcagcagcagggatgagttacagctctgtaggcgggagccacctgtcagcccccyycggggctggtgactccattcccagcaggccgaaactctggtcyagaggagatagtccggccttgraagttttgcctccttccttcatttgtctcctaatgtcttaagctgcctgtccacagaggcactggctttgcttgtgtgcccctccgggcaggccacaggagggaggaggcagtaaggacctggcaaaactgcaagccccagggctaagtgcatgaaaggtgggaattcaggcatctgggccaggcttctaggggagaagctgtaaaagggggcaagggtcttctgcgccatcaccagcattagccaacagtccagatgctagctgcagcctggccctgccctgccttccttcctctgtccaacattttctcagtagccctggagatggaaagggaagctcctcccccacagagaaggagctcagagttagaaataaacaaaaacatcccagaggcatggaaaggtctcctgcccctcgggctggggggccctgggccagggactttatctccatggcatccatcccttggacctgtaccaccgaatactctggaggacacagaggcatggcaatggtggggcacctgtagtcggtggtgcctcaacaggggctaaaagccacatctctctgttccagtgtcagcggccggagcggcagctcagcaagtggtggaccaggccacagaggcggggcagaaaggtctggtggggctggagggaggcgggcaaccccagcacacctcccactccccgccccatcccggctggggcccaggcacatcctctyctctgcagagccctctgtccacaatgccccaagcaggtcccccgggagacccaggccaggctaagcctacrggcactgtggttcccgggccctgcctgacctgccctctctcccgcccttccccagccatggaccagctggccaagaccacccaggaaaccatcgacaagactgctaaccaggcctctgacaccttctctgggatyggraaaaaattcggcctcctgmaatgacagmagggagacttgggtcggcctcctgaaatgayagmagggagrcytgggtgaccccccttccaggcgccatctagcacagcytggccctgatctccgggcagccaccacctcctcggtctgccccctcattaaaattcacgttcccaccctgtgtccacttcatgattcctcgcaagctgggcccagtcctctcatcccaagagcagagccaccgtagccggagtcctagcctcccaaattcggaaatccaatccaacggtctcaggaatgttttccatcccgccacgcgcctcccgaagctcccagaccggaggctcagcccccatctcggttagtgcccctctcccgcccgactttagagccagyccctgccccttattccctgccccaggatcccggcccctcctgggagctgggctkgactcsgtcctcagatcctcggaaggctcagctctgggcggggcaagggaccttgcaagtcgggggggcctcgggaacttctctccgccagctgcgactggaggctgggaacaggggagacgacccagggccacggcccctcaggacttcaggcggccggaggttgtggggacgaagcggagtcgggagccgggcttccggccctcactaccccgtctcggcccgcgggttgcctgcgtgcccgccccacccagcggtgagtcatggggcagggcccgcgggaagctttgttgagtggggcgctgccgcccggcggggtcccgccccgccactccccggggaggggcttcggggcacggggccgtgcacgtgagaacgaagcacggttgtgggggggscatgcacgtgcgcgctcgcgtgcgggagacccctcccttccacaccacttcctttcgggacaaaccggtaacctccggccctggaaggttttgtctagtgggktccggatggactggtgttcccagcacccccccggcaygtgtccacgcgtgtggccccggtacggtgtatgccttgccagtaggtgactcaacgtggcactggttgagcgccggatgaggcctggccctggcgcggggcgtgggctgctgcggccctttcctccccgcgcccctcacgccccagcgggcccctagcggttcccgtscacccgctccatgtctttaccccggtactacctccacctgcartcgcctcctcctgcgcgccagtggcctctgcgtttctgttgaaaggtaccgactacgcggtgcttcccagttctgaggcgatttagtcagcggactcaaggcgcgctccctgccttccccggcctcccagcaggggacgaagtccccaacctggctgccagtccagatgctgcagtacaggtctgcctargaggccgttcccttctccagtctgagatctccctcgcggggcacgtgtctaccacccttaacccagggctgccctggttccactatcggttacatgttgctgactgtccccaaaaggtttctttgtagaatgtgggaaagtccttgaagagacacccggagcagtgtcaggggcgcttccaggagccccygcctccrggagcaggtcctagggtctggagagccggcctcagggccactccaggaggctggtggggctggactggcagagcccagcatccttctggtgtgcatcattcccctatgactcagggatgaatcccaagggayttttcacttgttctccttgtgagtgatcgccttaagtgcgacccaggtgcggccaaggagagagatcaggcctgaggccaggagtcttctagaaaaggcttttcttgtcttgaaggcggggcatggtggctcagcctgtaatcccagcactttgggaggctgaggcgggagaatgacttgagaccgggaggtcgaggaccgctgcactcagtctgggcaacagagtgagaccctgtctcagaaaaaaaaaaaaaagccgcccttcatcttcctctggacaccttgtggctggaaaggaaccctagaaccagccacttggaaccacaggaggaacaagtctgaggaacaagtctaaggaaaagcccacctgctgatgagggcagagcctcccagacctccagcctgttcccacaacaccccctcccttccatctcagccaccttgamcttcccatcatgctcctgctgcctcggtatcttcacacctgcggcattttctgcctggcatactctccataaatcacccttgcctattgctcttccaaacgtcaggtctcagcggccttgggtgtgccgacacacacacacacacacacacacacacacamwtgcatcaggcccctggtgacacatyctcacaccccctgtacctcctttttagagtcacaatgagccttcatgtgtgcttctccatagtggtggttcatggggctgtaaccagtccctttttagtgcatgctctgtgtcttctgcggtgctcaggcagcactggctaaatgattgcatggaggaccatccttttgttctcctgatggatgacagtgagttctcattttcaggtttaccatggaaccatctctgcaatgcagccccttccacattgccccagccccatggagctggtgctccsgtggcgctgtgcaattgcctgttcctgtgtgcctctgctcccccgacactaggagccctggagggcagggccaggtgggacttgccttttgaaccatgtctgggacacagagggcacagagccagtgtctctgtaataggtcccttgcctgatggcagggcaagtccatacacccgaaacaccgggttgcagcagaagaaagaggtttartcgcagggctgccagacaagatgggagaaaacctcaaatctytctccgagaagtttggggttagggttcttaagagttttagagcaggccaaagtgtggagattgttgatttgttgaagagtgcrgagtgaagtcatggggccagggagatgaaaaaactgtattctcatgctgattatgttcttctgggctgttcaaactggttggggtcacttgtttcactggaatttggaatctgaaaaacattttaggctggatgcggtggctcattcctgttttcccagtactctgaaggccaaggtgggcggatcatctgacgttaggagttcgagaccagcctggccacatagtgaaaccctgtctctactaaaaatacaaaaattagycgggtttggtggcgtgcgcctgtaatcccagttacttgggaggctgaggcaggagaattgcttgaacctgggaggtggaggttgctgagccaagatggtgccgctgcactccagcctgggcgacagagtgagactctgtctcggaaaaaaaaaaactgaaaaaacaaacgaaaaaaacgttttaaggaattcctaaacaaaagcctatgattctaacatcagaaagccgaactgtgggaacagtggggatgcagatggtcagtatacagtgccacgggaagttctatagaaggaatttagttaaagcacagcctcattaatkyttaattataactgttaatkyttaattataactgttaatgcttaattataactatatttctgtgtagaatgcttgttaaccctgtgaggacagcttcaccagaggagcccttgggagcttatactgcccaggcctgtctccaccaggttcatggagcaagtacagcccagactggctgaggaggaaggattgtggccacactacacctattgggtgtcagtcagtcctccagagatcaattcttccattagcaatgccacacataattcctaattctccaaattccagttccccatctagccaaacacacagtcactaacattacattgtggttccacttacaaatgactgcattttcaggtggaggtgttcccttaaaccattttctctggatggcgttccttcctccctcttcttcttcatccccattttcagtccgtaggatgagcttctttgtatgtaatctcccaaacgtctaccgctggagttctcagctttgacccccatcagactacacatgaggcagggtgcagattcttccactttcacctcctctccccttctctccctccgccgcctttttaaaaaatgttacttgtcccatttctacattgtgaaaacacgtagagttgcattccattcctcagccctgaaccacacctttgtttttgtcttggatctgcaattgaagatattaaaagctgtttgccattccttctgctgaatattttctgctatctcttggttggttagaattagtcctgcagagtcttytctctctctctctctctctcttttttttttgagacagagtatcactcctgttacccaggcaggagtgcagtggcacagtgtccgctcactgcaacctccacctcccrggttcaagcagttcttctgcctcagcttccggaatagctgggaytacaggtgcctgccaccacgcctggctaatttttgtatttttagtagagatggggtttcaccattttggccaggctggtctcaaatacctgatyttaggtgatccatcagccttggcctcccaaagtgctggaagtacaggtgtgagccaccgcacccagcccagagtcttctcaagaatgaaatagttaaagatgataaatgtttacagagataagacatctgatatctgagttaataatttctataactgggtaatgggtccatgagggttcattttatttatatatatatatatatttatttrtttatttatttatttttttgagacagagtcttccyctgttgcccaggctggagtgcactggcatgatgtcggctyactgcagcctccgtctcctgggttcaggcgattctcctgtctcagcctcctgtctcagctcatgcctgtagctgggattgcaggcatgtgccaccatgcctggctaatttttgtatttttagtacagacagggtttcactatgttggccagactggtctcgaactcctgacctcaggtgatcctcccacctcagcctcctgaagtgctgggattacagtcgggagccaccgtgcccggcccattatattctatttttgtgtatgacattttctatttttaaaayggtaaaaaagttaaaataaaaattttataaaaagaagggcttatgtgaacagtattctgatttttaaatgtttggttggtattgttagtctgtagcctttagactttatccctggctgggtttgaggtttgtggctccctcttcagcttcagtgtcttctaggtgtggctgcaactgccttctggcacagaaggttgagcagaccctacatgtctgatgcacactgaaatttctttttttatttttaattttaatttattatttattttgagatgggggtctcactatgttccccaggctggtctcaaactcttggcctcaagcagtcctcccaccttggcctaacaaagggctgggattacaggtgtgagccgctgcaccagctccctactggaatttttttttgtagagacagggagggtctggctctgtcacccagattggagtgcagtggcctgatcatggctccctgcagcctcaaactcctggcctcaagcaatcctcctacctcagcctcccaagtagctgggattacaggtgtgtgccaccatgctcagctaattaaaacaaatttttttttgtagaggtggagtctcactatgttgtccaggctgatgtcaaactcctgagctcaagtgatcctcccacctcagcctccccacagcactgggattacgggtgtgagccactgtgtccagactcctgcaggaatttctaataagcaacatgatatttctggcttgttttctttctttaagtttaaagtacaataatttttctagagtttgtctcaatgattatggctctggttcattgttgcctggtgtgcagtttgccctttgaatactaattcaaggctgggcgtggtagctcaggcctgtaatcccagcactttgggaggctgaggtgggaggatagcttgagctcgggagttttagatcagactgggtgacagtgataccccatctctacaaaaaataggaaaagtatccaggtgtggtggtgcacgcctgtagtcccagctacttaagaaggctgaagtgggaggatcccttgagcccaggagttgaaggctgcagtgagccatgattgcgctactgcactccagcctgagtggcagagtgagatcctatctcaaaaaaaaaaaaaaagtatatatgtatgtgtgtgtgtgtgtatrtrtgtgtgtgtatatatatgtgtgtgtatatatatgtgtgtgtgtatatatatgtgtgtgtgtgtgtgtgtgtgtatgtacctgtgtatgtgtggtgtatgtatacatatacatatatacccagaagacagattgttggatcataagttagctctatatttaattttttgaggaatccccatagtgtttttctttctttctttccttctttctttttttagaccaggtcttgcactgttgcccaggctggagtgcaatggcacgatctcagcccactgcaacctctgcctcctgggttcacgcaattctcctgcctcagcctcccgagtagccgggatgacaggcacacaccaccacacccgctaa

SEQ ID NO: 9888 - DNA, 13014 bp, Homo sapiens
ccccaggttccactgcgatcaccaaggggcctagaacagaaattacctcctctaagagaatatccagctcattccttgcccagtctatgaggtcgtcagacagcccctcagaagccatcwccaggctgtctaactttcctgccatgacagaatctggaggaatgatccttgctatgcaaacaagtccacctggcgctacatcactaagtgcacctactttggatacatcagccacagcctcctggacagggactccactggctacgactcagagatttacatactcagagaagaccactctctttagcaaaggtcctgaggatacatcacagccaagccctccctctgtggaagaaaccagctcttcctcttccctggtacctatcmatgctacaacctcgccttccaatattttgttgacatcacaagggcacagtccctcctctactccacctgtgacctcagttttcttgtctgagacctctggcctggggaagaccacagacatgtcgaggataagcttggaacctggcacaagtttacctcccaatttgagcagtacagcaggtgaggcgttatccacttatgaagcctccagagatacaaaggcaattcatcattctgcagacacagcagtgacgaatatggaggcaaccagttctgaatattctcctatcccaggccatacaaagccatccaaagccacatctccattggttacctcccacatcatgggggacatcacttcttccacatcagtatttggctcctccgagaccacagagattgagacagtgtcctctgtgaaccagggacttcaggagagaagcacatcccaggtggccagctctgctacagagacaagcactgtcattacccatgtgtctagtggtgatgctactactcatgtcaccaagacacaagccactttctctagcggaacatccatctcaagccctcatcagtttataacttctaccaacacatttacagatgtgagcaccaacccctccacctctctgataatgacagaatcttcaggagtgaccatcaccacccaaacaggtcctaytggagctgcaacacagggtccatatctcttggacacatcaaccatgccttacttgacagagactccattagctgtgactccagattttatgcaatcagagaagaccactctcataagcaaaggtcccaaggatgtgtcctggacaagccctccctctgtggcagaaaccagctatccctcttccctgacacctttcttggtcacaaccatacctcctgccacttccacgttacaagggcaacatacatcctctcctgtttctgcgacttcagttcttacctctggactggtgaagaccacagatatgttgaacacaagcatggaacctgtgaccaattcacctcaaaatttgaacaatccatcaaatgagatactggccactttggcagccaccacagatatagagactattcatcctyccataaacaaagcagtgaccaatatggggactgccagttcagcacatgtactgcattccactctcccagtcagctcagaaccatctacagccacatctccaatggttcctgcctccagcatgggggacgctcttgcttctatatcaatacctggttctgagaccacagacattgagggagagccaacatcctccctgactgctggacgaaaagagaacagcaccctccaggagatgaactcaactacagagtcaaacatcatcctctccaatgtgtctgtgggggctattactgaagccacaaaaatggaagtcccctcttttgatgcaacattcataccaactcctgctcagtcaacaaagttcccagatattttctcagtagccagcagtagactttcaaactctcctcccatgacaatatctacccacatgaccaccacccagacagggtcttctggagctacatcaaagattccacttgccttagacacatcaaccttggaaacctcagcagggactccatcagtggtgactgaggggtttgcccactcaaaaataaccactgcaatgaacaatgatgtcaaggacgtgtcacagacaaaccctccctttcaggatgaagccagctctccctcttctcaagcacctgtccttgtcacaaccttaccttcttctgttgctttcacaccgcaatggcacagtacctcctctcctgtttctatgtcctcagttcttacttcttcactggtaaagaccgcaggcaaggtggatacaagcttagaaacagtgaccagttcacctcaaagtatgagcaacactttggatgacatatcggtcacttcagcagccaccacagatatagagacaacgcatccttccataaacacagtagttaccaatgtggggaccaccggttcagcatttgaatcacattctactgtctcagcttacccagagccatctaaagtcacatctccaaatgttaccacctccaccatggaagacaccacaatttccagatcaatacctaaatcctctaagactacaagaactgagactgagacaacttcctccctgactcctaaactgagggagaccagcrtctcccaggagatcacctcgtccacagagacaagcactgttccttacaaagagctcactggtgccactaccgaggtatccaggacagatgtcacttcctctagcagtacatccttccctggccctgatcagtccacagtgtcactagacatctccacagaaaccaacaccaggctgtctacctccccaataatgacagaatctgcagaaataaccatcaccacccaaacaggtcctcatggggctacatcacaggatacttttaccatggacccatcaaatacaaccccccaggcagggatccactcagctatgactcatggattttcacaattggatgtgaccactcttatgagcagaattccacaggatgtatcatggacaagtcctccctctgtggataaaaccagctccccctcttcctttctgycctcacctgcaatgacmacaccttccctgatttcttctaccttaccagaggataagctctcctctcctatgacttcacttctcacctctggcctagtgaagattacagacatattacgtacacgcttggaacctgtgaccagctcacttccaaatttcagcagcacctcagataagatactggccacttctaaagacagtaaagacacaaaggaaatttttccttctataaacacagaagagaccaatgtgaaagccaacaactctggacatgaatcccattcccctgcactggctgactcagagacacccaaagccacaactcaaatggttatcaccaccactgtgggagatccagctccttccacatcaatgccagtgcatggttcctctgagaytacaaacattaagagagagccaacatatttcttgactcctagactgagagagaccagtacctctcaggagtccagctttcccacggacacaagttttctactttccaaagtccccactggtactattactgaggtctccagtacaggggtcawctcttctagcaaaatttccaccccagaccatgataagtccacagtgccacctgacaccttcacaggagagatccccagggtcttcacctcctctattaagacaaaatctgcagaaatgacgatcaccacccaagcaagtcctcctgagtctgcatcgcacagtacccttcccttggacacatcaaccacactttcccagggagggactcattcaactgtgactcagggattcccatactcagaggtgaccactctcatgggcatgggtcctgggaatgtgtcatggatgacaactccccctgtggaagaaaccagctctgtgtcttccctgatgtcttcacctgccatgacatccccttctcctgtttcctccacatcaccacagagcatcccctcctctcctcttcctgtgactgcacttcctacttctgttctggtgacaaccacagatgtgttgggcacaacaagcccagagtctgtaaccagttcacctccaaatttgagcagcatcactcatgagagaccggccacttacaaagacactgcacacacagaagccgccatgcmtcattccacaaacaccgcagtgaccaatgtagggacttccgggtctggacataaatcacaatcctctgtcctagctgactcagagacatcgaaagccacacctctgatgagtaccacctccaccctgggggacacaagtgtttccacatcaactcctaatatctctcagactaaccaaattcaaacagagccaacagcatccctgagccctagactgagggagagcagcacgtctgagaagaccagctcaacaacagagacaaatactgccttttcttatgtgcccacaggtgctattactcaggcctccagaacagaaatctcctctagcagaacatccatctcagaccttgatcggyccacaatagcacccgacatctccacaggaatgatcaccaggctcttcacctcccccatcatgacaaaatctgcagaaatgaccgtcaccactcaaacaactactcctggggctacatcacagggtatccttccctgggacacatcaaccacacttttccagggagggactcattcaaccgtgtctcagggattcccacactcagagataaccactcttcggagcagaacccctggagatgtgtcatggatgacaactccccctgtggaagaaaccagctctgggttttccctgatgtcaccttccatgacatccccttctcctgtttcctccacatcaccagagagcatcccctcctctcctctccctgtgactgcacttcttacttctgttctggtgacaaccacaaatgtattgggcacaacaagcccagagmccgtaacgagttcacctccaaatttaagcagccccacacaggaragactgaccacttacaaagacactgcgcacacagaagccatgcatgcttccatgcatacaaacactgcagtggccaacgtggggacctccattkctggacatgaatcacaatcttctgtcccagctgattcasacacatccaaagccacatctccaatgggtaycaccttcrccatgggggatacaagtgtttctacatcaactcctgccttctttgagactagaattcagactgaatcaacatcctctttgattcctggattaagggacaccaggacstctgaggagatcaacactgtgacagagaccagcactgtcctttcagaagtgcccactactactactactgaggtctccaggacagaagttatcacttccagcagaacaaccatctcagggyctgatcattccaaaatgtcaccctacatctccacagaaaccatcaccaggctctccacttttcctkttgtaacaggatccacagaaatggccatcaccaaccaaacaggtcctatagggactatctcacaggctrcccttaccctggacacatcaagcacagcttyctgggaagggactcactcacctgtgactcagagatttccacactcagaggagaccactactatgagcagaagtactaagggcgtgtcatggcaaagccctccctctgtggaagaaaccagttctccttcttccccagtgcctttacctgcaataacctcacattcatctctttattccgcagtatcaggaagtagccccacttctgctctccctgtgacttcccttctcacctctggcaggaggaagaccatagacatgttggacacacactcagaacttgtgaccagctccttaccaagtgcaagtagcttctcaggtgagatactcacttctgaagcctccacaaatacagagacaattcacttttcagagaacacagcagaaaccaatatggggaccaccaattctatgcataaactacattcctctgtctcaatccactcccagccatccggacacacacctccaaaggttactggatctatgatggaggacgctattgtttccacatcaacacctggttctcctgagactaaaaatgttgacagagactcaacatcccctctgactcctgaactgaaagaggacagcaccgccctggtgatgaactcaactacagagtcaaacactgttttctccagtgtgtccctggatgctgctactgaggtctccagggcagaagtcacctactatgatcctacattcatgccagcttctgctcagtcaacaaagtccccagacatttcacctgaagccagcagcagtcattctaactctcctcccttgacaatatctacacamaagaccatcgccacacaaacaggtccttctggggtgacatctcttggccaactgaccctggacacatcaaccatagccacctcagcaggaactccatcagccagaactcaggattttgtagattcagaaacaaccagtgtcatgaacaatgatctcaatgatgtgttgaagacaagccctttctctgcagaagaagccaactctctctcttctcaggcacctctccttgtgacaacctcaccttctcctgtaacttccacattgcaagagcacagtacctcctctcttgtttctgtgacctcagtacccacccctacactggcgaagatcacagacatggacacaaacttagaacctgtgactcgttcacctcaaaatttaaggaacaccttggccacttcagaagccaccacagatacacacacaatgcatccttctataaacacagcagtggccaatrtggggaccaccagttcaccaaatgaattctattttactgtctcacctgactcagacccatataaagccacatccgcagtagttatcacttccacctcgggggactcaatagtttccacatcaatgcctagatcctctgcgatgaaaaagattgagyctgagacaaytttctccctgatatttagactgagggagactagcacctcccagaaaattggctcatcctcagacacaagcacggtctttgacaaagcattcactgctgctactactgaggtctccagaacagaaytcacctcctctagcagaacatccatccaaggcactgaaaagcccacaatgtcaccggacacctccacaagatctgtcaccatgctttctacttttgctggcctgacaaaatccgaagaaaggaycattgccacccaaacaggtcctcatagggcgacatcacagggtacccttacctgggacacatcaatcacaacctcacaggcagggacccactcagctatgactcatggattttcacaattagatttgtccactcttacgagtagagttcctgagtacatatcagggacaagcccaccctctgtggaaaaaaccagctcttcctcttcccttctgtctttaccagcaataacctcaccgtcccctgtacctactacattaccagaaagtaggccgtcttctcctgttcatctgacttcactccccacctctggcctagtgaagaccacagatatgctggcatctgtggccagtttacctccaaacttgggcagcacctcacataagataccgactacttcagaagacattaaagatacagagaaaatgtatccttccacaaacatagcagtaaccaatgtggggaccaccacttctgaaaaggaatcttattcgtctgtcccagcctactcagaaccacccaaagtcacctctccaatggttacctctttcaacataagggacaccattgtttccacatccatgcctggctcctctgagattacaaggattgagatggagtcaacattctccctggctcatgggctgaagggaaccagcacctcccaggaccccatcgtatccacagagaaaagtgctgtccttcacaagttgaccactggtgctactgagacctctaggacagaagttgcctcttctagaagaacatccattccaggccctgatcattccacagagtcaccagacatctccactgaagtgatccccagcctgcctatctcccttggcattacagaatcttcaaatatgaccatcatcactcgaacaggtcctcctcttggctctacatcacagggcacatttaccttggacacaccaactacatcctccagggcaggaacacactcgatggcgactcaggaatttccacactcagaaatgaccactstcatgaacaaggacyctgagattctatcatggacaatccctycttctatagagaaaaccagcttctcctcttccctgatgccttcaccagccatgacttcacctcctgtttcctcaacattaycaaagaccattcacaccactccttctcctatgacctcactgctcacccctagcctagtgatgaccacagacacattgggcacaagcccaraacctacaaccagttcacctmcaaatttgagcagtacctcacatgagatactgacaacagatgaagacaccacagctatagaagccatgcatccttccacaascacagcagcgactaatgtggaaaccaccagttmtggacatgggtcacaatcctctgtcctagctgactcagaaaaaaccaaggccacagctccaatggataccacctccaccatggggcatacaactgtttccacatcaatgtctgtttcctctgagactacaaaaattaagagagagtcaacatattccttgactcctggactgagagagaccagcatttcccaaaatgccagcttttccactgacacaagtattgttctttcagaagtccccactggtactactgctgaggtctccaggacagaagtcacctcctctggtagaacatccatccctggcccttctcagtccacagttttgccagaaatatccacaagaacaatgacaaggctctttgcctygcccaccatgacagaatcagcagaaatgaccatccccactcaaacaggtccttctgggtctacctcacaggatacccttaccttggacacatccaccacaaagtcccaggcaaagactcattcaactttgrctcagagatttccacactcagagatgaccactctcatgagcagaggtcctggagatatgtcatggcaaagctctccctctctggaaaatcccagctctctcccttccctgctgtctttacctgccacaacctcacctcctcccatttcctccacattaccagtgactatctcctcctctcctcttcctgtgacttcacttctcacctctagcccggtaacgaccacagacatgttacacacaagcccagaacttgtaaccagttcacctccaaagctgagccacacttcagatgagagactgaccactggcaaggacaccacaaatacagaagctgtgcatccttccacaaacacagcagcgtccaatgtggagattcccagctctggacatgaatccccttcctctgccttagctgactcagagacatccaaagccacatcaccaatgtttattacctccacccaggaggatacaactgttgccatatcaacccctcacttcttggagactagcagaattcagaaagagtcaatttcctccctgagccctaaattgagggagacaggcagttctgtggagacaagctcagccatagagacaagtgctgtcctttctgaagtgtccrttggtgctactastgagatctccaggacagaagtcacctcctctagcagaacatccatctctggttctgctgagtccacaatgttgccagaaatatccaccacaagaaaaatcattaagttycctacttcccccatcctggcagaatcatcagaaatgaccatcaagacccaaacaagtcctcctgggtctacatcagagagtacctttacattagacacatcaaccactccctccttggtaataacccattcgactatgactcagagattgccacactcagagataaccactctkgtgagtagaggtgctggggatgtgccacggcccagctctctccctgtggaagaaacaagccctccatcttcccagctgtctttatctgccatgatctcaccttctcctgtttcttccacattaccagcaagtagccactcctcttctgcttctgtgacttcacttctcacaccaggccaagtgaagactactgaggtgttggacgcaagtgcagaacctgaaaccagttcacctccaagtttgagcagcacctcagttgaaatactggccacctctgaagtcaccacagatacggagaaaattcatcctttctcaaacacggcagtaaccaaagttggaacttccagttctggacatgaatccccttcctctgtcctacctgactcagagacaaccaaagccacatcggcaatgggtaccatctccattatgggggatacaagtgtttctacattaactcctgccttatctaacactaggaaaattcagtcagagccagcttcctcactgaccaccagattgagggagaccagcacctctgaagagaccagcttagccacagaagcaaacactgttctttctaaagtgtccactggtgctactactgaggtctccaggacagaagccatctcctttagcagaacatccatgtcaggccctgagcagtccacaatgtcacaagacatctccataggaaccatccccaggatttctgcctcctctgtcctgacagaatctgcaaaaatgaccatcacaacccaaacaggtccttcggagtctacactagaaagtacccttaatttgaacacagcaaccacaccctcttgggtggaaacccactctatagtaattcagggatttccacacccagagatgaccacttccatgggcagaggtcctggaggtgtgtcatggcctagccctccctttgtgaaagaaaccagccctccatcctccccgctgtctttacctgccgtgacctcacctcatcctgtttccaccacattcctagcacatatccccccctctccccttcctgtgacttcacttctcacctctggcccggcgacaaccacagatatcttgggtacaagcacagaacctggaaccagttcatcttcaagtttgagcaccacctcccatgagagactgaccacttacaaagacactgcacatacagaagccgtgcatccttccacaaacacaggagggaccaatgtggcaaccaccagctctggatataaatcacagtcctctgtcctagctgactcatctccaatgtgtaccacctccaccatgggggatacaartgttctcacatcaactcctgccttccttgagactaggaggattcagacagagctagcttcctccctgacccctggattgagggagtccagyggctctgaagggaccagctcaggcaccaagatgagcactgtcctctctaaagtgcccactggtgctactactgagatctccaaggaagacgtcacctccatcccaggtcccgctcaatccacaatatcaccagacatctccacaagaaccgtcagctggttctctacatcccctgtcatgacagaatcagcagaaataaccatgaacacccatacaagtcctttaggggccacaacacaaggcaccagtactttggmcacgtcaagcacaacctctttgacaatgacacactcaactatatctcaaggattttcacactcacagatgagcactcttatgaggaggggtcctgaggatgtatcatggatgagccctccccttctggaaaaaactagaccttccttttctctgatgtcttcaccagccacaacttcaccttctcctgtttcctccacattaccagagagcatctcttcctctcctcttcctgtgacttcactcctcacgtctggcttggcaaaaactacagatatgttgcacaaaagctcagaacctgtaaccaactcacctgcaaatttgagcagcacctcagttgaaatactggccacctctgaagtcaccacagatacagagaaaactcatccttcttcaaacagaacagtgaccgatgtggggacctccagttctggacatgaatccacttcctttgtcctagctgactcacagacatccaaagtcacatctccaatggttattacctccaccatggaggatacgagtgtctccacatcaactcctggcttttttgagactagcagaattcagacagaaccaacatcctccctgacccttggactgagaaagaccagcagctctgaggggaccagcttagccacagagatgagcactgtcctttctggagtgcccactggtgccactgctgaagtctccaggacagaagtcacctcctctagcagaacatccatctcaggctttgctcagctcacagtgtcaccagagacttccacagaaaccatcaccagactccctacctccagcataatgacagaatcagcagaaatgatgatcaagacacaaacagatcctcctgggtctacaccagagagtactcatactgtggacatatcaacaacacccaactgggtagaaacccactcgactgtgactcagagattttcacactcagagatgaccactcttgtgagcagaagccctggtgatatgttatggcctagtcaatcctctgtggaagaaaccagctctgcctcttccctgctgtctctgcctgccacgacctcaccttctcctgtttcctctacattagtagaggatttcccttccgcttctcttcctgtgacttctcttctcamccctggcctggtgataaccacagacaggatgggcataagcagagaacctggaaccagttccacttcaaatttgagcagcacctcccatgagagactgaccactttggaagacactgtagatacagaagccatgcagccttccacacacacagcagtgaccaacgtgaggacctccatttctggacatgaatcacaatcttctgtcctatctgactcagaga

SEQ ID NO: 9889 - DNA, 17613 bp, Homo sapiens
  misc_feature (6519)..(6519): n is a, c, g, or t
tctccttcctcagtctcctgagtagctgggattacaggcacacgccaccatgcacagctaatttttttgtatttttagtagagatgggggtttcaccacattggccaggctggtcttgaactcctgacctcaggtgatctgcccgccttggcctcccaaagtgctggaattacaggcgtgagccaacatgcccagccttcgatgaattgttttattcttactactctgtaatcacctgtctttaactgttactgttgtttactttaaatgttatgtgattattagttataattcagttaaatatgacaaatataaacaagcaattgaatatatgcatgtggaagagcatctatctttcacataactaaaaaatacataggaaagtttttgtggcacaaattgtccaagggaatagtgtgattctatcaccaacaaatgataggataatagacattaggcataagtagcagttactgtgctcattagttagtggtagattctacccatttattttctgtcactgtggttttctgctttaggtatgcctcttgaaagcagaacatagtcgtgttttgttttcttatttattctctgtcttttgatagatcaagcaaatttatttaaattcatgaacatttctgataacattgaacttgcttttactgtcttattaaaattttgctagttatcactctcttttcactctttttttgctttgagattaaagtgataagttctttttattcatttctccatctgtttttttttttttttttttttttgagacggagtctcgctctgtcgcccaggctggagtgcgatctcagctcacggcaagctccgcctcctgggttcacgccattctcctgcctcagcctcccgagtagctgggactacaggcgcctgccaccacgcccagctaattttttgtatttttaatagagacggggtttcaccgtgttagccaggatggtctccatctcctgacctcatgatccacccgcctcggcctcccaaagtgctgggattacaggcgtgagacacggagcccagcctcatttctccatctattctaagtttctatttttatataacaaatcattccccaaattgcaggcttaaaacagcagtttattacttttttcctcacgattctgtgaattgcctggacttagtggatagtctctcattgtggtatttcatgtagttgccatcagataagggatgggaccacagtcatctgaaggctcaaatgggatgaacatctacaatgatccaactcaatggctgacatagggaggattccctctttttctactgattggaatagtttcagaaggaatggtaccagctcctccttgtaactctggtagaattcggctgtgattccgtctggtcctggactttttttggttggtaggctattaattattgcctcaatttcagagcctgttagtggtatactcagggattcaaattcttcctggtttagtcttgggagggtgtatgtgtcgaggaatgtatccatttcttctagattttctagtttatttgcatagaggtgtttatagttttctctgatggtagtttgtatttctgtggaatcagtggtgatatcccctttatcattttttggggggtctatttgatttttctctcttttcttctttattagtcttgctactggtctatcaattttgttgatcttttcaaaaaaaccaactcctggattcatggatttcttgaagggtgttttgtgtctctatctccttcaattctgctctgatcttagttgtttcttgctgtctgctagcttttgaatgtgttggagagcagtttctcataaaagcttgtggattcaactgtaaaagtggcaatccactctgactcccctctccactgcagagagctttcttctttcacttattaaacttttgctccaacctcacccttttgtgtccacactccttaattttcttggtcatgagaccatgagctcagataacaccttagtaataatatcaatgacccggacctgttttggtaacaccagctctggggccaggacacaggggcactctcaggcagaagactgaaatctgtgcaagtggtatacaaatttatcccttcatacacaaatctcaggccagtctctctcttggacttctaaaattttacattcattgtgatgagaatcaacatttttggttcatttcaaaggacaggctcaagttttgccaatgctaatatggctcagcagaaaaatgcatgtggcttgtattaagaaagcacataaaggatctacattgactgggttttcataatcacaaaaaacgaataaatttgtatgagtatctttatatgaaggcaaggaggaaaacaggtgaatggaagcctacgtaaatgtgcttatgatttaaaacaaacttatttcctcaggaaaaatatatttttcacctcacctgttaaagtcttaggaaagcttaaccttgataatctcctaataacagaacttatgtttcttttctgaacctcattccttctcatattgtaataatgaaatgaataaatgaatagcaagtgagtagtggtgcacactaaactctgagtactgactgccttctattccacttaatacctttataagaacattgttatgtacctaagtcatgtcatctataaaactaaggtaatgataacaatcatatgtccctaatataatggttttgatgattaagtggaacatagtaaatgtttaaaaatgttttctattataaccaatttggctaggataggtggaaagaatagaaatatgataattaattgtgaaatgtataatatatattaataggtcatcaacatcaaattaaaaaatatagatgattaccatgatagtgaaaccaaagtttttagacaagtcaaagcaaagttgaagtctcagagaccattgtgtttatttgctaactgtattatcagactgcttagttgatacagtgaatacaataattcttccaatgtacataaactgccagacaagcaactcaatgcaattcactcactctcggagaagtttatcccctctgccaatgttcatctttcctggcaaaccatccttcagtattccaggcaaactagagcaaggtgaagttgaagaagatcctactttatattccattcagagagcttccgggtcttcaaaaaagatttagtcatgtgggtgtgaaagagctgagtcatgaaatttggaccttattrtaagtccagaaggaaaaacaaggggtttgaagcacaagggtgatatgatctaatttctacttttaaatgatcactctgattgtcgtgagggaactgatatgggatgtactgggggaagaatgttaccaggaccaggtcgaggctgttaaagacctccaggagagagcaytgtgggcygaacaacaagcttctagtaaagatcatgcaagtggacacatttgagatgtattttgaaggtggaagaaattagataagctaatgggtagtgcctggagggagtgaggatttttgaaccactaggtaaacacctgtgagtaacagagaaaaagttgggatgtgttatgaaagatgaatcctaaaatttcatatgttgaagactgatgcttcaggacctcagaatgtgaacatccatagtagaagggaattgtgttgttgacggctgccacccactctaggtgcccaagctcctgcagcagtcctacttctccctttcacccacactcactcccagacagtgtccctttcagctcttccatcaccccttcttttgatttggctggtgagagcatagctggtatttatactttcttgatatgctagtctcttttgctgattgttgacattggagaaggtcatggaagggacctgagctgagcracctttaggagcatttcctgttctyttcctgtactctgctgccaaggagaaatctgtctttcaccaggcttgcagctttctccgttacccacatcatcaggcaatatctgtctggcacccctctttgttccctttctctggccttcctttttgacatgatggttgacctgaaatcaccaaggcaggactgctcatctccaggtctaatggaaaacagtatctggtgaaaccaaagaaaataatyccagtaacccaytgggagctgcttggcttaagcacctaccctgtgcctaagatacaacccatcaagcccagctaaaactgatccagtttccacagggccagagaagaattgccaattaagaatgcattcccacttcaaatatgtctatatttatttcagggaaaatatcagtctgcctgggtcccttatgagaacattgttgtctgtagaaaaatctaatctattaggaagccttcttgttttgttatctgcaactcttcagaagggccagaccagaccctcgtatgcacagtacaggatccacccatgcacatctgtctagggccttgtctttatgattttctgtcacatggcctctcagccatgcctccaaccaagctatcctcaaataaacactagccgtgcacaaaaagtgaaaaattacacaaggcctacacaaggtctgaaatggaaagtgcagctggtgataccgagtagtatattttatgaattgaggaacagggaatttctaggtatcacagagcaatcagcagctgagaagaggagtaccaatccaggaccctggaargatttttcagaaacttaatagtttattgtccaattgtagagacaaaaatgaaaataaagatagtgaggagtaccatacaccattgcttagaagattaaataaatgtcatctcccacaagtcatgtggggagaaaaaaactatataggaagaaaattacaaacgacaaggtagtctcagcatataaaatatcaacaaatgaatgtaagaaagagaatgagaaagaattagtattagaatatcatagaaaaaatcatctttgtgaaagaaaactctgatgaaactggtgacataaatactgagtaaaaaacagaagaccaatcaaggcatttgaggcttgaacaggcattacaaatcatcaagttgaatatataagtatggccacttagttattagtggtgaagactacggtatttgttagaagaaataaagtagatgatgaattctatagaatattctggagaaagtggaggtcttagctacatgacatcgtgtggctcactttgggaaccatgtttcagtttgtttaggtctagaaattccttggtggtttctgtgttcagttttgctttaataatccctaaagatattttttaaaatacaaattttttagctttcctgtattgtacagcaccaacgcttgcctgagtgtagtgagattcacagagtttggaaatttcctgtagcatgaggaggctgcggggcagccttctgtcayctatgtgtacccagcagtgtgctgtcctcacacaactcacggataagcagaaagcatctctattacatgaaaaatttagctaaatatacaaatatccatgcacacacatcatgagagatggaaataggctatcaaaagagtcagacatattgaccgtcttcactgttagctgtaggattgctgcccaaccccctgacacacccacacaaactcacatacacasaaatgaaaagcacagtggaaagcagaatagcagtctttccaaacagattgaaaaacaaatgatgtctaaagttcaatcctgacactgtgctgattgcttggacacagttccgtcaaaacatttgtccaagtcatagttgtaccttttagaaattagccacaaacaayatcctccccaacccttcctgctaggctagagtcccaraagaaatgagggatacacttgacctgaagtaagcaaagcagaacccagtctctgaggcgaggaggcccacctggtagggagctcaaatgcgccattgtcctgcttgtctttataaagggagctgacacgtttctcccagcataaagttgggagtgacaccagagccttctgcaagatgcttctrattctsctgtcagtggccctgctggccttcagctcagctcaggacttagatgaaggtaagccgaattgggggaagatattgtgactctgattggggtttacgggcgaatgctatagagggggaaagtggagggaagagaggaggatgagaaaacagataggactgaagagttctcatgccaaggatcagaagacctgttgtgccttcattcctcatcaagacctcataatttattgattgcacaaatagaacccaataaagaatttgtaccgggggagtgagagagtgagatttgcatttatagagacatgggactgctgggaaggatrtggagaatgcaagacagattcagggaagtgcagctgtgaagatmctatactgatcccagtagacagggatgatggtggccttgctggacagtggatgagyatccatgaagkagataaacacatgtcagagctattgctnaggcagagaattgggtaaacacttgcctctgtctacatagagttagagaatcaccagagtgaaatattgtcatttttttctctcctgcatgtagtattttaatgtgctgggacgggcatttgtaagattgtatctaagtggctatgtctggtggctcctgttgagaaagcttgcaaacataaacaacatatttacagatgaaagagggcagaaggatccccaaatatttcattgaaatactcaagagccctttaactaaataagcactaaggcttaaggaatcatgagaggacaaacaggggcccttctatgttgagttcctggttgacrctcagtgtagtaacaatcctgctttcccttacatcttcttccacttccggtagcatcagagagtggctgatgagatctcaaaggggatgcacagggtgtgatcagaggtcctttatcctcgtagaacactatgagctctgaatgattcatgcagtaacttttcccatcatcctgtacttcttttctagatgtcagccaagaagacgttcccttggtaatatcaggtaaatcccaataaattctcagtaaactctgtctccatttttccctgaaaaattgatcagttctccagtgtcttcttatcatccttgtcaggaattggctaatatcagtgccccagagatataaacagttttctcccaaccttgattctggggaccatgagtaaagaaatttgatttttcaccaccctaatgtggattaagaggagttctaattaggaagccttgggaaggggggaggttgggagttgagaggcaggtcaggsagagaggggccggccgtgtggtgaagacagagagrtatgaagacaggagggttttccagcatgagctcagctcttcttgtttcaactcacacagatggaggagactctgagcagttcatagatgaggagcgtcagggaccacctttgggaggacagcaatctcaaccctctgctggtgatgggaaccagaatgatggccctcagcagggaccaccccaacaaggaggccagcagcaacaaggtccaccacctcctcagggaaagccacaaggaccaccccaacagggaggccatccccctcctcctcaaggaaggccacaaggaccaccccaacagggaggccatccccgtcctcctcgaggaaggccacaaggaccaccccaacagggaggccatcagcaaggtcctcccccacctcctcctggaaagccccagggaccacctccccaagggggccgcccacaaggacctccacaggggcagtctcctcagtaatctaggattcaatgayaggtatgattccagtttattatccatcaaaggctccaactgctacagttctccaacttcattgtgccagtgaatctattgaaaagctgttaatatttccgtgtcctggaacacatttctcatgagttttgttcaaatattctgggataaggtagcaagatcttgtttttaaacaatctcttgaaggcaattccaattttgagaatcactatcttcaaattacctctcttaaatagggttgggaatgaggacatagaatcatgttctccctttggcactctgtttcctttcctcaaactcaaagactcccatttatttaaagttttacctgaacactccttgttcaggacaggctcagtcctgcctcacactagcatttcaagtccagtattcctgctaaatggtccttggacttttagctgttaaatggtatctcattttttaaaacacatttcacatttaaagtcatacatgcttaagctaacaaaaactaatctcactgaatagacatgtaccaagctaaatagcaattcatttctcctcccctctacccttaccaaaactcccactttttactgtttggaaactcctctttgaaatatttattgctacataactatatataattttcccaccactaataccacactttatattcagttctgtgtcttacttattggaaaaatttatttcttagctttcacatgagtttatttagatctcttcagtgtttattggttagtttttttttttacaattatatatgatgctattgtttggtttttccrtaatttacttaaccaatccttgtcactgaacattaaggctgctttcacactgtccctattacaggatatgttgcagtccccatctttctgaaaataacccttaacgtatccaacagccacaaagcatgaacaacctaacaataatcgtttttcgtcctcatctaagcaacagtttaaagcacattacgtgcaatggcatagaaagtgtgaacaaagaaaatgatattaaggaggggggctgtagaagggatagagggcaaaaggatggttttgcatcttcctcaccgcagtaaaccaatgaggtattasacatttcctgccatgtcaagtcttgcctataatcttccttgtctttttcaggaagtgaataagaagatgacagtgtttcaaatgccttgaaacataatgtgatcatgctctaacttcaatataccaataaaataatcagcttgcaatttctgattatagcatctccttctgagtgtttgggactctggaatctgagacccatgttcacattgtaagaacatccaggaccccttctccttgatgtttccagcaagcttctttcctccttatccttattaagtcatctgcctggggaaggagttccactgtttctttccttctctgtcttcttagctcgaatttaaattgcacaattattttcaggtcatttcctgatagtctagtcagcttatgaatgtaagcaaaacaggaccaatgaaagaaagtcccagaagctgagagaaactttaacaagtttgagagtaacttattttgttttctaggaaagtgagtatggttctatgcctgtattccccagaagccactagacctattttcccctattttatcactgatcagttctgtccctgcctatgattcttaccattcttaagaaaacctgaatggatttcatcaaggcggcagcataatttgaagggcaattgcgtgtgaaaattgatgtgacttgatttacacaatagtcagaaaacattttagaaattgatgactttataatgcaaccaggagtattgaaaaaaaagtaagcaatgagctcaaataattaaaaaagagagacaaaatacacttgggagaacagaaataagaattaatgaaaatttaaaagattaaatgaatgagaagaaatgattcataaattttgaactaacagtaataacttcttgaaaatccaataaaattggcaaaagattgtgaaaattctggaagaataagggaaacagataatcttcagagtaatcaggtaaagcttaaacaagtgttttaaaagatgagtttttcctacattctgaaaagcaaacatgaaaaactgaacacagtttttacagatayacaatatggagtgacttatatacaaaatgaccttaaaaatatattaaactcattatagtagttaatatctaagtaaaatatgatgaaatttaatagagaattcactcctcccaaaagcaccttcatggaagattcctcattaacaggcagtcctttagtatgctgatttatacaaaatgctgaaaagaagagaaataccccaagttcttgaaaaaaaattttttgatatgactactctaacagtaataactataaatctcactttaaataatttaaaacaaattaaagtgatatatgagttaaatgaccaagcagacttgattcyaggaatgttaaggaatgtycattatttgttttggataatgaagtcagcagaggaaaaaaaaatatgaccatctcaaaagatgccaacgttgtctttgataatatttaatatattttttaaaaaacaattcttgtaaaatacttttttgattagccttctgaccatgattaaaatggtgtacctcaaagtagctgctaaccttaygtgtatctgcaacaccctgaaaaattatctaatraaaaggcacaaagaaaaagcttgtcaatgttgtggataattagraagtgaataattttatttaatattagataaacaagcacataacagagatacatatattcaaatggaaggastaaaattaccaccacatgcagatctgtttttctgtccagaaaataacaagagattctactcaggtaaaaaaggaaaggaaggaaaaccattgtaattaaaataaaatttaatacaatagccgtttattaattcaacttctaaagaatctttgtgattacacaatgaccagctagtaaatataataagaaaatgattattcacaaaggaaccaaaaggcctagtcttcgaatttttaatgccattgtgatagcaagcatctgattattttactctaagttatttccacttctgattttaagaacagcttctttcccagggatgggttccccctagtgatgtattctcttcaccacaagagtttgcagctctggctttctttctgctcatctgtaaagataactacagctcctctataaaccatctcaccattattaccgaaatcagacaaattctggagatagtcaaagctgtgaggattcgaagatctctttcacatcttgacccagtcaattccgttcaccagtgttatgaatccattccccaaaattccaattaggaattatatatttattattataatgaggatactatacaaggcatttagcatggctgcaaagagagagctccaatgtctaaatgcaacgctgacaatttcttcatctatcacatgtacctgttatacatacttattaattggatgtgcagttaatttcttcctttaaaaaaaaaactataggctcaatatgaaagtagaaagcactaaggtgtactaatgaatgggcacatagcttttttcacaaaaagattattttgccccagacagctatctgcattctgatccagatactgtatgttcttaacataaagtgaaatttctcatacttcatgatgaaagaaaaaactgaattctcattgttaataaacaaataaagacaattctctgcatcattgtgcatgtttgctttatctaatctcttcacaatttgcttattaattttaattgttatcaattgcattaaaattcaatggatagaagtataacatatagcaaatatgtaaattagtagatggagtatattgagcactaaaatcatctccactgaggaatgctgagggaagactgaggggatattttcatagtttatccaaagctcttataattcaaagcattgaaatttactgaatgaatccagaggagccataactcctgaatgctgagtgctgataatttacatttatttatcaattaattgtttgcaagttcccgtatacacacactttgcagaataaccttataggattattgtccaggaatgactgctgtctttttggcaataagaatatagggctcaggaaatcacatggattcaaaatcttcgattttctaataattaattcttgcttccttcattaatatttattaagcttatcctgacattaaaaaatattatatatcaaaatattttaaaaacataattacccttgatattctctaatacttaactgaaaatatccaggaacatttgagaaccatttacagggcttatgaaaactgatagaactctatattaatcccacacagcagcctctttgttaaagccagatagggacaatattgagaatgcagaggaacatctgcagagcatgaattgtcctcattttgtacttctcctctactcagtaatacccactcccctagagttatcaaaggttgggttttattcagcttccccacacctctgctgagcaacatctgttctatggctgttaaatcttactccaaagtaagtaagtataggtttgctaaacaacacggtggagttaaatcccaatatattcttatttcttcaagaaaatttttaaatcaatagagagcaataaactacatcagcaaagatctgtaatgttgtctatatgatcctcgaatttggagggatccagattgaggagttaagcaggcaaaaatgggaaattttaagaaaaaactttcaaggataggagcgccaacacatgacccaggcagaggtaggatggacattacaggcttggcatcttccaggatattgagctgaatctgaggaacacaccaattcctacaagaatgaaaatggggtaatggagtaggctctgaaactgaattttcatggggcattcgatgatgaagcagaacctaggctccaggaaagctagaactcacttcagaggagctctctgctattgctctcctatccctcccaccaccccgcccccacacacatacacacacccctgcagctttcttcccttaaaaacttactactggggaagacaaaccagtaaggtagataagacaacaagaattcctacatattttattccagtaaacataaggcccaggctaagatcaaaaaataagaataggaaataataatatttgattcttccaaagttgcaaagagaagctttctaagaatgcatacttatgtgcagttttcctcctgarttgtttctaatatgccacttgaggtatacttgacatgcaataagttgtacagatataaagtgtacaatttcatgagtgtctcaccatgtgatactcatcacatgtgaaaccatcactataatcaggtaacaaacatatatagtacccccaaaactttcctttatgttcctgtgttattcctccaacttaccactgcccattctttatcaaacccccagttaccaggcaaccatggatctgctttcagtcactatagattactttccatattctagaatggtatataaatggaatcatacatcattgtgttttctctgtgcccacagatgcctgtttcttcctctttttataaagacaccagtcctattgtactrcggcctcactgtatggcctaatttaaccttaactacctacttaaaagccttatatccaaatacagtcacattgagagtgtgggcttcaacacatggattttggagacaaacaagtcagtccataacagtctttctgaagcagattggttattagcattttcagtaaggasgtatgtttagtaaacagccctcatctttttttaaggggagaggggaatgttattatttaattcaaaccccagaacaaatttttagcaaagaattcaggattacggttacattccttagcccttgaaaaaatgaatcaactgtcttctggcatacagttctttgacacaatttttcatgttattcaaactgggattatcttccccttttggagattacctctcactaccttgcagctgctttctgaattcccatttgcctctaaggttgcaattttatttctctctctctctctctctctctctstgtgtgtgtgtgtgcgtgcgtgtgtatgaatatgtatattgtattttattaaatctagaatgcatagactagaagacatgtcattgttttatgtaccaccattaacaagtatcattattttaattggtcagaggagagggaaaatatgatcatcttaataaacagcaaaaaatttgatagtttttaacagagattttattacaatactatacacaggaagataggaaacaaatattctccctgaakaatatttttaaaagaatttatctcaaagctagagtcagtattacgtttattgttaaaacactagaaaacactccatttgcaaagacagcagttacgatcaggattacttaacactttgaatgttcaaaccatttcattatacaactgataccaaaaaagaattacaagtagtaaaatggagaagtaaaataatcattataagtcactatatgcagatgatataattttctatctgcaaagccaagagaatgagcaaagcaaatgtggtagtttagtaaggcagctggcttctaattcaacaaacgaagcaaattasttttttgcatacacgctaatcaggtactaaatattatacaaaaawtaaaaacacttaatataggtactaaaattccatattcttttatgtactttatctaccagattgagatgtaagtttaagaagcctatttttagtaactgtgtcacatacatacatacacacatgtattttatacattataggttttctcatttaaaaatctcaaaaaaggtgaatgattgatacaaaatctatattatctgtttgtataagaactctttatagtattcgcattcttctctgtatggtaatatacatactttcatatatcctaatttgtgatatgtttggatggtgttgattccaagcayatctttgtaaaattcacaaagttatacacaatgaaagaatcttaaggaagtataaatttatataacatacaagaatttcttaggagctattttttttctaatatattcaagatgattctctaaattctttgtgacctgagggctccccatctttgaacatgtacctcagccacagtagcactgacagagaggcctgtctcagcttcttgtttccaagaatcagaacacatgagtgacatgaaggataagccattcccatcacctgggaaagaataattagattttcctccaacctttcagaggtccaaactgatatgaaaaaagacagagagaaaatggcatagagtaggaagaaagtgatcacacttttaactcctctgtgggctttggtgctggcgtctccggatattttgacagtgtgctgcatcttcttgcgatgtttccacatggagaagatgargagaagaaacattgccagggacaaagtaaagggtatgaaaatgaacacagtgctggttaatacaataagactggaaaatcrtgtaaagttacttgaatcagaactgcaagtcttgtttcttctgtatccattgatactggcatttatatggatgtttatcagtgcaatatttaaaaacaagaagaccgaagtcacaagaagcagcaccaaaaccacctttttaacyctccactttaggtagagaaaaayagagttagaaaaattggctatcttgagaaaataaaaagtaccgaggcctgtagctaaccagacactaaaatgattgatcactgtccagatattagtaagcattctgaacattttttcagtggcaaataaagctgggaaaaacacagacacacaccagcttccgaatattaaccaaaccaggctaattcgagagattgccaaagcagtgaggatccgatcaaccgaagagatctttctwcccttgacccagtcaatacagttcaccagtgctatgaaactatttcctaaatttccaattataaattccacaattaaaacgaatgtaaatatgctctttatgacaccacccattgcctgtaagagcatgccccaatgtctaatatcactgctgaagacttyttaatgcattcatctaaaatgctatgtatatctgattcttgaaaattcaataatatattccctttaaaaagggaatgttaaaccagcaaccatccagatttgctaatggctgggtttaaagctctcttcataaaaatctctgtatttccccagacagctcagctgagcttcatccagatgctgtgtgccttatacacagtaggctgaagtcttttgtagctggtgagaaaggaaacactgaattctcatttgtaaacatgcaaataaggacatatttattttcattggtttgtgtgttttttttttttttttttgtcttatctacatacttcagtctgtcaaattgagttctggggaagtatcattacaaaaattggtatatgaaactttgtaagcactgagaatttttacatacttccgtgtttgggtggagaaaaatggggagatgatggtgaaagtttacagaacctcagttagacaagaggaataagttttgttctgcttttctgagatctattgaacagcattgtgaatatggttaataatagtgtattgtacattacaaaattgctgaaaaagtaactttcaaatattctcaccataaaaaaatatttgttacctgttatctgttatatttattatcatttgaatacgttaattagtttcatttaattattccacatagtaktcataaatcataacaacacctgatacctcataaatgtatgcaagtaaaatatgtcaatttacaataaaaataaagaaartaaagaaaaatcagatggttttttaaagttaagtctgtaaagggacttattcatagttatccaaagctcctcctacaaagtagcagagttttctaataatcttgtggaagacattattcctagaatgctgggtaccaagaataatacttttctattattttactttttacaagtacatgcccagcaaacatgcgcgcacacacacaaacacacaaacgcatacatttatttgggatctaaatctttttctcttttcacttaaataattcaggctttttactttcagcatttattatgcatctagttcatgtttagtactgtgatagttttaaacacatttaaaaagacttgcaagtttatattaaatagtaatacatgtaaatattccggagactttggaaatattttctctgtacatgtgagaagaggtagaaatctatctattgtctcayaaagcagtcattgtgtttgaatgagttcatccacatggcaagaattcttattctgtgcctctcccctgcccagtagggcatattgyttcatcagcaccaaataccttcacatttttttcacatatactcactctcccagcaacatctactccatgatcctcactacagggaccaatgtagataaaggatgacatactgtctagccaagacggggaaatcagcagcatgatacagtcattcttcttcaatagctaaaaaagtaagtaaagtgagcaaagcaccaatgaaacaaattcagcaacagctaccaaacaaagtagaaaaatatgcctcataaacgtcaaagatggcagagaaagatgtaaggtgttc

SEQ ID NO: 9890 - DNA, 62546 bp, Homo sapiens
  misc_feature (23789)..(23808): n is a, c, g, or t
  misc_feature (41860)..(41879): n is a, c, g, or t
tttaatatagaatttttctggccgggcgcagtggttcaatcttgtaatcccagcacttttggaggccgaggcgggcagatcacgaggtcaggagatcgagaccagcctggctaacatggtgaaaccccatctctactaaaaaaaaaaaaaaaatgcaaaaaattagccaggtgtggcggcgggcgcctgtcccagctacttgggaagctgaggcaggagaacagcatgaactctggaggtggagcttgcagtgcgctgagattgcgccactgcgctccagcctgggcaacagagcgagactccatctcaaaaaaaaaaaaaaagaatttttctatgttcatgagtagcattggccccttattcctttcttgtacagttgtcgattggttatgattttagagtgaaatgagaagtatgtcctttcctaaaagagactgtaaaaaattgcagtgatgtttcccaaatgtttggttgcagtctcctgcaaaattgtacaggtaggggtgtgtgtgtgtgtgtgtgtgtgtgtgtgtgtgtgcatgtaccactattgaaatatataccactaaggtggtagatatttcttattgtagaacaatttttgctttatatagtttgaggctatgttactaagcacagaattattatagcctcctagcgagttcaatctttatcattatccaatctgatactatttatctctgaactggcaaatttagtctgcttatatttattgtaattactgatatatctgttctgcttttactgtttcttttttcttcttttaaaattattttggattgactgtttttccctattttttccttttatagtgattttactgtacatacttaatatgggaaaccctaaatgtaattgatatctttactcttttttggcaaatgcaaggaccttagaaatctctaatagtaatagttctgcatgctatttttttgcctagtattttagctccattttaaattattttaaaacatacacattagatatcattgttttatagagttgcttgttcagatttacctacaagtttcccagtttgtttgcttgtcacttcttcttgcatctaagaccttatttctggtgtcaattttcttcttcctgaagataccctttagaagtttctttgataaaggtctattgttggtaaactctgattttgttcatttgaaaaatgtgttttatatcactgtcattcttgaaaaataattttacggtacagaattctatattgagttttcctccccagtatcttctggcttctgttcgtctaattgccactatctgttttttctatccagatgctcttaagatcttgtttttggtattctcctgcttctcctcaatatgtctacatgtgcatttattactatttgttctgactatgaccaagcttatggtaactatttcttaggtaaaactattattattttctgtctggagcaaagacaaaaaaggtaggcttctctttgcagatttttccctgtctaccttttgtctaaaggagcagtccttcaaatatttctgcttattcagtgtttccagtttggaatctccattttgtaaagcccatggcctagtttcctgcatcctcaagtggctattagtttcctggtctctgagtgccagagattgtcttttgcttcagggtagcaccaactttagcattcacatttgcctactctctgggtttctgcttactctgaattttgctggttcttatggcttctctgtaaccccttggcagctcagcaatgtatgtaaagtgatacttcctgtggtttatgtaacatatggctattttgtggtgatgagaggcttttcaggctacctagttctggactacctagtccagaagcaaacatttttaatatatgaattacactaaattatttttaaagataatgacaaaatagtttttaaataacagaatatgataccctcaggatagttatgtttaacaaaacaataaaacaaacaaaatcctgagataaaaaccacaagctctagtaacaatactatattttgttgcttacctaacctttaaccttctagaaccagaacttttatcataaatttttaagcgcttactatatgtttagaaccatgttcagggaacccatggggtgagaaaacacacaacctcagacttttaggattttactacttcttaaaaaaacaaaactaaccaatacacagttaacaatgagagaacaattcaagagtaaacgaggaaacatctgcaggatttgttgagaggaaagaaagacttgtaaataaattgttggtgattataccctcctgtgccctcaacttgtcgaggatgctctccaactttgcctatgtataggtccacttctaaatatgtggtcacatggaatcttcagcataaaaaatggagtgcaacaatggatcccagtgaacctcagccacaaatagaaattctgaggttcttcctgatgagtagaaaagatcccaaactgacaattagtgtcaggaatacttatattccttgttctgccactaactaaaggtgctaacttgggcactttattcttctttctagacctcaggtttcctatctattgaatgcaggtggggtgaactatattaattgccagtatatttgtgtcagagggctaaatgtttgagggggctactgcctgtggtcctgagccatcatttatctctagggaggagcatttctctggaagtttgaaggggtacatactcccctcccaccatctcttagcatccttcatctggtgcttcttataagttaaggttcatcacaatggtcaatagtgagtatgaggtgagtattacctgggaatatctaagggcaagaattcaagttaaggaagttacagtcaatttttgtcactatgaacagtagacaacaaatacccagtaagacaatggttggtcaaaaccttgactgatgggagggtcagattagttttcaagttgaaaagattagttttcaagttaagaaagtaaagcttagaaaccagtaatgtgagagtcaaaatttctttgctgatagaggattctgtagtgtgccaggagaaatcctttcaacatttataatgtgagtgttcaaaatccatgggttcagaactgggtagagatagagaaggtataagagagaaggttgaatgaggatcaagcctaaaagagagaagttggtttttatattacattccagatattaattagcttgcatgggacttacctttttcctacaagataattatagggaattaacctagtagtctagttcatttggttcagattaactgagaatttatgatgtgcttaaagaaatacggtattcaaagagagtgttgtgtatagaggaaaagtttgagatttgaatagctaattggaagatgggtgatacctactttggaagactccttggaggttgcatttcttgatttaagatttaatgagataggcaacagaaaaggtgccattccttgagagtcctaatacagatgtctctaaatgtggggctgggagcctgctgaacatcacgaagaggaccctactggagactcaatgccggagacactgtgctccactctccccaggtggtgattctgtgccccttcactggtatccagcagaccttcccttgtagcaactggctggatgagaagaaagcggatgggttgattgagaggcagctctatgagatggtgtctctcaggaagaagcggctgaaaagtaagtgagagagacccagaacctggaggcctctcagccagggtcagcagaggccagaatgtcagaccactaggcaaaagctatgagggcagtccactcctgcttctcaagtctcctccagaaaggaaggaaaaagctcccccaaccccgccaagcagctccactctccaaagtacaggccatatagagtcacacccctggcaccaaggctgactccagtgtcaccaaatggaataagctgctgtgatgggctaggtgttaacctgaatcgttcactacagtgcactctgaaagtactggacatagggtgggtggagtcaactcgttccccgatttaaaacatacgaatacactttagccattaaaaagaacattatagcaccttatttttaatagtaaggaatccttagctttctaaatttggctataatgggtttctgagagtgggacacacctgtgtataccccgcccttcagtcctgatcattttggatttttccttcttccccatggtaatatgaaaatctcttcacttcctgaagtttatggtgcaacttgatctgtcttacagaattcccttggtccctgtgggtctggacaaccgacctaaagaaagctggtaccaactctcccatcttcatccagatttatgggcagaaggggcggacagatgagattctcctgaatcccaacaacaagtggttcaaacccggcataatcgagaagtttagggtaggagaggattgtgatggatgggagggagaaaggaggaagggatgtagggcattcgtcctggggattctggttctctaagccaggttttggaccaagtttgaagacaaaaatgtacgatggagattttaggtccctgcaaagggagacaaatttgatgatttgtaagcaatgtattgaatggggtacaatttctatctggcccattcatctgaatcaaacagtccagaaccaaggctgggcaaagaagttagtatggaatggcttaaactatccaggagttggggaatcattgcagaacagagaccctgagaacacttagtgtcagactgcccaatatggactgatttagagagtaaggatcaaatttaatcaaaagtatgaattttagaactttttttaaaattcagctttaaaactttccattatgcataaaactagagcaaagattttttcccccaatggaagtgctatttcaacctttaggtaggaataatttgtaatttgaggctctcctctcagcaccccattggtacctctgttacaccactcagttcattgctctttatatatttatcttttctgctagactatgagcccctagagaaagggcatgactgcttgttgatctttttgtctgtttcactgcccagtagagtcctggggctgtgggcctgtgctaatttgcagggctgccctatagattttgttactggaagtttattgcttggaggatcttctttagtctgaatcccactgtggggccgttatttttgttcagtttcaccggcccagactgaacccttgccctctgtggctgtcttgccctcacgtgctcctggttacaagggtcatgagaagataaaatatgtgagggtggcttgattgaagcaaacccatcctcactgctgaagaaagagcccaaagcaggtaccctcctgagagtgggtcagctatgagaataaacacatttcttcagttatgcccactcaaatgtttttatttctcaccatagattgagctcccggatcttggcaggttttataagattcgagtatggcatgataaaaggagttctggttctggatggcatttagaaagggtgagatgcaccatcttggggtttgggaggttgttgggaaaggaacaaggatggtcccttttcaatgaccctgtcacataaatttgcctctgtatttattgtgaatagggactgaaaagggttatggtgagacctgaatttggatacaggccacagggacttcctaatggggagagacttccgaagtagattaagaaaacgctcaggtgtttggggggcttgcattctgccctagtcatctggttgctaggcaagtgtgggtatccaggaaaccaggaacaaatactaatccggccctctgcctgccataaggattatctccaggaaatagccttggcttctctgcaatgagatagcagaatggggactgcagggcatcggtgaacatccctggtgcaccaacttgctcaccccagaacttcattccagatgaccctgatgaacactctgaacaaagacaagtacaacttcaattgcaaccgctggctggatgccaatgaggatgacaatgagatagtgagggaaatgactgcagaaggcccaacagtgcgcaggatcatgggcagtaagtactgacaggctctccatcctgggaggcagtggaactcctgcttggtgtcccgatgggcctgayctatgagctgagagtcttgtctgctttgcatcttcaggccccttagagtgccagagtggatttggaaggtccctgcctcaagactggcttggaaaagccatctccaagtcatgatgccggagctctaccatgattggtgtggtggggagggagggaagatgtatgggtcttcaggttggctctgaggggatgagaagcatctgccctgagcaatagttctccagagcctccttgaaaggaaatatcctcttgctcccctcaaattgtgcatgaaatgttccccaaaagaaaagctagatctgggatcctgtagccccagttggctgctacctaataagtattctatctctaattaaggatagyaggagaaggactaagctttaaatgtggaatccaggagccacattcaaatagccaaagggaagaagtcattttgcctctaggttatagaagcacggtactggtaaatacagagcacatgccctgtccttttcacatggcagacattactaagtgatcaaaacattctctcccatgagtctgaaatgagctttgtagccctcaataaagaattccaaacagacattaacaattgatcagaaatggcacttaagataacccatttgctatccttgtggcagtccttaaattttaagcaggaaaatagtattgcaacattacaaaaaggtaaaaatatataaaaacaatgtcacccatagttccagtagcccttctaaatatctccgtaatctcatttcacaggtgattgtgtgatatttataaacactgcatttgcacacccagtagaagttctgtatatatttgttgaaacagtttgatcagagttaaatactcataaacatagaaacctcaaacagcaagtatctaaaaagagatcattctgttagtttaattaggcaatgcttgtaattagcatcatgtttcttttattttatggttcttcttcattcttaagaagaatgaagaatatttgtgtagaatatttgtgtgcaaaggcccttaaaatagcctgatgcagataaggagctgaggacgttcttgccatggttacacagttagttagagacagagttaaatctagaataaggtctcttgcttcctggttcagtggctataccaaatcatcaccctgcctttttgcattcggtaatarctgccttgggaacaaggcaatcatctatctaaatatgataacatataacccattcccaaaattgggacttaatataatattaaaggtaatggcaaaaattgcaattacttttgcactaacctgatatgtagtccaccaaggcagaaatacacctgttcttacctgatctgtccactttgtgygccagaattgagcctgcaggtataaagaactggggagaagtcttgggccgtaactgcttttgaaacccttttaactaactctcacrattttagattctcggtctctatttctacattatctggayggtcactcttgagccttttggtaggattccttcttgaattttgtgactgacagctctgatsaatcctttccggtctgctaagtcagcgattctcaaacctcagcatgcattatccccaggagggcttgttaaaacacrgattcctgggctccacttgcagagtttctaattcagttagtctggaatgggactcaaggatctgcttgcctaacaaatttacaggtaatatctatgctgctgttggggaaccacactttgagaaccactgtgttaatgcatttgccacttttctagctgctctccagcttccaaaattgtgttgttctctaaacttgtcgccttcccctagtcttgttggtgaaaacttttttgtttagttaaatttttaaagyaacctgtagattgccattttgataaggttttctagagagaaatctattttaatttgtaatgtccagaatgttctttacttccaccccctctttgccttgagtgaagcatgactttcccctaagaaccttattttccctcctcatcaactgaggagggattaggccccaaccatatgacctccttttactttactcctttaaaggccckgtctacaaatacattctgagttattggggagttaggacttcagtatataaatttgggggtatgggcacaattcagcttataacagacaacatctcctaaagtacggtcaagggcccatctatatcaaaactacctgaagtgtttattgaaatacagattcctaggcccaccaccagctatgctgattagagtctttgagggctattcctggtaatatgcattttgtcaagcatgccaagtaatttgtatgcatactaagccttaagagcctttgtctacttctttcagtgtccactcacctgcatcctggtgctcacctgtgatgggtactacaggactgaacgaagggggacggacaagaaatgaaaacaaaagaatctgttttaaagaaggggccagggggctccttgcttctgtcaagcaagggccttgacctttcacagcccttcgtatttattgggtagaaagagcagggaggaggaggtaacaattggtcagctgatggattgatcacaggttcgcattattgctaacaggcttcagatgtacctaatcacaagaaacactgctcctggggcgtgactgccctcagcattccttcygggtagcagacacactttgtcagtttgccaacaacctgcattcatgagaacagtttgctgtttcctcatatagcctccagtggtatactgagttgatcacgaccctcattctttcagcctccaacactcacccactttgttggtccatgcccaccccacttagccagcccttccctgccacttaatttgggatcatcccrtgaagctgccccttctttgaacccatgcccaaccctctgactcaagcccctgccctcccagcactgttgtgaccttggtacacttcacctcacccttgacctcctgtcacttcttcctccccacatttttcctggtctgtcaggggctgacgtggatgggtggaggatggaacggagagacaaacctacaatcagacctccagtggrgaggaaaagaggttctgaaatcggacagagagaggacaccagagaggagaagataaatttaagaaatattttgaaggtggaactggcaggtcttgaagtgtgaatgctgtggaaacacagtggtgagataagcttcctgtccagaaagttgggacaaattttgcagatgaagtgacatttgagctaggtcttctatgtggagggatttgacagacaaggagagaccatgtcaggaggtggaggagatggcaaggaagagcatctctacaggttacatgtataaartgtgctcgyacacatttttaacagtgtacaattgtggggctatcctagctggtgtttttttgttgtcttctgtgatgctattaaaaaatcatttcaaggagaaaaataattctggtgatagtatggatatggatagtatggattgaagggctgtctgttgtggctataaggcagtttgatgtcttccgggggtccctrgctatatttcagagcccaaacaaacttgaatttctttctctcaactgctctttatggcccacaaacatttatcttatgcttggaacacccctatgtcctcactcacctctacaagtactcatatctccttttctggttggaatgttttctaacaataaatagagctggtgacaatgcttcgttttcccagctggtaccagtgtgaaatgtataatgtgtaaagacgtcctggaaatcccttaagaggagagtcttagactcacgtaaaatgagtaaataccaatttaaaataatttctctgagtttgaagttgtgtgtctctggtttacttacaaattaagggccagccaaataagcaattaatgccatgtctgagagccaagaggcttttgggagtgattgttctgattarcacagactgggagatatggacaatacacatgccagctcacaatttatttccaccttggctgtccctcaggagctacatgacagtaaaataaatgagatccgtgttctccactgtacttccaagagaagtgattacacaccactgatkagtgggcaagaggccactggactcaagtgcagaaaatcgtagcttctcgttaatcagagctgtaattttaaaattaaagtaaagaggctctgtacttacccatctctttaaagtctttcactactggtatctaacaatataactattttaaattgtccacagacttcttgccaggaaggagctcgggacatccatggctggggtgtttcagaggggctcctagagag[450 bp omitted]ggtttaagtgcctacctataccagctttgctcaaggcaggcctctatgtacaatcagtcgttctttgcctgttcttctaacaagtgcttttgccacagacactctatctttgtgtactcatatgtttcatggtcaaattattttttcagctgtctgcatatctccaaataaaatggtcatattactgaaaaaataatttgtacactgaattcaccttcttggtgatttgtctcattccaggtatactttgtcttcattttagatggactatcaatgaatcatgtccatttttaaaaacaacagctatggcgggacgcagtggctcatgcctgtaatcctagcactttgggagtccaagatgggtggatcatctgaggtcaggagttcgagaccagcttggcctacatggtgaaaccccatctctactaaaaatacaaaaaaattagccaggcatggtcgcaggtacctgtaatcccagttactcgggaggctgaggcaagagaattgcttgaacccaggaggcggagattgcagtgagcggagatcgcgccattgcactccagcctgggcaacaagaacaaaattccttctcagaaacaaacaaacaaaacaaacaaaaaaaacaacagctatattaagatatgattcatgtgccatacaatttacccatttaaagtgtacaagtcaatggcttttagtatattaataaaatcgtgcatccatcaccactatcaaattccagaacaytttcatctcccccaaaaagaaaacccatacccgttagcagtcattcccatttccccactttacccctctgcctctgacaaccactaatctactttttgtctccacagattggcctaatctggatatttcatatatagagtcatacaatatgtgacctttttaaatttagtttatttcaattaacataatgttttcaagattcatccatattgtagcattatcagtactccgttctttttattgctgaataatatagtccattgtatcgatgtaccaaattcaactgttaaagagcatttatgtwgtttctactttttggttatgtaaataatgctgccataaacatccatgtacaagtttttatgcagacatattttcagttctcttgagcatatacctaagagtgaatttgctgggtcatttggtagctctttggttcactttttgagaaactgccaaactatcaaaatagctgtaccattttaaattcttattagtaatgtgtgagagttccaatttttctacatccttgtcaacacttgttcttctccttgattattcattctcagggttgttttggctattctgggtcccttgcagttctatatgaattttagaatcagcttrtcaatttctacaaataagtcagctgagttctgttaggggctacattgaatctatagaccagtttggggagtattgccatcttaataatgttaggtcttccaattcatgaacatgagatgtttttccatttatttagatctctattttctttcaaaaatattttgtggtttccagagtgtatgtttttcacttgttttcttaaatttacttctaaatattttattctttttgatgctgttgcaaatagaactgttgtcttaatttcactttcagactattcattgcaaaagaatagaaatatartckattttggtatattgatcttgtactctacaactttgctgaagtcatttattctaatagttttttagtgaattccttatgattttataaatacatagttatgtcacccatgaataagatayttcttcctttccaatttagatctttttatatatttgcttgcctacttgccttggctgaaatctccagcaccacattgaatacaagagatgactcgtttctgatcttaaggggaaagtgtcctgtccagtctttcatgattaactatgatgttagctgtgggtgttttatagctaacgtttatgggttgatgaatttccttttcattcctagtttgttgatgggtttttttaatcatgaaagggtgttagattttgtcaaatgctttttctacatttattgagataataatgtgatttttgctttttattctattaatttgataaattacattaattgattttcagcagttaagccaatttgtatctctgggataaatcctacattgtcatgatgtataattcttttgatatgtcrctggattctttttgtgaatattttgttgaagatttttgcatccatattcataagagatattggtctgtagttttcttatgaygtctttgtcagttttggtaccaggrtaatgctggcctcagaaaatgagttgggaaatgttccctcctcttctatttttggaagagttggagaagtattagtattatttcttctctgagtgtttgatagaattcagtaataaaaacatctgggcataggcttttctttctggctaggttttttttaaattactaattcatcttttcacttaaaagatttggaattttatttttaatggacatattgtaattgtatgtatttatggagtacaatttaacattttgagacaaatwtatgttgtatcatgatccaatcagtgttgttagcctatccatcacctcatgcatttatcatttctttatggtgagaatgttcaaaagcatttcttctagctattttgtgatatacaagtctttattgttaactatagwcattatactgtataatagaacatcagaacttattcctctcatttaattgtaactttgtacccattgatcaacttctccccatcctctcctcccccctcctttccccagtctcttgtaactactcttgtaaaaatattattcaattccctgcctctatgacatcgacttatctctctctctcttttttttaaaatattccacatgggtgaaatcactggtattggtctttctgcgtctggcttatttcacttaacctgatgttctccaggttcatctatgttgttgcaagtgacaggattttattcctttttttgtggctgaatcgtattgcattgtgtatgtataccatattttctttatccgttcatccattgttggacacttaggttgattctatatcttggctattgtaagtagtgatgatgcaataaacatgagagtacarawatcttgtcaacatacygttttcatttttttttttgatatatacccagtaatgggattattggatcatgtggttcttctatttttaacttttttgaggaatctccatactgtttttcataatggccatactagtttgcactcttacccatagtgtgcaagtgttcccttttctctgcatccttgccaacacttcttttgtttttttgatgatggccattctaactagagcaagatggtatatttcactatggtttcgatttgcatttccctgatgattagtgatgttgaactttttttttcatctgtctgttaaaccatttgtatgtcttcttttgagaaatgtctgttaaggtctttagccaatttcttaatcgagttattagtttgcttgtttgtttttgctgttgagtcatttaattttcttatatattctaaatattaaccccttgtcagatgtataatttgcaaatattttcttttattatgtatgttgtatcttcattctgctaatagttgtctttgctgtgcaaaagtttttgtttgggcaaaagtttgacgtaatattatttgtctatttttgctttttctgcctatgcttttgaagtcttaaagaattcttgcccagcctaaagttgtgaagaatttcctctgttttcttctagcagtttaatcaatcttttcactttttatatgtctatttagattgtctattttttcttgagccagttttatgggtaatctttttattttcaccctttttgtgactttgaatagaaaaatgtgtattttgttgatagaagatagttagatccattatccattttgccaatctctgtgtaacagagtctgattccgttttgatgtttgactactggcaggttttaaactacactactcctgtcttcctttttgcctcatttataggccagctgataagaaagccttccttaacactggtggaaagtttaagccatacaagccctgatcattcawaggaaccaccacctcagtctcactccctaaccaccataaaatcctaatctccctgctgtcccaagctattattggacctgctcaagagcctgccaagctctcccaagaactcctcattatgtaaataatagaatctggctcttaatgtatgtgtagtatcatcagccttgatagctgagyaaatttggggtgggtggattcaccctgtttctgcagaatggccaccacactccggcttttgatggaaatgtttagtctaattaaatttaatgtaatacatttaatgcaattactgatatgttcagattgacatttgccattttgctaactatattttgtatgtcatatcttttttgtttcttactacttatatgtcttatacatttttatattcttactgctttctttactgcttttatattttttacagagtaccatttttggtccctcattgtttttttaatcatatttttggggtgattttcttagtggttgcccagaaaattacaattaccatcttaatttaaaataatctagttcagattaatattaacaatttcagtagtatacaaaaactttgttccaatataggtttgttctcttccccttccttcatgctattattgtaatataaattgcatctttacatattataaactcactagtggtgcagctctatatttactgctttatgcagtaatatgagatatgagaagaaaagattcacaaacaaaaaatacttgcatattttctatgtatttacttatgtcattgctttttctggtactctttattctatctatcaggtgatttcaagttactgtttaatgtctaacatgaaggtttctttaatatttcttgacagatatgctagtgattaattcttgtagtattttatattctgggaataccctaatttcttcttaattcttgaaaggtagcttttgtggatttaaaattcttggttaatgatctgcacattgaatatatcatcccactgctttctggcctctatagtttctgatgagaagtcagctgttaattgtattgagcatcccttatatgtratgaataacttttgtgctactcctttcaagattctctcttcatctttggctctcaacagtttgactataatatgtctaggtgtagatctctttgaatttatcataayttggagtttgttgaacatgttgaatgtgtatattaatgcttttaaaatcaaatttgggaagttttgaccattatttgttcaaatattctttcagtccttgtctatatcttcaccatagggtatttcatttgatcccatggctttaaatggactccatatacctatgatgaccaaagtcatatcaccaatcctgaccctccagacacatattcagctgccatcttgacctcagttttgaacatctaatagacagctcaaatgaaccattgatttccatctccaaacctatccttcccccaagactcccctactccttattggcaactctatccatctaattgcccaagccaaaaacctgggagtcacctgcaacttctctcttttctgcagttacctatctgatccatcaccaagaactattttgtccaaaacagtacattttagacttagcatccaaactatattgctaatctgttgacttttctccacttctgttgcacctccagtcctaggcaccatcctctcttctagactactgtaattattctgctaactgacctctttgattctactccttctttctatataatcaattcttcatggcagccagagtgctctttaaaacatagaccagatcaagttacttccttgcttgaagccctccaatggctttccactgtacaaaaataaaaattaaaaataaaaaggaagccacacttcttaccttgacccgctacaccccatgtatccagctcctgtccacctccgagccttatctcatattccttcccattccttctactccagccatattggccttctctctgctcctggaacatacatcaggcatccacacacaggggcctttgcacttgccagaattatctaactttatagctcacacattacctctttgcagtcaccttttctgcatctctaaataatttatattccctcactccactccttaccactccaagatgtccctccactgtgttatcttagttacagatayaacaagaacattttcttattcataatttatgattttactttgcattgctcctctctacttttactcttaactctaatatcagaattcctgtactgttaatggtgcctggcacctactaggcttcagtaaaccgatttggggtgaataagtgagtgaatgggtacattttacttttcagcttaytttaagtgagaaggagggctgggcatgcagggatgcaggtctaccccctccacagtacattttcaacatgggaagaagttgctgcccttcccacagtgactgcatttcatgcctttctctstgcytactggcatgtccttatcagtgggagttctgaagagaagacacaattcttgttcatggagaaaagttatctttcttgagaacacatagaagttggagaacaacctaaggcaaaaggtttactgggatggatggaattgagggcaaacatgtttgggttagaccagtggtccccaagcactggccagctccatcagagtcccccaagaaagcttggaagcaattcacgtttagtagactgagctctggaaattcagagttgagaaacctgaagcagggctcaggaatctgaattcttataaaagtttcccagaggatactgataattgacaggattgggaacctctggtctgtctcatttgatcccatggatttaaatggaatccatatacctataatgaccaagggcctaggccaagagacttggggatgactcagctcttgattggtgtgtggtaggatttagatagttgggaggaagggggaaggtcagcccagatgagaactagaaggagaggaggaatcagagcttagaagtgggagcagcagggctagggatgggaagcagggggcggtcagcaatgatgtccctctctctgcctgccagtggcccggtaccatgtgactgtgtgcacaggtgaacttgaaggtgctgggaccgatgccaacgtctatctctgcctttttggtgatgygggggacacgggggaacggctgctctacaactgcaggaataacacagacctgtttgaaaagggcaatgtaagttacagcaatgtgccccactcatccccttcctcccagttcccttcccatgttccctcgtcttccctgccctgttaaagttgagctgatgctggtcctggggcctcagccatcaggagcctcactctgggtaagggggcggggaactggggaatcccagcagagccactgggagggcacagcaatgcctagtgtatttggttcctgagtatctggcccrccctgattcactaatatgcatggacacctgttggactcctgggactgtacagcagggagttgaagagccaccttagagggattatggttctcccccacccctgagctttgagaagagagcagaacagaaggacactgggaagcagcagcagcatctttcttacctcaggggtgggcggagagggaaagatgccgggcactgtggactagaggacctgggctggagaaagctgggcccccaggggccaatgtgggaacttggcattctcccctatggcmtgaccattgcaggcatcttgttcatgacctttaggaaagagaaatcaagaaagaccctaaagatggggtgggagaacttgcttctgttgctagcctcattacagttgtgttgggtgttccccctgtttccccagccatcacatgggtgttctggggaggaggctgtggaagcagtggggaaagagctaggcaagtttgaggcaaacccagccttgggctacctgcttcattctcctgagcctcagtttcctcatgcctgaaatggggaaaggatgcctacctgtggtgggctgttgtgagcattaggggcagtggatgtaccgtctctgaggtcagatctggcccacagcacacagtggatgctgagtacagagtcgttgttgcagtgaagtgaggccaagggagctcagcagggtgaaggggatttgcagacaactgctctatctccttcctctgccacsacttccttggtgaggtcagggaaagccctggaattccagtgaaggcctctctctgaggccaatccaggctggctcgattcttgggatcatggccatttgaaggctgcagtggcaaaaaataatctgagcaggatgttgtgggtggactcaggttcatttgaggagaggaggtagcgatgcctttacttcacatagctttttaaatttcctctctccttcccacccacccacctttctctccagccttccctactctttactcctacatcttctgacgcctttgtccatcaatcccaccttcagtgtttctgtccctgaaggctcccaggtgtgctcatgtacacttggaaactctgttgcccctactgttatgctgcctcagtggtgagcaaaactatacaattagcaaggctacttagtccccgtaatcaattctaatcatttccctccttggaaggggcccagtatccctctagagcaaggagccagaggagatttgccaaggaattagctcatgataaatgattggtgactgacaacagcttaacttgtttattttcccagaggaagctgccttttgaaaggagagctggaaacttgacattggatgatattccagtggaagaaattgggggtgggtgtgagctgtgctttataggtagctcctgtcccatgtgtgaaagaggagttgcctaacccatcagctctggattttctgatatctgagcttatgtcttcccttggtgtttgggtcctggggtagccactgtctaactggccttgtggtttccccccacaaggctgacgagttcactatcgagtytgtcaccatgcggaatgtgaggcgggtgaggatcagacacgatkgcaaaggctccggcagckgctggtacctggacagagtgctggtgagagaggaggggcagcctgagagcgacaacgtggagttcccatgtctcaggtacatgcgtcctgcctgctggtgttttctccagcttaggttatgatccctgtgttttgggaagacccagccctactaccatgaccagcaagcaaaacagtggcttaaggctatagctggtgcaagaaagaggtgacctcgctggtggtgcttagacctgagcmtcacattcccttctcamcccctaccaccgtgatgaacaccactgtggtgtgttccggtgtgctgctagtttcctctatttaagcamcaaaatgtgggtgcttgttcatgataaaatttggcaattcctgaatttaggtgaaagttagttcagagagttagttgcagattgaattaaacttttaaatcaaaagkttttttttaatttaaataactttctgaccatacctcttccctgttaacttcttttcaaggtatcttaccttgttttcctttctgcaatttattcatgagataaagtttcctttctctttttgcttaagcatttgggctcccattgacttaaagaagtccctgatagagagattttagaatgagcaataccagtgtttttcatgtcatcatggtggctctccacattttatgtggcaatgtctggaggattcacactgtatgattgacttggggccttggactgacccggctctgcaaatctcagttccaaggctgagttctgtatgtagagatgagttgctatgtgtccactttattagggctggtccagggctcctcaagggtagctacactgaggacagccctcctttgagtggatgagggtgagttgcacagctgcccagtaatgagtgtgttgctcttcctcttaccatgaacgcagatgtactcacatgcatgcctgtgcctacaggcgcacacacacaggcacacatctgctgcagctgaattacttascaccccaccaacccaggcccagtagtttcccagccacggagggscactgggagggctccataggtcaatgattgtgaaacagattttgtcaatgacaaagagctctacagtcttctacatatagcactgtttgtattacaaggaattacattgaaaaggtaagtaataatgcaggcagctccaagtgagtggcactaacagagggcaggccaggcaggcttccaggaagagatggaagtgcacctgggcctggaagggaggtcagagagtggacagagggagaggaaaagggagggtgggccacctaggctgaagaaatggcatgaggcatgagcaaggggctgaggggtggctcatccagaggttggcaaggggcgcctggcatgtggggaaggagtgagaaggctggggtgggagagggtggagtgtgaaccctcattctcytaagccacgggggaagcggggtgtgggggaagagtacagcctcgcttcaagtcattactggcgttttcacccccatcctggatcagaggctgactggctggatgccagatggaagagcttgcattgttttattcctatctactcaaaatatatttatacctactatatacttactccctgtcctcatggagtttatagtctagagggaaactagactaaaagcaagtgaataaagccagaatgacacactgtgaagagtggcgtggaggaaacacacaacggtgcaggggctggagccggggctagaaatgggaaaggcctgcctgcagagggatgttgaggctggcctcctgtggaatgaagaggagagcaccaggggaaaggactggagtgttctggagtccagcaagacaggcaggtagatggaggccactgtccggcagggcgagggagactcttgcatgcgaggaaggcctgtctggcctctggggataggacagggcccagggaggaggggagagcagtaggagattttggggagttgatgacggcatgtgttcatgttccagggctgtaacaaagtgcacagactgggtggcttaaatgacagaaacataatgtctcacagtttcggaggccagaagtccaaaatcaaggtgtcagccaggctgcacccctcagaaggcgctagggaaggatctgacccgggcctatgtcctcaccccagcagcctccagagttcactggcttgtgattggccaccttctctctgcgcctcctcacagcatcttcctctatatatatctgtgtccaaattttcccttttcataaggataccagtcagattagatgaggggtcaccctaatgaccttattttaatttggttacatttgcaatgaccctatttccaaataaggtcacattctgaggtaccggaggttaggacttaaatgtatgaatggggtggggtggggggacacaattcagttcaccacatagcagcttggcccttagtggtggcagtgaaggtggtgagacggggcttattgtacaccagagaggaccctggagggacagttcatgggccttgcccataagagacagagaaagggccagaactgaaagccccaggcttttgcctttgataggtgggttgaaggtcatgccctttactgaaatggggatcctggggagggagagctgaggggtggggacgaggttggactctggaggtctagttgggatgtgtttggttttcaatgcagagttaggccttgagaaatgaattcagagaataagagcatagagctagaatttaaagccagggaactgcaggggatcctttagggagagtgtggataaagaaaacagtgagggccgagccctggggcaggccaggagaasgagcctggaaaggggaagargaasaagttggtgtgtgcacactgcattgtcacatgcatggtgctgggggagctgggaaccasaagtctagccgtccacctgctgtgtgactttgacccaatcccttgtctggtcttctgcaccttcctggccagcatgtgtcttatggtgaggttgagggtattgtactttgaaaggagcccattaaagacacagtggtgctgatgatgctgatggctgggcggaagagaagcggaggcctcaaacactccagagtcctccctgcccccaaacacttaacagtgcatgcatttttttttttttttttttaraaaatgggttcttatgtcttgctgacacatgtagtgatggcatttgccaactcaggacccaggrgacttggaaaaatcaggaactggagcctgagcatgcacactgcttctttcttcacctgagctgttattttaactctgttggagaggaggacaaaccaggtctatttatcagaatttctgmtaggatcaggtgtgtgtgtgtgtgtgtgtgtgtgtgtgtgtatgtgtacacactctctgtcttgtgagctcagagaaagagtaataaaatctcttcttgactgactttccttttagcaacatctctttctgaaactgggnnnnnnnnnnnnnnnnnnnnggagaatgaagggagcacaggtaagattttcagatggccgagggcttgctgactctccacacttcactgccctgtgaatgcgttgcccaggcctacttctcaaccttctcctctgcagtctccatgccagggtgacctcagctggacagatggagtgggaggctgttaacgggttgatttcagggactccagcagccctgagttcccaaatccccctgtcattaatgcctaggatttcaccattgcatgctcatgtcttggagtctccaatggttttcttatgttctagattcacagcaccaaagcccttgggaaaaataacagcctagttgtcgtctaacattttagtgttagctaatagccaactgagagcaaggtctcatgggaatgtcagatcttgtgttttgggaaggaggatgtaagagaaggtttgggagagaccacagcattgcctccgtcagccttggggagaggggtggtctattagcagagagtattgcagtttggggatgcctgaactccatgccagggaggctatggaggaattagtgtcttggcttcttttacaggctctgtagccagggagttgcctccctctcagtagggtaatggagtgggctgcaacaaccagtaccaagacatagacaaatgggaggtggtttggttgagagacaaatgtcttgttttcctcagtatcctggggaacaatgaacggtwtytattctgctgccatgggccccgtcataaaccatcctgagtgctggggcttagaaaactcatgcttgcatgattgatttctcaggctgagtctccgtgcccagtgtgataggtgcttttcaggtaaattgccccatacctttccgcctggtggatgaccagccgagagctgggaccgtggctcactccaacatgttgaagagtcacagctatcaaaccgcagccctgcagagcacagccccagcttytcctggaaggcaattytcatttatctytgaggactcagatcactgagcccttytcatttccctcaactcttgcagcacttactctggtccaatacctatyctggtcttggtcctcagtgcctcagctggtctatcctgtctttttttttttttttttttttttttgagacggagtctcaccctgtcgcccaggctggagtgcagtggcgcaatctctgctcactgcaagctccgcctcctgggttcacacaattctcctgcctcagcctcccgagtagctgggactacaggcgcccaccaccacacctggctaatttttttgtttttcagtagagacggggtttcactgtgttagccaggatggtcttcatctcctgacctcgtgatccacccgcctggcctatcctgtcttcttaagcaggctgccgacagcctgggctgggccttacgtatcctagcatatgttctctgccatctccccaccccagagccctcagcacagtgccatgaggatggaaagctcttagaaaaagaggtgcttgttttctatgctaatgatggctttcaggacagacttttgacagtgattgccaaggccctatatcatgtgacctgtcccctctccagcttcctctgccagctctctacctgttgttcactgcatcccatccacatggtcctgtttcaactcctgcgggctctgttccatcccaggatatgttgcttcctctgggatactcttcctttttctcctggtctccttcccaagaccatgtgacatcatcctacccattccccaaggagttccctgccctccttccaatctcagccaaacaccactgcctccgggaagtcctcctttcccactccaggctaggatgttttgctagatgctcccatagaatcatttcactttgctaaagtcaaagctctgggcctccatagtgactctgcatgaatgggtgaagctttgattgtctgcctgctccacccaaagagctaacattcccccatttgcccaccaggtggttggacaaggataaggatgatgggcagctggtccgagagttgctacccagtgrcagcagcgcgacactgaagagtgagttgtcctgatgaccaggtgctgggtgtgcccttggtgagacaggggccttccctcagctaagcccttcaagaaaacacgagcacttcatgtttcacagaggtggcagtggggagggaggagagggaggctccgagggagtgtctggagrgttcctgcctgtgctcctgcacacagtctctttgtggcctcargtgtgaggccctgaatgcatatgggtcaacgagagtgatgagcagtaatgctggccaatggtgccaagcattggcagtacctgtcattcaggccttaagaagagaaatattttgaagggactgtaaaatagggactttaaaaatgccaagtatcatcttggaggccttagagttttccttactggtgacatttcttccattgctttggtttgatcatgagctttagacaaaattaaaagaaacttatctctagaatccttgacattaccaacacctcatgtttgtcatttattatctcatttgagctctgcaataatcccagaagatggtcagggttgatgttgtccatgggtcagatggagaaacttagaaccggaagagctgaagatatttttatttttgkttatttgtttatttttgaaacagggtcttactctgtcaacgaggctggagtgcagtggtgtgattttggctcattgcagcctcagcctcctaggctcaggtgatcctcctgtctcascctcctgagtagctagggcaataggtgtacatcaccacacctggctaatttttatattttttttctacagatggggtctctttatgttgtccaggctggtctcaaactcctgggttcaaatgatccacccaccttggccacccaaagtgctgggattagaggcatgagccacggcacccggcagctaaagatatttgtatctgacctcttctaaggtcagactgctgactttgaactagagtgtcccatttctggtctcagaattacagaatttaagawctgggaaggatcccaggagataagatgcctgtggcaaaaggacccctattccccctccacaaccccagcaaacccagttgtgtagtcagtgatggggctgggaccagtacccagggtatctctgtctatgtcactgtccttcccagtccagcaagcccctatttcaccatgtggacaggacctcctgaccccctgcttcctcagtcagagcgtctgaaagcgtttagatcaagcttgtccaacccacagcccgcacgcatgtggcccacracggctttgaatgtggcccaacacaaatttgtaaactttcttaaaacataaaacttttttgcaatttttttaactcatcagctatcatttgtattagtgtattttttgtgtggcccaagacaattcttcttcttccagtgtggcccagggaaaccaaaagattgaacacccctggttgagatggaaaatagtacaagaaagaggtctccttcccagtctctgctrctacatctttcagcaagaatagaggccatttcctcaagtgcccttgggtggcactaatggagctgatctggagcagacctgcaggtctggccttctccagggctggtccctaggcaaggtgtgctcagctgactttctccaaatccttctgcctagtgggaggaccctacggtgtcagtgagtggcaggcctgggagtgagcatcactcacctttccagtgcttcctcctctttgcccaagacacacacccaggaacaagcctggaggacttggggtcttgccttgtattattccaggactcaccttttcctcgggtgtttttgtccctgaagaccgataatgcagacattcctggctgataaaatggagtgacaccctcgtggtggcccagtgaagagcagggggtttcaagtccacatgagagtttcactcctggcgacctcttaactgttgccatcttgcaccaaacacatgacattctgaggctcagattccttgcctgtgaaactggggtcagaatccttagcaataataccatgtgtataatgctctagacactgtctggaaaggttgatccttcctttgtctcagtttccttgtccactgtcagagaagctagaccagatgattgtgggaratcctttcaggctcttatgttttgatgttcttgcttgtgatttacacgctttcctgctctaagcccattcacaccttctggagcagacagagaacctactagaattctgccattacagttgaggagacctcacagagatggaaggaacccctgccccaagttgcagggctgsttagaacaggagcctggattttcaattcccagcgtgtgttccccrcaaacctccagctccaggctgccctcctatacacgcaccctgcttcctgtcaccccctgcactaaccccttcccttcctccctctgccttgggctgttcagactttcgctatcacatcagcttgaagactgggkatgtctctggggccagcacggattctagagtctacatcaagctctatggggataaatctgacaccatcaagcaagttcttcttgtctctgacaayaacctcaaagactactttgaacgtggccgggtggatgagttcaccctcgagaccctgaacattggaaatgtaagtctccttcccaagaccatgtgacatcatcccacccatttccgaacacacattcacacgtgtccacacacacatatgtccacacacagacacacacgcacacactcatgtacataagggtaaacacattttgaagagaaaaagcmcacttgggaatagtgagtgaggtgtgtagttttttagctgtgacctagagcagctgaagatatgtaaacagtagtgatgcttccagagcctctttggggctggaatgtgtatttttagtggcattgcctcaacattttatttacctacatatccaagaccaatgtacctgggtcacagacactggagaaggagmctgaacgcagggaaggaaaagagaagggaggactaagaaaaggggctaaaaatacttcccaatttcaaacttgagtgtgcatcagaattggggccaggaagcttgtttcagtgcacacttctgggccacacctgagagattctgtcttgggagatggaacccaagagcctccagatcaaggctccaggtgactctgctgcaagtggtctaagcacttcatcaaagagaaagctgaacagtaaagcagcaaagacagactttaatcagtaatctaccactgccatcaggaaaagaggccagtgtgaactgaacccaacttaggtttgtgcagaggtttgcaaacctctttaaagggaggatgagggaataaggggagggtaatcaagggctcagtagagtcaggggraaaacatgaaaagcagtaatggggaggtcagcacatgtgggttgtggaacccatctgggtttgctaactgatgctttatggcatgagggtcttatccttcaagagtctggcagacagaagccctaccctcaggtgttggctggaaccaacagtaaattattttgacagccttgagttttctaaggcaagcacagtaagggggattagggtcactctagggatgtggccttgagctgttagaaactgtgttagtgttttgttcaagtctttataggccaagattgaggctgagaaagggttcaggagcctggctagagtttggccaaggtgagaatcttccttgacatcacctggagaaacacagttctaaatcttggacktgaggattggggatgtctctagaaatgcctgagctgggatttttgttastacctgctgctcccagggtgtggcttggtggaaatggagatggtaacaagccctctacctggaacctcatctttcctgccccttccctctctgggagtcccaccctatttcaggtcctaggaatctcttctcccatcaaaactcactccagggaaagatctcatgttagtcatttataccttgaggttaatgaacttaaatcaatgttttcatttatcaagatgtatttacattttaagctgaatcaataattgcagagtgaaaatgctgttccctttactaaaggattttgggcagcagctggcgggtaagttagacctctaggaagagtagggtggcagtgggagggcatttaagcttcttcctgagtttccgaaaccccctcaacaagcagcatggccaagaggctgggagcatgggctctggctgccaaccgcatatttgagacccatttccacttacctgccatatgtaagttatttaacctctgtttgcctccgttttctcattcataacaacatgagatactaatggggttgctattagtattaaatatgtgaataacacccacatgctcatactaagtgctgagtaaatgctactgaacaattagtctatgtcaggtgtgaagtgttgtagaactgagctagtgtctgcccttagggagcatccagtcatatcagacacttacctctgtctttaccctttcagccaatccctccctgggactttcatagtcctggcaccacagaagaacaacaaaactcttcyctgtcccttgacatgcacacagagggctctcaggctttgtaagcttagctggttttcttctgataattccaggggactgggctgcatgcacttagctctgacgttgttgccattaccagctgcaaagaggcacttaggactcagaagagcaagagcaggctcgcatggacagttttctaaatctggccttttggcaccagactcatggctaacatcacctcttcaaaccattgcagagagaatctcagggctggaagggttctcaaaggccatctgataattccatctgatgttaaaattgctctgtatacagcatttcaaaaagaaaaaacataaaagcaatccaaacattgaaaaaccaagtacatataaggatggtgatatgatcatctgcactcccctctatgttgcccatgggggcaaagatgttaaaatgcaaaatcgcaaagcaattatagagtgttattggaaaaagaaaagtgttccttgggtccaagagtgagcagaggaattggacacagaaccgcagagtcctgagaggttgcctgcatagtctgtcaccttcaggatgggtgatattctgtcaccttcaggatgggtatgttgaagaaatgcagaaatatatacaactgtgtattgttcaaaaccaaaccaaatcaataacacagttattggaaggtgatggcaaacattttaaacatttgctttctcacatggccatgacctaacatgattaagtactagtggagctttcaaattttgtgtcacctccactcccctcttgtttctcactatggccctgggaggtgtgctgggcttaggagaagggaatggtggctacaggcaggtgaggtgatgccctggtgccccagctggctgatggtggggcaggartgggattccagctttcccatggatcttccctctcctggggactggagacctgggttgtgttttgtgctggtgtttggggaggtagggatgggatcatggaggtttctacacactggctccttgctcaccctcactcgggtttccttcagatcaaccggctggtgattgggcatgacagcactggcatgcatgccagctggttcctgggcagcgttcagatccgtgtgccccgtcaaggcaagcagtacacctttcccgccaaccgctggctggayaagaaccaggctgacgggcgcctggaggtggagctgtatcccagcgaggtggtggagatccagaaatgtatggaggaggctgtggtgggaccacccattgtttcccatgggggatggggctgaggggaaggaggagggaccatggggcaaagcaggtcttgctgacaagtgctgctggtagggtcctgcagggagaaaatgggggctttcactgcttctggtactatggttcttgcaggaaagtagggctcattttatagatgaggaaactgaggacccaatggatgaaatacttttttgtggaataaaggcagcaaatgactttattaggaaatgcacactcaaccctgtataggagtttgagacctagttcatgtcttctgtgatgaagactggctgaggagacaaaactctttattcattcatttattcaaaaaaaaatacacagtcagccctccacatccatgggttgtgcatcggtggattcaatcgaggatcaaaaacatttggaaaaaaattacatctgtactgaacatatacagacttttttccttgtcattattccctaacagtacagtataacaactatttatatagcatttaccttgtattaggtattataagtaacctararatatttaaagtgtataggagratgtgtgtaggttatatacaaatactatgccattttatatgaggggcttgagcatcctcagattcgggtatgcttgggggttctggaacctgtccctgcagatactgaggaatgacggtctattgagggtttctctctgccagcactgctctgagctttgtggaggcagctgtgagcaaaacgaacaaaacccttgcgctcacaggctttatattccacaggggagacagacaataataggataatgcgaatgaacagccaagaggaacatgaaacaggataaagggttagcaatggtgtgggggaagggcctttttggatargatggtgacatttytgaggaggaagacagtgggaccaaagcctggcacagagaatgtcccttytcacctctgcatttttttttttgagacagagccttactctgttgcccaggctggagtgcagtggcacaatctcagctcactgcaacctcctcccgggttcaagcgattctcctgcctcagcctcctgagtagctgggactacaggtgtatgcccccacacccggctaatttttgtatttttagtagagatggggtttcaccatgttggccaggctggtctccaactcctgacccccagtgatccacccgccttgggctcccaaagtgctagcattatagacgtgagccactacgactggcctcacctctgcatttctacattggccctgaaagcaactgcccaaggctcacttccacagcagcttccctgagagggaaccccagtgtgaaatcacctctcccgctcccagaactctttgaatatcttttcgtgtgtgtgtctaatctgaagcaacctgcaagttcctttagggctgttatatacacacgctttgtaatggcacttgccagtataagaatcaactccttccctcattttataaatcaacactggaattccatcagagtagtatagatactaatcaagaagataaagataaagataaaaaagcaatagttcccttacctacctcttccccttaccccaaccccccttcttcaatgccaacaaccttactttagatttttcctctaaaatttagctccatatttttaaacaatatacctatcaatttttatttatttagtttttagagacaggatgttgctctggcacccaggctggagtgcagtgacacaatcataactcattgcagccttgactcccaggctcgagcgatccccctgcctcagcctcttgagtagctgggactacaggcacgtgccaccacacccctcaatttttatttttattttatttttgtagagatggggatcttgttgtgttgcccaggctgatcttgaactcctggcctcaagcaatccttctgcctcagtggatttacaaagcagtggaattacaggcctgaaccaccgtgcctggcctcaattttttaattttacagtcttagacgttatctattgacttcctactatgaaagaggatttagctcttttaacatacacaagcacttgtatgggccctcatgtgtgcgtgtgtgcgtgcacacacacacacacacacacacactctctctctccccctccttccagccttcaaaacatctaaatcagtgttcaatttttatattattatgtcaatattattcactgctgaatcacctgccttatgataattgcttttcgtcttttgtagagcttgttttttctggagtgagtctcctttttcgatggatcgctctctctgcgctcactgctctctgcattactgtgctagggctgcctcatcactgtggactcacctggtctctccacatccctggtgtctctccacatccctggtgtctctctgtgtgccacaatttccttttcttataaggacgccaatcagcttggattagggcctgcccttgggggtctcatttaaactagtcacctctttaaagactcttatctccagatacagttacattctgaggtattggggttagtggcttcaacataagcattttggggggcctaatcactccttaaaggtcccaccttttaatacggttacaatggcaatgacatttcagcatgagttttggagaggacaaacatgcaaactgtagcaggcaggcacacagcagggatcgccagctggtatgtgactcctcctccttcctggtgcgtgtggtgcagaggatgactggggtgtgtgtctgattgcttagatttggcatttccaccacttattctcctctaagcttcactttgtttacctgcaaaatgggaatgattgtgcttactcagggtgttgaggagaggattagataagtgaatgactgtaaagcgccaggcacctggaacaggctcaggaaaggtttgttttgttactatcattgttattgttattattactaaatgttccacttcttctgcacgtgcccacccagtggtccactatgaggttgagatttggacaggagatrtgggtggcgcaggcaccagtgcccgagtctacatgcagatctatggagagaaaggcaagacagaagtgctcttcctctccagccgctcaaaagtttttgaacgggcgtccaaggacacattccaggtatgtggggtcgaggagcgggggtgccaacagcaggctcagtggacaccaagatgcttccctgggtgtactaatttcctcagtcaatactcacccgagaatgggctgcctccctccagttgggtggaaaatgcttcctctctccagacctgagctttcggcctaaaatgaggggattggactagatcagtgattcccacccctggcctcatgttacagtcacctggggagctttaagaaaaaagtgctgcctggtgcacgccccataccaggcaaatcagaacctctggggatgggatatattttctgggtgtacgttgaaaagctcctccagggatactaacatgctgccgaccctgagaaccatgggagcaggtgattctaatcttgcaaaagatgacactaaggctgcagttcctccactcattcccagccctgtggcctctgagtctacagttctctcaagcctgatgtcaaggaaatgcttcccagccaagacactgagagacttggaattttatggctgtttcctgagtatcccaggtctccgttcttcctttccaagtctttcaatagaaggaaaaaagagataagaatgtgggcatggtgttggcaagagaggaggatgcaagggtggcgccccttaggagaaacatgaatgttttattatagatatgacaatgtgtgtgcatgtgcagatatatgtgtgcaggcagcatgttcatgctgggtgccttgtgtttctgcatgccaggagcaccttagccttcagcaaagagtccttacccggtgcccagggaagacagtcctggctgaactaggacctgggccagagtcataagtgtctggaacatcagagctggaaggagcctcattgagccagacaccctcatacactgctgaggaggcagaggaccaagtattttagctctctgagcctccacttcctcatcagttaaaacctagctttataatacctgcccggctggcttcacagtccctgtaatgatcaagagtcaatgtcagggaatgcacttgggatggagtgcccagttatggagatggaactggatagcgtgtcttctggatgccaatttactggatgtggtggtggatgaaggcacggctgggcagacagatgtgagggaggccagtggtgcagcaagctggcctccttggcaaggttgattgcaggggtgctgtaacctgggaaatgctgaagaggagagctaatgccgtgaagaagtgacttaccaggtccagagcctttctcctaagtagctgagaagtataaattccactctcccaggggccctgggctctaccatgactggtaattttctggcaaaggtggtttgttgactgcattgtggactcatgaacagggggtcagaaggcctgagttctcatctaggtctggacttgaattgtaggacactgtggaactcatgggacagccttggcctcagtttgccctggcactcagtgaaagaactggtgggacaggctttgagaaggatcaaaccccagacaggggctcatcagcatcaggaagcttgggaggactctgactagaaacaacccccatgtgagccctaccctgagtgctgcaggggacggaccagaccctaccttaatgtgggtccttcctcagagcctggggctcaggacagagctcaggtctcatgatctagagtcgatgatgccatcaacactgccctttgggccagttatgtgctatgcccatcctggtagagactgaaaatgatggtctccgcctttaaggaactcataatcaagagggcagagaccagcttgtgaggatgaagagggcatccaggccaaaccggcaccacagctaaaccctggaccccctctctgctcttggggaaggggcagtcaggctgaggccatgtgctcagggttgggggaggagggagcttgggcctctgtgggtgtgggtgaaatttttgttattgaaaaagagcacttttgttttttgcttattacgaaagttatatacggttaacactgaaaatttttgtaaagagaacacagaggcacaaagttaaaaaaagtgatgaaacacaggaacctgaatgaatagattttagctgcaagtagaggagggggataaaggcaggccaagtaaggaaactgtatgagccatgatagggacagaaatcataggaatgaggcgcrcgcgcgcgcgtgcgtgtgtgtgtgtatacgtgcaggcatatgtgtttaagagagaagagggagaccagcttgcccacacagaagttggaagaaataaactttgttggaggatggggccaggtaatcccaggggacccaggacaggtgtggccggagagagggaggtggtggaaggatctgagcacagaggccccagccctctccatcctgcagcttagcaaacaggccttgtgcctggctctttgttgggcgggggtgttgggggcgttggggaggacgytggggccacgacagccgctgccctgccctttgaacagcttgaggcggccgacgtgggcgaggtctataagctccggctcgggcacacgggcgagggctttgggcccagctggttcgtggacaccgtgtggctgcggcacctggtggtgcgggaggtggacctcacgccggaggaggaggcccggaagaagaaggagaaggacaagctgcggcagctgctcaagaaggagcggctgaaggccaagctgcagaggaagaagaagaagaggaagggcagcgacgaagaggacgagggggaggaagaggagtcgtcctcatcagaggagtcctcgtcagaggaggaggagatggaagaagaggaggaagaggaggagtttgggccggggatgcaggaggtgattgagcagcacaagttcgaagcccaccgctggctggcccggggcaaggaggacaacgaacttgtcgtggagttggtgccagctggcaagccgggtcctgagcgtaagtgggtcgtggggggkgggggtggggagggagtggccagacagttcccctaaagggggcccactgggggcagggggcctagatccccctcacgtggaggccaaataggtgggcacccatcatggttcccaaatagctctcttgacctgtgtgtgaaatgccaccattgacactgctgtttggggataagcatggcgcttgttctgaggttctcaggaagaattgatgactttgggaggagccctgatatgactcaatacaactgactgaggggkyatgaggtaggagggctgcctgctggcttcatggtaaaggagtcttgggttgggagtgtgggcagtttcagtcccaggttagtgtagatgcatctgaagatccctctgttctaggatctggctggatctgagaggctgtgcytcaggtccaaacaccccatgsccatgaggccctccacactgcatctttctgtgtctacaggaaacacctatgaggttcaggtggtcacggggaatgtgcccaaggccggcactgatgctaacgtctacctaaccatctacggcgaggagtatggagacacgggcgaacgacccctgaagaagtcagacaagtccaacaaatttgagcaggggcaggtagggtgagggtctctggcccctgggtgggggctgtgggtttggtgccctctgagattcccatggcagcccatcgcagcacaatggctgctgtgtttggcagtgtgacttgttcatcccaccaggtttcatggcagtacctcttcagtaacactgatactttgtggaggggttatgagagaattgcaggcagggccccagcacctagagcccatgggccagctgacccacaggaacaaacagagaatggcgttgagtggcagatgctgaggcacttggtagggatgcgggggttcaagaggaagtcctcgccgcaagatggtgtcttgggggaaaactagggggagggagcaacttaaactgggccttggcaggtgagtatggtgtagacatataaaggcaacagtggaagatgttctcagaagatggaaccacatgagcaaagatatggaggtggaaatgggggaggccagtttaggacagtgtgtcttccagctgagctgtggtcggtgctaasccccagtggataagcttggataagaacaatttagggtgtggggtgggtggggtcatgagaggcttaagagacaagctgagaagccagaactgtatcctaatgcagtgggaatccatgaaaagaaatacacatmccttactcttccaggtgtagtgggaaagtcatgaaaaataaagccgtcatctttgcccttcaagattttataatatcccctggctagaaaactatctcttatctcacccttcccattcctgcctctacccgaaagccaaattctctcattaacacagattttttaaaaatgaactaaattaattaacatatttctgggctcatttcttgatttatttcaggggccccctgctttttctttaaagaatcttccccttgacttgaggatgtagtttatttctrcgtttcagtgttctcctttaaaaattatagccacatatttctggattaggaaaaaatttctatagaggactacataacttgtgcaactggtaaaatttgaacatggactgtatattatataatagcattatgttgatgttaagttttctgaattggatcattctagtgtgattatatgagaatatccttgttcttgggaaatccatgttgaagaatttagggatgaagaatcatggtatctgccacttactttcaaatgatttagaaaaacatacagcaagagagagagtgcaagagagatgacagagtgagaaagcaaatgttacaaataagtgcagaatctaaatgaaggcatatgaactttcatcatactatttctgaaagttttctgtagatttaaaatctttttcaaaattaagagtcaaaaaagttatatccaagaaggccccatttacttataggttcctggtgtggtctgcttcctcccgtgcatggagcagtgtgtgcattcacatggtgtgatccatatggccctcttcacacctaaatggtgggcaaatccgtcttcagtttctgacagtcactttggatttgcacagcaccagctcatagcaggtacttaatacaaatatgtgattgaagcagattatgcacacacctgcacacattgcagagggtttcagtgcacccccctctcttgcacacaaaacacccaccacagatgtgggcatccagcaaacctatcttctcttctgcctctcaaggtcaccttcactcttcctctcctccttccaccttcctggacatgagagtgagaagatctcctggcagggacaagttagggaaacaattgtgcagaccaaacaccagactactaagtgacattctccatcatccccactcctggttgctttgggtstcaccattggcctctggctggctgccctggttcttgggaggatggggctgatggccatgtggggaggggtaggtcttaccccactgagtgttccctggcccttcccagacagacaccttcaccatctatgccattgacctgggggccctgaccaagattcggattcgccacracaacacaggcaacagagcaggctggttcctggacagaatagacattactgacatgaacaacgagatcacgtgagtgtgggggcagtgggcagggaggggtgttgctctgagggaggccatgtctgccacagaggtagtcctggaagaagactgggggtgggccggctgtgacggtggagggtgagggtgggctgggtgacacctaagggtgaggtgtactggccgtgacatccaaaagtaagggtggactggggtgcactgagaatgagggtgggcgggtatgagggtaagggcgggctgggggtgatgtctgaggctgagggtgagctgggttatgtctgagggtgcaggtgggctgggtgtgacattggagggtgagggtggactggctgtgacgtcgaaaagtaagggtggactgggtgacatctgaaaatgaragtgggtgagtatgasggtgagggtgggctggtggtgatgtctgaggctgagggtgagctggatgacattgragggtgagggtgggctggctgtgacactggaaggtcagagtggctgtgacgtcacagggtgagggtggactgggtgacatctgagaatgagggtgggtgtgtgtgagggtgagggtgggctggctgtgatgtctgasactgagggtgggctgggtgacgttggaggatgagagtgggctggctgtgacactggaggatgagggcgagctggctgtgacatccgagggtgagggtggactggatgacatctgasaatgagggtgggcaggtatgaggatgagggtgggctggttgtgatgtctgaggctgagagtgggctgcgtgacatctgagggtgagggtgggctggctgtgttgcctgtcatggccaccagagcaggtttgcccacgttgcaggctggatgggcattgcctctctccctcttctctcattggcagcccctagtgtcacctgccctgtgagatgacagtccaatagatcccccagaccagcaactcttgaggtccatctgtttagagagacaggatttccaatccctgtcagaccttccttggtccagtttccatgcctaggcatagctcacccataagcctctcaacgtataaagcaacttctagtacattcttttaatattctataccagggatcagcaaacattttgtgtaaagaccagatagtaaatattttaggttttgcaagcatttggtctcyggaamaacagctttgctggtgtaacacaaaagcagtcatagatgatgcctaaatgattgggcatggctgtgtcattttgacatgtgaaaattatatgaatttnnnnnnnnnnnnnnnnnnnntgaaatttgaaattcatataattttcacatgtcaaaaaatattatccttccttagatttttcctccagccatttaaaaatgtgaatccatgcatagcttatggatgtccgcaagcagggtaggcccgattgggcctgaaggccgtaatttgctgacccctggtggaggctcacagctgccacatgagttgggctgggaagagagtgttatgtcttcccataggtccacmccccagggaggtgaagccacagccccataatcagtcagtgccacagctaggaccagaactccagactgtctatgttgaattgaacgtgttttcattaggcctcattgccccttgggtgtaaggggcccaagggcaagagaaaggagagaagtccccttgtatgagtggagtgggacagagaagaaagcatgagtgatcctgagtgggcttkggggctgctgagggcctgccagtgcctagaatgtaatgggcaccctatyaacaaatatttgttgaattaaatcaactttccagcccatagacttgttgggctcccctctgtgcagggcaggaggtgacagggttctcccatctcccaccccaccctcccctaccagcccgagggaacactgaaccacagctcacagacagcccattgtcatggttttctgtgaggtcattgtgaaaccacataaagaccgtaggacagccccatggctgggaaccagggtcctgacctggagtctgacctctgccagaaactcatcaggtcaccctggacaagtcatgccatctttatgggcttttgtttcctcttctgataaatgggcttaatgttgccagcctaacttcttaagatgttctgaaaatccaaggcatttaagcttggaaaggaaaaagtgccacagaaccrtgaggctggggacaaactgtgaacatccccagcttccccttgcagctccatcagggttagtaattctctgccactgatttggcatttctcggytagcccaacaatttaaacattaytatagctttacaatctatagtaatgcctgtcagtacttgtcccccttcattattctttaaaaatattagctattcttgcctttttcaaatcaagacattaagtgacttgaaaaaaaaatcctcttggaattttgattgttatgccattaagtgtatgtgtagagaattgcatatttagaataagtgctaccctccggtacacttttccatttatccagctgtttatgtacctcagtaatgctttacaatttcctacacataactgctacacattcttkttaagtttatgcccaggtatattatattttattgctcttgtgaatagagtcttctcattactcttcttttcccccctccctttctcttctttcttcctccctccactctccccttccctcatctcctcttccytccccatctctttctgttggcatggctagttgacagtcctttgcttcctttgytattgaagtagcagtctgccagggctctgtgatgagctggccttaacaatcttcaagccaagagcaactctatgcaaagcctactgtgggagctagacaaaaaattatagaagttcagaagaaaccgaatcagaatagtgaatctcccctttcttggagagataccaccttttctgtcaatacctagggccttccctaggctctccatgacctttatgagctctgaaataaggcctttgcagccaaaaggatttgagaacactgacatctccctcactgttgacatgtccagtcaacatcctccatgactagacctcttggatgcctctctgccactcatgccctgtccccagyccattggcagaacctgttgggccttccatcagaagagcatgagtcygacctcatccsttctatcttcaccatccccaccccctgatcgaagcttcctgacctgatccatgcttgcccaaggccctcctattgcctacagcagcccagtgaccaggatcacaccactcctctgctccaaatcctgsagaagctcctggtcactsagagtcaaagccaaagcatgtttggtggycagctcagcccgcaggtctgstctatgcccytcatctctstattctgattcccccttgctcactccttgctgttccttgaacccaacagacatggtcccacctcaaggcctttgcatttgctgtccacgctccctagcagtccttcccccagtggctccctgtcatgctttcttcaggcaggcctctgctcaaatgtcaccttctcagtgaggcctagcgtaccctcttcccctcatttctcttgtctgtttatttttctctatatcagcttatcatctgacctacaaaaagcttgtgtatttaggtgctgctcatctccccacaatagaatgtaagttccatgtcgttaatggcctcatctgtttcatttactgctgtgtccaccccagcacgtagaagaatgtctggcacactacaggcataccataaatacttattaaatacactaatgagtaaaaatgatggttaatatgttgatttattcattaatttgacaaacacatgctgtgctaagtgctgggggttaamtagctgctcagttatgactctgtttttgaagaaaggaaccctgatggtctaggaggctgwtgatttargtttaagtactttctcttccactgttatgtggccttgggaaaggcactttactcctctgagcctcaggccttccatctgtacaacgggcataataaacctcacccaggaaatcatcatgaggactagatgagaaaatgtgtttaggcgcccagcacsctgcctgatcccagtgcaacacagcagtagttctttccccttggcaatgagagtccaattagttaacatggaaaagtggcttgacagctgggaaaggctgcaggaatgcgtgggattattcttaaggagctaacactgttaccaagtgaaggagataaaacacaggtgactacaaggcacagtgacagtggtggttgtctcagggttgacctcagaggagggagtcatgggtggggacatctttggggccagatggcatctgagatgggccttcatgagcagcagccttgtttggtgcttgggaaaaagaacattagaaatggttgaaaaaatgtgatgcaggtggcacagaattgggcaattgaggggcacacacagaaaggaatgagtaattctatttggtgcataagggacatgaaggggtgggaaacaggaaaaacggaaagggaggctggagaggagcagatgagggcatccaaagccatgctgaggagcttgaaaacacacccaggcttttggttggccagattttacagggaggaaaagacagaagcaagagaatgccagctggggtcaggcactggtgggagatgctggcctgaaccgaaaggattgggagaagatataaagctgtggaggccttggctccctgcgaagtcaccccaagggagagctctgtgtggtccaggggctgtgctgtccagttggtagatggcagtccgggtctcagcagaaccactcctagccctcctagcctcagaggctgtttggagagcagagaagcctaagatggtggaaacacaaggaggagggggttgggggtgcaggtttattgatctgcaattcaattgccaaaaagaaaatgctcttgtttctaaatggaagatatttgaggtcctttataggagtcccaggctggcaaaaagtgattaagattgcatgagaaagcctgtttaatgctagtttgcagctgtgggctgtgaatgttttgttttgttttgtttttttactgcctcaagtgagttggatttaaaaaaaaaattgtgtaagaaaacacatgacatacaatttattaccttaaccatttttaagtgtacagttcaatagtgttaagtatattcacattgttgtgtatcagatctccagatttttttcatcttgcatgactgaaactatacccattaaacaattacttcccttttccacctcctcccagcccctggtaaccaccattccactttttgtctctatgactttgagtactctagggacctcatagaaatggaatcctacagaatttgtctttttgtgtctagcttgtttcacttagtgtgwtgtcctcaagcttcatccgtgttgtagtacatgacaggatgtccttcctttttaaggctgaataatatttcattgtatgtacgtaccacctttttagatggattttaatggggtgtcccgggatctgaggtctcccttgggtcaacctgggctctgcacacagcctcacatccctttggtaaaggactactctttttacaagattgtgatatctttttacaagattgtgatatcagaaaattttatgtttgaactcctcctgccttctctagcttgagaggccctgctccttrgccactctgaaaaaaaatgacagtttacaaaggcactagattgattttttttattaatagtgatgtcatatttagaataagaagaggctagtttttccttccctcctttgtgctgctcagacaattcctggagtctaagggttggcaccatcttaggcaaaagaatgctagaataaagaacgtgcatcttcaaggaaagagtggtggctaattaaggaacttaggagttggccgggtgtggtggctcatgcctataatcccagcacttcgggaggccagggtgggtggatcacaaggtcaggagatcgagaccatcctggctaacacggtgaaaccccgtatctactaaaaaatacaaaaaattagccagacgtggtggtgagtgcctgtagacccagctgcttgggaggctgaggcaggagaatggcgtcaacccaggaggtggagcttgcagtgagccgagattgcgccactgcactccagtctgggagacagagcgagactctgtctcaaaaaaaaaaaaaagaaaagaaaagaaaagaaatttaggagttatctcaggaattttgaagaaggggatgagaaaggtttacccccagaggagacaatggctttcaattctattgatattatgagtgccttgtatgccaggggatgtggatacaacaatgagtaagcagactctgcattcatggggtcatagttttcccagcaggaggaacagacaaatatactccctgagcaacctcttccatccttatcacttcaaytaccatttatttgagaataatgctcaagttgtatcagtcagaataggctaggttctgctaagtaacaaacaggcctaaaatgccagtggcctaacacaacaaacatttatttctcacttatatgtctgatgtagggtatcaggggactttgctcagcatgttcactcagggaccctggttgatggaagcttttcctcaacatatgcttctgtgatcgtccttatagtggaaaactgatttgacagatcacacgctgactcttttttttttttttttttttttgagacggagtctcgctctgtcgcccaggccggactgcggactgcagtggcgcaatctcggctcactgcaagctccgcttcctgggttcacgccattctcctgcctcagcctcccgagtagctgggactacaggcgcccgccaccgcgcccggctaattttttgtatttttagtagagacggggtttcaccttgttagccaggatggtctcgatctcctgacctcatgatccacccgcctcggcctcccaaagtgctgggattactggcgtragccaccgygccyggcccacacgctgactcttaaaaatcccttacagcccagggattccatgtatattaacaaataacctaaaaattcagtgttcttcagcatccaaagctatgagcctctaatatttgggtttcagaacacatgacagaaatggtgggatatttgggagtacgttgtctttaattagggtatctttgttaagtcacttaatcattggctctgctactttgtcaccttgtccacatttattggcttgttgattaaatgagattgtgctactttcctttttctttcaatactctaactagctgcatttttaagatctgcaataaagtctaatgcactcaatttcaaagacaaagaggcaaatgccaaaaaaagctgggaatatgtttagtgtcctgggtttcatccacatttgatgtgatattttatgttttctctacctctgttcccagccctgaaacaaagatttatgttttaattgatggcctggggggtcctataagatccttaataattaaagacagataccattcttgaatattgtttcatgtggcaaatatgttgggtgggatttccagaaagggttgaacaaaaagttattaaatttttttcccttaaattttatctaataaagagttgtcctctggaatctcccattcctccagggatcctagaggtcccagaatgttgagacagaaaagaccttccaggtcatctcacccagccttctgggtggtacagtttaatccctaggatctcacagcttgttaggggcagaggagggaaacaaattcagaattcctsagttccagatccatgcttttgtcattacaccactctgccaggatttactcatacttgatgttgtccagactttagcttatraacaaaatggaaaattctgtatgaaattatttatattgtacaacactcaattttgcaatctcattccattttttactttcaagtggagtttatacttttaacagtttcgagcttttggttcratgctcagtttcaacctcctgcttacagaagcccttactctttccttccatcatccttgtttaggagtgtggtgagcttatctgccttagaacacctgcattcctctcatctcctttattcactaaaaaacccctgcctggtcccctccctggtatccagaagcctggttgaccaggatgtattcctggaggaggaagaggcaggggtcagtaggcctggtgtcctaaatcttcatgtgtgcttgttggcactgtggggatagaagctgaaygcccagcgctcaggccatacctgactcctgctttggttctgtcggtacaaggagcaggttctgagaggagacgtgctgctctctgcagtagtgagcatgctgaggggctttaaagtcatgatgcaagtatctcarggacaatggagattttgctccaggaaatccagactctgwgtgcattttctctttgtatgcatgggagggcttgtaccttttctgtctctttgactttttttctctccctccctggctctttctttgtgtgtgtctcgttctgtccttgtcctctgccaacttcctacacactctgtctccacctctgctctgaccccagctctttctttatttctgtctctcttccttaattggccataatttataactatagcctattattcataagttatttgattggataaaatgttaactttcctattcatacatttaaaggctaagaagcagaacagtgtgcatttttctctkaaacactaatttaatggtagcttagttcatattgccccaggtcgagctcctttaaatccatgccatcagtgtaacgttgcccccctcagcaccccatctgagcccattgactgagatctcgctctctggttctgctcctctaacattttgatacttggaggyaatgaagactctagcaaaatgtgggactcagacagggatgggacctttggcctgcactgcccctacctctccagactttgagcagtccctgagtggcccttgtgcatcagggcaggggtggggaagggrcataaagagggtggaatggccccaacttagagacaggctgaattctgagaccctttgtgttattctgggagcttagcacccagagaggatattcccagaccacagcgtccagagatcccaggcatgggccaaggagaatgaaagggaagggaaattacaagagygacaatagcagtagcaatgcttactgagagcctacattgagccaggcatttttataagcattttataaagttaacacatgtaatcctcacaacaccctatgaaataggcaatattatgcttattttatggtacactgaggcacagagtagggttgccagttaagtttgaatttcagataagcaatgaataatgtttttgtataagcatgactcaaatattagataggacacacttaaaacgttatgcattgtttatstaaaatccaaatttaatagggattttgtaactattggctaaatctggcaaccctagcacagagagataaggacacttactcaagattgcacaagtattagtggtagagccaaaatttaaacctggacagtctgacccaggggagagtccttaattaccccactgtgcctcccatccctggccctaccttcactctgtccaggcacctcccttgtgctgggtgttacctccatgctgaggggtctgacttggacctccctttcctagatggccccagcagtcttctatgccagctcctcagccatactctctgtaccttctgaaagcakacataattggctcattccattaaaatccattagttcaacacttatgtattgtgcacctactatgtacaaccctctctactaaagtagccctggctagcagattcattctggaaagggttggaaaggtcyccgtatgtccctctccttctagatacttccatccaatatgaccctgattgaggctctgtgtgctccaggcaggtcacataacaattttcaatggagtgtctagagccartgtccccaagtttgttctctaccccaggcaaatgactaatggagtgattcccaggctgggtagaatagcagggcaatgctgtcaggggcagacaggggagagtttgggaccccatagagggcctctcattctcagcccatgactgctcctggacgagacctttctaagaggacattccaatctttccctatccacccccacaggtactactttccatgccaacgttggctggcagtggaggaagatgatggccagctgtccagggagctgttgccagtggatgagtcctatgtgctgccacagagcgaggagggtrggggaggcggtgacaacaaccccctcgacaacctggccctggagcagaaaggttttctaaactagagctgatttctttctccagcacccctcccctctgcctctccctaaccctaagtctccatcttccttccctcccctgtgggctctgggaacttcctcccttgacagtctattgtattgccctctcattcctctgtggcaagactggggaggtaaagggggcatagtctcacatatctagtgtaaggcagtataaagcacacagcttaggactgagttattgtcagaaatgaaatggaatggattggaatcaaatggaatgaattggaatggagtggaatgaactgaattgggatgattggaatggaatagattggaatgaaatgggatgggttggaatgaaatggaatggaatggagtagaggggaatggaatggagtggagtggaatggaatggaatgtgatgggttggaatggaatggaatgtattgaaatggaatggaatgcattgaagtagaatggagtggagtggagtagaatggagtggagtggattggaatggaatggaatgggatgggttggaatggaatgtattggaatgaaatgtattggaatggagtggagtggagtggagtagaatggaatggagtagagtggagtagaatggaatgagtgtagccacttctgattcagtcttgtgccctcccctataggcactcaatgcatttttgtcaagggaaagaatkwacagtaactttcaagagttctatgatgctcccctgaaatatgcatccctaaaactcctcccagccaggaggagtcagaatggggctcctggctgctgagcctctgaccctcaaagtatcccctaaccatcctatcaactctattgattgaaggcttcctgtataagccagaggcagaggactcacatctctaccctctggaagtttccagactaatggtgactgcagagtaacacatgctgaaaaaaaaatgattcttagaaatggccaagaggcgcggtggctcacgcctgtaatcccagcactttgggaggccgaggcgggcggatcacgaggtcaggagatcgagaccatcccggctaaaacggtgaaaccccgtctctactaaaaatacaaaaaattagccgggcgtagtggcgggcgcctgtagtcccagctactygggaggytgaggcaggagaatggcrtgaacccgggaggcggagcttgcagtgagccgagatcscgccactgcactccagcctgggcgacagagygagactccgtctcaaaaaaaaaaaaaaaaaaaagaaatggccaagaggaacatagaaacatacttattactaatcactgggctcacagatacaggattgaaggggcaagagaaaaattggagtgatggggtagagggagtgaatcaaggaagcccttctagaggaggtggctgtcctctttcctcctttcatgaaaggaacagtctacaattcattgctctatactattctcttggcagataaatctaccacattctcagtgaccataaagactggggttaagaagaatgcgggcacagatgctaatgtcttcatcacactctttggcacacaggatgacactggtaagaaagcagtgcagggccaagattcacccacattcttccccagggagaccagaagactcagcagaaatttccaaggggaatcctaattatgcttttgtctctcaataggrtgcaagcaattagccccatcgagaaaggcagttccttttyttctaaaaattttctttttctctgagccagctttctttttctgttctaatggtgaaggtagccctgactccacccaataacaatctgggacaagatggctttgcccaactttcaatgaaattcagccatgatactctcagtatgaggcactccaggcatygtagagttgttcaggagcctttgctcaggtactcagagaaggtggtgtttagtgttgggtccagccatctgctcacgccactgtccagccattctgttgagtttagagaggagtcagtcagtccctcaagtagtcatcatatatttgctcaaaatcctgcaggtccagagcctagtgccaagcattattgaagaataaatggacctaacccttgaccatggggtgctcatatctactacaacaatgtgctggtagagagcatggagactctgaagcttgtctgattggttcaaacctccactccaccatttattagctgtgtgacattgggcaagttgcttaacccctctgtgccttagtttcctctatttataaaatgaggataaaattagtatgtgccttatagagttgtaggtctaatgaagttgaacatgtacaacatttgggacaaagtggcactcaataaacattaattaacatcaattatttaataggttggataaagcagataatatataatgatataattaggtcataacctacaaatgcatgtgattgcaatcattcctgaaccatgatcaaagaaattaatcggctttggcaactgcttttattatctgaggcctttctatgtgttagacaaattcttgagcatccaacagtcatcaactcattaagtcctcacaacagccctacgaggaagggactaagacctgtccttttttgacatttggaaaaccaagtctcagaaacattacataattttcccaaggccacccagtggtaagtggcagagctaggcactggacmaaggtctgtctatctctctgtatacttaaaccagtctgtagtgagtctaggaatagcagaagactttctacatgaggtgggcccagagctgggacttattggggtacagggacttaaaggcaatgcagtgcatcctgaggcaggaagacatagcgatgactstgagatcacctcagtttcagactgamactrcaggcagtctcaggactgattatatatgtgaaatagctgggggttggggcattcaaattcatccctcctctgtcatccagagaagatgctccagagattctcacatgtcccatccctgaaggaaatcccatgtttccccagggaacatagagagtgtggctttgtcactggctgactctccatgtagagagttgtgagggtatggaggtggtgcagcattgacttagagctccaccactgtctcccggatgattttgagtaaggtatctctttcaacataaactggaaataaaaatgcacaccctaaagggttattgtaaaactcagtgaaagaacacacaccaaaaaagtgcccactgtgagttgaacagtragaacacatggacacagggagaggaacatcatacaccgaggcctgtcagggggtggggggttagggtagggatagccttaggagaaataactaatgtagatgatgggttgatgggtgcagcaagccaccatggcacatgtatacgtatgtaaaaaaacctcatgttctgcacgtgtaccccagaacttaaagtgtaataaaaaattttttttaaaagataaaaagaaaatatggtgtatatacacaccatggaatactactcagccataaaaaggaatgaaataatgtcttatacaacaatttagatggagctggagcccattattctaagtgaagtaactcaggaatggagaaaccaaatactgaatgttctcacttataaragagagctaagctatgaggatgcaaaaacatacaaaatgatataatggactgtggggactcattgtgggaaggttgggaaggggatgagggataaaagacaacattgggtacagagtacacagctcaggtgatggtgcaccagaatctcagaattcactactaactcacccatgtaaccaaaaaccacctgtaccccaaaagctattgaaataaaaaattttttaaaatgcccactgtgcaaaggtggccaatggatgatmattgcacagtctaaatttggtggaagttcagaaatttggtcattttgaaaagggattaaaggtttgggtctgactaggcttgaaagrcctcaggtccagccagtcatgctggggtcatctgatccacaggaatgaccctcctgaagtcctccaagacaaacagcgataagtttgagagggacagcattgaaatcttcacggtggagacgctggatctgggagacctgtggaaagtccggcttggccatgacaacacaggtgtggcttccctcccctctgttccttgctaagactttaaggaccatggacaggtccttgtgggcatctgggaaagattctggaaatttgaatgccatctgtcttctgtaatgacacagcttccttaatccctttagcccagtagagccsagagagtcctcagctgcacacagagtttctggcctaattagtctagagctgtacctggacactggtgatttttaaagcctttatcaaccccagtgtcggtaattttaatgcwcagccagatatgaaaatctccgatctaactcagtagttctttgagtgtgcaacaggatcacctggggggttattaactcacagatttcttggctccacccccagagcctttgattcaattgcttcattcctatcattgggtaagattataaagcttttgtaaacacaggctcttcctggcatccctgagttctgtttgaagccccttcttcaaggaaggacagcatccttgcttcctctcagtgccctcccacctcagcctccccctactctcctgtcatctcctattgatgctcttttactcttactaatttcactgacagcagcctggagtgtgatccagcttcaacatctgggtgcacattttaatgggagtcactttagcaatgctgcaagcaaaagggatgtcatgttaatgrtatcagccagccacctaaggaaggaagtcaggagtccctgaagttacccacaggaaatcatctctgctcaggtccttgatgggttttgtgtctcctctctctctaggcaaggccccaggctggtttgtagactgggtagaggtggatgccccatctcttgggaagtgcatgacgtttccctgtggccgctggctggccaaaaacgaagahgacgggtccatcatcagagacctcttccatgcagagcttcagacgaggctgtacacaccatgtaggaaccacacacggcaaggccagcccttctctggggccccatcaccagctaccccaactcagccccagttcttccttcaggattgactgtgggccaggcccaccttgaagattttggtctttcatccctgtcctgaattttctgactctgtgggggctgtgggcagagttctggacccaggaaatgaaaatatgaaatttattctaaactctactccaagctagctggtgacaacatgtagagaacctaacctctcgagggttcagattcctcatctgcagcatagagataataatgcaggatgatagcaatatccaaaaggaagaaagataaaggtctaactgaggaatcattatcaaccctgtcaccaatccttactccagtcattaacatgccaaataagtcagcagtataagattttctcaggtggtatacatgactgccagccccacaatggcttgaaagggccctcacttatgggttgaagggaaacacagcctggaccctgctagacccagaattcaaaaaaaaggtgaatgtaattcccttttctagctaaggggaagaagggaagggagtaatttagtgaagttttgacacttcctttccactgtcatcatcagaaagaatgtattaaatgtttatagacatgtaagtatgtagtactatgtactgggaatcaaactgaaattaactaaactctgaaagtctgtctgaatttggtaaaatctgaataaattccagagcatataattttttctaactaaataataaactgtaccacaagatttcccccaaacaactcatacttaatagcatgtatcagtgatgaacaaatttttgcctaaagcaataaactgaaatgaacagatcatcaaaatatcttctgatccaaagtctaaaatgaagtgacatttctctggctgggcatgcccaaagccagccctggatccagcctctattcccaggagtcacctgcaggcgaggacagactctggcctgaaagatgtgcatggggttggcagcagcactgggtgggacccttgaggacaaacgtatccatttctccctacatgccctaggacatgccataccaaaaaaaaaaaaaaaaaaaaaaagataaagagtttgtatggtttgactttgaatatgttcagttccagcctgatattaaaactaacctaaagggtgagctgttcctgcccagaaacttccaggggttctcctactgctggccagtctcaggaaagctcagattctgttgccagcttttctgttcaaggctttccaagtcttgggtcagggagaaaccccagaggctcagaggaagggactgtatgctgcagagatgacacctctgttattggttgagcacccagcagggtcgaggctgtttcccttcaacctataggtgagggccttttcaagccattgtggggctagtggtcacctccctgggctgtctctttctgttgcctgtggctaagcagcagtacttatctctagttcacagcaacaagactcctagaggctggcaatgcacgctttaaggtcaggcaagcctgggtttgagttcaagttctaccatgtgactttgggcaagttacttcacctctctgagccttggttttctcatttgtaaaatggagtgtaataatacctactccctcaagtcattgtgagggttaaaggaggtaaggaccatagcatgctcagtacagagtctgacatgtaggaagtcttaataagtgataactattactactattactactgcaagtatcactactacagccctacagcaaagtagctatgatgataaatgaaagcaacgtcttcatctggagaaggttagggccacaagagagaaggaagcttgtattgtgactcctttcaagggccaagactacaggatagagtagacatccacttgaactgtttctctgggttttcaatattcttcttttttttcttaaatttttttttagttactgtgacccagagcaattgtacacatttatacgcatatgcaaaaaataaaaatgtcacaaaaattgtactctcattatgtgtgatatacagtgatatttttctattagattttttcaattccacatattttaaaaaatactgttgacaacccactaaactcatttcacaacctgctaatgaactaacctatagttactatagcaatacattgtttcaggtggtctcaaactttagtataaagtatgagttaaatattcagatccctagacccatcctgcagagaaactaaggcaggttttgcaaatctgcattttttttttaagagagagtctcactctgttacccaggctggagtgcagtggcgtgatctcagcttactgcaacctccacctcccaggttcaagcaattatcctgcctcagcctcccaagtagctggggctacagatacccaccgccacgtccagctaacttttatatttttagtagaaacagggttttgccatgttggccgggctggtcttgaactcctgacctctagtgattagcccacctcggcctcccaaagttctgggattacaggcatgagccaccacacctggcctgcaaatctgtatttttaacaagcatccccaaaagtttctgaagcaaaggtcttccacccatgcatagagacatactggtctctgttcacaccggtggctgcccaccaggaagctgcttgctaacagcactgatttgtcaaccctctttctaggggagatagtccctggtgggaccaataaaccctggtgcagccctcgcctcctgctatcctctcccctataaaagatgtgtgtaatgtgacggaacctgaatgaggggctgggtgtgaggtggatgggttggggcaggcaggccatctgggagcaagtgagagactgggagcaggggatacggagaagagtgaaagaatgctcactaccgtagactggccgatccagtcagcaagttgccccctgaaatctagtgctcttgtttgtggagtctcttcagccaagcaccatgtcgagggcactttacagacaatggacactgaggctcagaattaacttgcccagattacaccaatggtcaagacagagctgggattccagcctgggcttgtcaaattctgaagcctgtgctttcaaccagtctgctacatgtgctctggcatgtgagaggctcacacaccctggtctgagggggtgagggttttccatgggggcggggcaggacaggaccccacctgcagttgctaggcaaccttgtgaaggtccaggtccctgagcagcagttccccgggcagcagttccccagtgcaagggtctgggctggttgtgctggtgaagaactggctctcaccatgtttgttttctgttctctcatccactctggctttgccctctgaccaccaccctcagttgttccttacgagatcaccctctacaccagtgatgtctttgctgctgggacagatgccaacatcttcatcatcatctatggctgcgatgccgtgtgcacccagcagaagtatctgtgtaccaacaagagggaacagaagcagttctttgagaggaagtctgcctcccgcttcatcgtagaggtacttgggctcagcaggctgtccagggatggagtaggtcagacagagggagaggagaagccctaccttcagggcagaacacatgcccttcatcctgatgcactgctattagagaggaaggtgagcagctcatcctaccttcctgggcctcagtacatccaagcaaccaggggaatggtgaagctcaccctgctcctcctggactggtgtcaggatcaaaggcaatgatgagagacaggacttgggaacactagaggcataaagccaacgggcctctctagagcttccaacaatagacacttatccacaggtggaacatagctcccagacttgctggttgtggggttctgctgatactgctagccagggagaggtggaaatcccaccaccagtggtcatgggctagggtctcctgctcagctctcaagctatggtcaaacaatttaatagagaagagcattctgtatgttccatggcttcccatcaggtcttgacaatggaggtgctgttgttcagtgtttactgtgcatgtaggtcataatgccttggaatccatatacttcaatttagtgcatgcacactgtgcctgccctgtgtgctcagctgtgcactaggttgggtgggagacacaagagaaggggagagctcagatcctgcctgagaggggcttacggtcaagttggggaccccagtcctcccaacaaaggtaatgagagagtctggtgatggtcattgtcatggaccctgtgggtcagagggcactgtcataggctaacccacttaattatcataaaaactctgtgctataattgtccctgtgtaaatatggggaaactggggcatgaggtttagttgcttccctaaaaccacacagctaggatgtagtgggagcaggattgaaacccaggaggactggctctggaatatgcactcttagttagctactgcagtagacaagcaaatggactgagcttactatcactgtttagagaagggagaatgctccttggaagaggtggctttgagttggatctgaaagggggcattagcagggacaaggaggaaaggcattcctagcagagggaacagcatggccaacagctcagaggtggaaataagcatgtggcttgaggtttgagtagaagccatgggaggagtgtgatgtaacttggatagatggcaataatgaagcaagacttagaggggaagcgcaggagaccctgaaggagaagagccaggagcctcagaaggctgggccctccaggcagtgggatctttggagatgtgccccttattttctgataggaaacaaagcccagggcaccttccttcttcctgggccagtctctatcccgggggatgccttgctctcttcccaccttctctggagcagtcagcacttgtgggaaggtctgtcacctttgctgagtcttttaacgagaaaatttaagggtgattcattaatccacacaaagctaacatctcatccacccaagatgtcatggtgcgtgagtcatccaggcctgatgccgtcagcggctgaggctgtgatcacacctcggcatgacttccggggagtttttatcaatgaagtccccactaatagacagctataatttgccagtaattttgttgctatttttttttcttttcaaatctctctggatttggggggagtgtgagagctgggaaacaaatgaaagggctttgtctcctggcctctgtctctctgcccacctgtgtccctctctctgcacttcccttttctgattgattttcaggtaggaggtaaaacgctgaattgcggagtcggtaaccctggatctgattctggctcagccactatctcaggaggaagccgcttcctctctctgtggccccctcctaagaaaagatgttgaccaggaaaagaacaataatagctaagagttattgagaacatccaagggccagcacagttctaaggacctgatgtgtatcaactcatttaatctttataacatttccaagacgtagttagtatgatcatcccattttacagatgaggaaataaagtgcagaaaggttaagcagacttactcaaggtgtcttaaaacagcagagctgggatctagactcaagaagttcagttccagagacttctctgcctaattctttcaccttccagaatactagggtcccttctgatgttgatgtcctctgagtctttctctgaggcccaccaaccatgagtagctgtcccctaaaggccacattgctctctgaggcgttagaactgagatgaccaccaggcgcggtggctcacgcctgtaatgccagcactttgggaggccgaggtgggtggatcacctgaggtcaggagttcaagaccagcctggccaacatggtgaaaccctgtctctactaaaaatacaaaatttagctgggcgtggtggcaggcacctgtaatcccagctactccaggggctgaggcaggagagaattgcttgaacccaggaggtggaggttgccgtgagctgagtttgcgccactgcactccagcctgggcaacaacaacaacaacaacaacaacaaaacagaggcagccatcctgtcccatgcaacttagtgcttagaggattaaggtcacagaagccagagattctcctctgcatcccatacctggaggctccaggtgggagagagaagatgttgtagctgccccatcccccgcccagttcaggggctcacctggcacacatg

SEQ ID NO: 9891 - DNA, 15597 bp, Homo sapiens
gccccagaactgcaggcgggcaggttgtgcggcctcttacactcctctgccagtctgggcctgtcggcctcctcagcctggctcactcttgctgctatgaggagaggattgggcaggaccgctggcacaaaagttgctagaactcttccagaggagatgggatctagycccaccaggagtttccactgaaaggayggtgctcctagccccctacagctcctctgccctgggataactccttagtgtgtgctgcttccctggaccttccctctgggacacacacatcagggcctctcaggcttgagtgaagcctgccttcttccatttttgaggttcctggtatttaaaaagcaagatgacaaacaggattgaaagctgtgrtatattttggatgtttacattgaacaaattaacgcttcaaacacatacaatagagaatgactctgtgcataaccttatttggagacaagatcagaaatgtaatataaggcccttggtgaacttgaggccctggacagataaccttgcctcaatattccacaggcccacacatctaggcatttcctaggagagtgtgrtcaggacacctgccccagctccttccccactgtattacctgggcacctgtgaagaaacctctgctggaagggtgtggtggagcctatggggtggaatagggagagattctgggataaacatggggatggggataaactgtgttggctctaggctggctctccatgatggaagactcctgaatagattccaactccactgggatggtagaggaacttttaaatttccagggagagctyctgcttcccagctccagttaggttagaggtggccactagggaagattttccaacctcttccagaccccagccctgggggacctggctgccaggcacacggatatccagctgctggcgagtgacttggtgtgatctctgcccaggagactgccaaggcaaattggggtccaaggtggaggtgggcaggaaaccctgtcttcaaagatgaatgctttgactggcacgaggggaaatagatggaggccagaaaaggctaaggaggaaggaarctgctaggaccaggcaagggttggcttgggagatgggcaggcagtttccctgcccggggaagggtagaagagggacagcagaggacagaccagtgggaaataaggctgcttctggaatatccaggtgtggaatggagccagtcagagtcacaagtgaatcctgcttaactagctgtgtgacctttgtccagttatagggcatccgagtctcaggtcctcctctgtggcagtgactttggtgaggagtaagctkatgtagattgccaggcacagtgctcttcttccatggcttttcctctttaccttggcttcccctctgacttgtgctttccagaaagctgaatgtgttcgttgttgagggcaggtgaggttggagaaaaccmaggcttggcaggtagctgagaccctgggtgggtggcagcctcaagcagtgggtcttcaaggtttgcccttgccatattcagggagaagaagggaaggaacccctccatttggcttcccgggtcccagtcttttctcccattctttccccttccctgcaggtccaatgagctggttttttcctcacctgaccccaagacttcctggacctctccttgtttctcctgctacccaaaacttcttgggtgctcaccaattcttcagttctcctctctttggacccatagcacctagattgcctgggttctaatcctggttctaacactggctagttaccttggccaagttctgtgacttcctggagcctctggttccttgtctgtagagtgggaatgttaattgaacttttagcatttacttgttatgaggattaagggaatcccaagaacagtatcaggcccatgaggtgtaaattttggacaaaggcaactactattattgttatttggtgatggccttgtggtggcactagaatgtcaaggacatggtgcctgccctcaagaaacatatcatgtagctcatgcttgaatccagtcaatatcttccggctgactctggaataaaatccaaatgctccatggtagcctggaggaccctatgtgatctsctccctgcccacctctttcacctcatcktgtctccctctcctccttatctcttgttcaacatctacactgtcctttctgtttctcaaatatgccatgctcttttccacctctaggactctgcatgtcctgccccctctgcctaaactacttcccccagaccctttctgtcatcaggtgaaatcctgcatcctcagaaaggcctttcctggctttccaacttaaagttgccctgccttcctctcccccacccccagtaactccctatctcataatgctgtttcattttcttcatagcacttattattatcagaaattatcttgtttccttgtttataatctgtctccccctaaaacgtaagcttcatgaggcagggaccttgtctggcttgtcctcccctgcatttctagctgttagaatagtgcttggaacacagtaggtgcacagtaaatatttggtgagtggataagtgaacgaaggcagccatgactayaggacaaagccgagtaagctgaggggcctcctggggaaggctacagccctggactaaagacatgggtttgttgggttcttggttctgctaactctgattctccatgtgtctcccagggtctagactgggttctccttgaaggctgctyctgagcctaggcgtttttgtagctaaaccattatcatctaccaatcagaaagtggtagcactgttctgggggcctccatctgtgccaggtgttcaacctttagttgctggatcatagggaagtatggtaaggtggtgtcccaaggctgaaggaagcatctacttaccagcaggagcagaagtatttcaacattttgatgttcggtgccttagcttcatgtacagtgagtgccgatgagcttcagtagaccctgctgagtcctgtggattcagcactatttcaggagctgaggtctggagcagctaagctggttggcacctttgtgaccatccaggtcaatgttccccccaatccccgcccacccaaacccacccacttctacaattgaagagggaggagcagagagagggctcaagatccagagctggtcattggcagggccaagacttcaaggcagcaggtggagacttgcatatcttcctgagaaggggcggggaagacatattctcactttctgtaagccccaagagcctttccaagccaagattgggaagtgtattccaccacatcttccctgccctttcctagcaggtgcttctctctttcctcagggccacagggacaggaatcccaggaagctctcttcaactgccaggtcaggcctaggcaggtgaagacgtgctgggaggggaccttgatgtcatgtgccatgsagactttcctttgttcctgcctccagccttctccccattgccacccccctatcckcacacccccaagggttccctggaagctgaagtgactcagggattccaaaactagtcacctcaggaggaaaccccactggaaaatgtttctcatgacagggagtcaccctaaggagtcccacaaagctgctactgagataaggacagagggtgagcaagtggggtggggtgggggcatgtggctcagagcacaggttctcaggtcagtcctggtcatcatgggggtgggaaaagccaacccttcctggagggtttctccctctgtcctagagggacaccccaaaggactcttctgaagggcaacgttcctggtgacctaggctgggtcctccctgcagcgtcagcaagtgaaacaggtagttgggatcacttctggctcctttgaacaccccctcctgggcaagggtcaagataggagatctgagccaactccatttctactaccttcttagccctgaggttctgattggtgagagygagacccataggtatccagctcttctgaaacggcactgcctcctaagatcctgttctgggattgaggttttcccaggagcacgggaagccaccttgaggccatgtctgccagacaaaaggctaggaaagggagctagtgcagtgaatccgaacagcagggctggatacctaagtgggcagacacaccctgtggccctcagcaggtgcagttgaaacttgtcccaacccaagcccaggtgagcaggaaagcattcactgtggggctccccttccattcacagccaastaggggtaggcacggtgtggcacttccatgccaggaggttacatgtggaattggtcagagctggaatgggaaaccagctcagcctctttctttgtgatcttgggtaagttactaaatttccttgggcctcagtttcctcatctgtaacatggggataatagtttccatgtcatggtttcattgtcgggataraatgagatgatgcatgcccagggcttagcaccatgcctggcacatgtaagtgcacaggagctgaggccagcaggatatggaagggagaggacgtctgcgagtactgggggcagagggtgaggcagtgagagtggggccatgatactggcctcatcactgttcctgagtgcccctgctttcccagccaccacctgcttcttctaagtgccctccatcccacagttccaggtgccccaagactcatcagagcagagcagtttctcccarttttccagattgccctttgacttcatcacttctctcttttggggctgctttgccctaacgcattggaaagattcctctcactgcagtttaagttattcctggttccctttgttgatttcctagtccttrgttactagaggagtattttctaagggaaagcacatgcaaatcaagccacatcattctaggggcaatgtctgtgtatgggtatgttgggtgcgtatgggggatgakgcaggccaataggcaagcatgaagagaaggacctggggggaaggacacactggcccactctcagcacagtgtctcccaagcaggctggacccggctgacctgkgtctttggggtcaagcccaactgtaagcctttctggggcacacatacaccctcctggctaayagtggcccatgtttctggacctgctgaggctgagtgggctcacttcatggcctgaaagcagtagctgaccctgtcatgggcttggtccccaaggctctgtgaatgagagcaggttggttcctggaactgagacctccttcctgttgggtcttaggtgaggctgtttcagtttccctcctcttccttgcttcaccttctcatttgtgcaatggggayactcacccacagcttcttccatcagaccttgcccatccagccaacaaacttaggaagtcagggtcttccagcagccctgtgagggtaggcttgtatccccggtggggggcagtgacyggcgagggcaagggggagttagggagtgggtcatggacaatgggggagaagtcatagctgatgggggtcatagaattttggggtcattgaaaatgtggaagaggtcagagaacaaaggggatgggagtcaaaggatgtctaagggaaaggaaataatcacgaaggtggatgatcagagggacacctgggaagaggggaatggtgaaaccagaccctggatggggggagcagggatcatggaaacgaggcctcttgaagggaggccacaagacatttcctaattttggctaccaaaccaaccagggaaatcccgctaatgccagttcacaagaatgcagaacagcagactgttattgctttgaccccatggccagaaaaattcaaagagcaaagtttacccaatcagctaccaggcatataatgatggtcatcacaacttccatgagtattgcattttaagcagcctttggaaatactttcagagtttttttggttttgttttttaayctcaagtcactccctaaaaagacagtggaaataaatttgaataaacaaaacaggcttgctgaaaataaaatcaggactcctaacctgctccagtcagcctgcttccacgaggcctgtcagtcagtgccccacttgtgactgagtgtgcagtgcccagcatgtaccaggtcagtgcagagggctgcctgagggctgtgctgagagggagaggagcagagatgctgctgagggtggagggaggccaagctgccaggtttggggctgggggccaagtggagtgagaaactgggatcccagggggagggtgcagatgagggagcgacccagattaggtgaggacagttctctcattagccttttcctacaggtggttgcattcttggcaatggtcatgggaacccacacctacagccactggcccagctgctgccccagcaaagggcaggacacctctgaggagctgctgaggtggagcactgtgcctgtgcctcccctagagcctgctaggcccaaccgccacccagagtcctgtagggccagtgaagatggacccctcaacagcagggccatytccccctggagatatgagtgagtctgctgcccctcccgaatgcctgccctgtgtgtgctggccagggtatgcrtgagggaccagggcaattccagcttactttcccattttgatctcagaggggctgtaaaggtttgggagttagacaagktctgtatttgagtcctagctctgactctcattggatgatcttgagtcaattcragttttcaaaactcagggtttttttttttttcacctgcaaaatgatataatgccccataggctaatgtgcagatcaaatgaaatataatgtatgtaaaagtctgtatttatgttggttctctccttttcttttaaaacatccctataatggcccatgttttttctgggtaaaatattagggaataatggcatgatacaggcatgaagcatcccaataccaattgatactgccctggccatgaatgggttagttatwagcatactaaaggagtgaaacccttaacttttgggggcagctggctggctggagctgtggactggatatctttgatcatgatcatgggtactgtrttctttcactcagtgtgccacataaatattatagttctctatttgtgccatgatatgaaaaatattaggaagtgctgaaatatgaatgatgaagcaaaatattaaaaactagggtcttagggattccagacatgtgatttcacttcttccttctagttctgtcttagcattggctttgggggtagatggagaagttcagtggtggggagggggtcagatytaactgagattggatctagtgtggacactacaggtcatgactctttggagtggtctcagaagctggctgggtcctgggccaaatcagatggcatgggagcttcttaggggaggcgggtgccagaggttaactcagctgtcttccagaccccttgctgggagtctgtgaacccgagaaccactcaggtggctttccccaaagtgtgttctgtgcaatgctcatcccatgagctgcttctcagaaaaaagtgatgccaggtaaacttgggaaagactgctrtatctcctaccccttggagattcatactgtcattgtacattaaagtctgcaagaagtctgtagaaagtaaaccgttaaactggtgtttcccaaattcatttaagcacccaacaggtgcaggtgatttattagggaacccactttgggaagtgatgtgctagctaattccatttgccagggcttgtctgtgtrgggaatggtcccacaagctrgagactgtcgcctgccagactaatggagtcgcagacctgtgggacatctacttttcagtgtttttcatctttctttctttctttctttttttttttttgccatgaaatcctttcagaataagtaaataagtcttcccatgcactctcaagtatgcttataatataagcktgcacagcgtctggaagaatgtgcaggaaatagttgaggatagcttcttctggggagtggggctggtagggagagactattaactttcactctttayactctttaatasttggatgtcagagtggtttttacttttgcaataatgctataataataatagaaacaccacytaaagtccggcccggtggctcatgcctgtaatcccagcactttgggaggtcgaggtgggtggattacctaaggtcaggagttcmagaccagcctggccaaccatggccaacatcatgaaaccccatctctactaaaaatatgaaaattagctgggtatggtggcrggcatcaggagaatcgctygaacccaggaggyagaggttgcagttgagccaagatcgtgccactgcactccagcttgggtactccgtctcaaaaaaacaaaaacaaaaaatcaaaaaacaaacaaaaacacctaaagtgtaatcattacaataagaaacctcatgctgagtcagatagaagcagtgctggtcaatggaggctaaggcaggagcctgctcaccctcccctgcctccctcacggtcccaggaccagttggaaagcactctgtcacctgctaccctcatttacagtgsggaaaatttaataaaggagggaggtgacttgttcaaagttacacagcaagtgggttcagaactgagacaagaggccaaggccccagacggaccatttccttcttctggcactcccatgccaccccaccctctctgtttccggcccatctttccaaggcctgacaagtgccgcccccacaggttggacagagacttgaaccggctcccccaggacctgtaccacgcccgttgcctgtgcccgcactgcgtcagcctacagacaggctcccacatggacccccggggcaactcggagctgctctaccacaaccagactgtcttctacmggcggccatgccatggcgagaagggcacccacaagggctactgcctggagcgcaggctgtaccgtgtttccttagcttgtgtgtgtgtgcggccccgtgtgatgggctagccggacctgctggaggctggtccctttttgggaaacctggagccaggtgtacaaccacttgccatgaagggccaggatgcccagatgcttggcccctgtgaagtgctgtctggagcagcaggatcccgggacaggatggggggctttggggaaarcctgcacttctgcacattttgaaaagagcagctgctgcttagggccgccggaagctggtgtcctgtcattttctctcaggaaaggttttcaaagttctgcccatttctgkaggccaccactcctgtctcttcctcttttcccatcccctgctaccctggcccagcacaggcactttctagatatttcccccktgctggagaagaaagagcccctggttttatttgtttgtttactcatcactcagtgagcatctactttgggtgcattctagtgtagttactagtcttttgacatggatgattctgaggaggaagctgttattgaatgtatagagatttatccaaataaatatctttatttaaaaatggcctaatctgtatttggcatccgtggtgcctgaacatctcgcggtctcccagcctgtcccttctcctttccaccattggccctcacctctgtccaccctgccagctctctccgccctccagagtttccgctgcaccctcccrtcctctcccatstctgtctccctggcccatcccaaacaccagggtgggggctaggccgcgctcccrgcatgctggagagacagaggcccattgaggcattgcagcaggcacagagcgcccccttgtcccccaacaatccgcctttgtcctccagtcctggctgctgcagcttggtcctgggggtgctgcctgggctgggctccagctcacaccctccctaaaaggaaatgggagaaaggaccggccaaacaagagggttaaggttagagaagggggacacaaatgtcttcaggcttaggtccctgggggctcccagtcctgcccctgttcctctactcacatcccagctcctcccagtttcttttcggacctcctcctctccccttccttctctattccaggctgggttgggctctaagcaaggggagggattagagcctccttcctctctgcccctccccatgggtctctagggggctggtgcaggcagcagcagaggcactctgggcagctgggtgagggcccatctgggcaaggcccccakcgcctgccttctctcccggggccctgtgggcaagcctcctgcttcactttcaggtttctcgaagtgccttcttgctcctgtctgtttccccatcctgccagatttctgtttctcttgctgggcttttggcagtagggggctgtgttggtgggccctacgaagatgctcagtgctcgagatcgccgggaccggcaccctgaggagggggtagttgcagagctccagggcttcgcggtggacaaggccttcctcacctcccacaagggcatcctgctggaaaccgagctggtaacagctgcctcccaacctggtgcctccatctccctgacccccggctcctggccagccttatgccagcccccagctcacccttcagtakcctccttccccargccctctggacacctctcctgcccgcagctgccccttcttcgtctcctactctgccttcttgctgcctctccacccggagacatttacagcaggtttcagttgcagcaggaaggactgcagttagacagggtgactttttgggacattgaggaagcttgagacatagggatgggacaggggcaatgacagcctctaacatggccacttctcagcacgtccaagaagtctaactatcaaaaagggcagacttcctgcaactgcactttatctgtggtctgctgcccagaaacatctcttctcaggaaaggatcttcccctggttacttagcaagaccacagtgtagagttaaggcctctgcacgtatgccaccctaggtcatcagagctaaaggggctcccagaaaccactgggcagcatctgccttctctcttggcatggaatcaaaggctctggtccttgtcagggggctttcaggcatctgggggtggggaaagcattatgaggcagggggctcctcttggtccctgtggagtcgggtctctgtgggcacaactccaggggctggcattcacactgtacctatgaattactgtgggatagtgctcctgggagccatatggcttggccagactgctggggttgctgggtgagcagagtgggaggccggagactgcccttgaccggcaaatgccctgcaacggtggctcctgacaccaggggatagggagatgtgccagagtccttcctcccctccaaggacaggtagtaggtgccagcctaggggagcttccaaggaggggaaggcaaagccctggcccctgcctgtgtccccttcttggcatgttccacatgctcggtcctgcaggccctgaccctcatcatcttcatytgcttcacggcctccatctctgcctacatggccgcggcgctactggagttcttcatcacacttgccttcctcttcctctatgccacccagtactaccagcgcttcgaccgaattaactggccctgtctggtgaggaaccctgacccctagcccagtttggggcccttccctctcctctaaatgatgcattttcctttcctccccgagcttctttccatttccacaccacagctgggctttgtcccatgctatgccctgcactcaaaggtgtgctttgactcacactgatttcacagctgcagggccacgggcaatcaggaggaccacatccgctagatctactctcccactcagcaaaggtccagccccagccctggcctggcttgacccccccgggctggcatactccagccgctgtcccctgggttccagccccagcgcctggcttctggtcctggttgctctggttcatctgcttccactccctgggtagcagtgtgagcgctctgtctcttgaatgtgcttcatattgtgtgaggggtatcctatggaggggttcagaatccctcagggtcgggctgctggctagcctggaaaacttcagggtaacgccccctgccttctgaggtcctgttaaccctgcacccctggcccccaggacttcctgcgctgtgtcagtgccatcatcatcttcctggtggtctcctttgcagctgtgacctcccgggayggagctgccattgctgcttttgtgagttcagccctgcaggactccttagcccctcaagagctcaggctggtgcttgcacactttctgtatcagaagccacagccaggacttggggttctggcttgcacctcaccctataccttaacccaatggccctatagcctctgttttgccatccccactcccactcccacaggtttttggcatcatcctggtttccatctttgcctatgatgccttcaagatctaccggactgagatggcacccggggccagccagggtgagtgcctgtgctctgtggagaggagatgccctccccaccctagctacccatcctgatgtgggtccctacctggctctatcctcacaggggaccagcagtgactctggggctacctggctcctaggcccagccagccagagaggacagtggagcccagacacgtctccttgggattcactagcccccagcccgccaaaccccaccccagccctacacagcagtctggcctgagacgtcactggggacttatctgtggagcctggtgctccaggatgtggcttctcatgaagctctggccagaggaggggaacttattgggggagggggggtggaggggaggaatctggacctctaagtcattcccaaattaaaatattcaaattctactggtgagtctctttcttccccagaaattaggcaggtcaggaatgtcaaggagtattcatgggaatgttgccagagcaggtcgtggtctgtctctgggactgggtctgagcagtgaggatgtgggggctagccagaagaagctgaagacatcctccaacacaaaacttctacgctacacctctgtgtgcacggccactttgtggtgtgcctggtggctgggcatctggagttctgtgtctgagaaggcacagccttcctcatgggagcatgcatgcaccaccacacctgttcccgcaggttagtgggctggaggccaggsgctcgcctggggcgtgtgcagagctcccccttgtggtgtggggaagacttggcccacaggacgcagggagagggcagcctgaggtatcagaggagggagagatttcccaaaatgcgaatgctgggagagccgttgattatcagctggtccaatgccctcatttcacataagagaaaacaggcccagccaggggaggtgaactcatttgtgacagagctagggccagaacgcagctcttctgacacctaagcgagtgttctggatactgtactgagcctccttgtagctcagaaaagaatggccaactcttccctccactgcgggtccaccctcccagcttgccagctcctcagcacacatttcctgagcatctcccatgcacactgtgctgggtgccagggcctcagaggtgacggggggcctgccctttarcactcacaggctgggaaagagacaagctggtcaagagctcccyacagtgaatgctatgggaaggctcaggggagtttggagcagacactgccacagcccgggagtcagccctgctgggccgagacagacagatgtgcagccagacgttcctgcccagcccgaggagcccagcatggcctggctcagcagctccatcccagctgacgtgctatctcctgtcgctgatgtgtgtgtgttcccgccctgagatacaatccttcttctgsagcgctccttccagctgcaggccccagctcccaagtcctgcccgaaccctggatcttgaactctggtcagagcgctctgcttccttggtggcagccactcctctctcttggtctttttcctgcctcctgcttcctgttctcctatccttgtgtcctggctcaccatcagaactggcagcctctcctgggctagaaccaacaggattttgtgtttctctggtcactgctcacatttctcagggctttatgcacagtccattctcatggtctcagaggagggatagaagaggctccacttggggagtcagggagatggggtgccaggtgaacggttaaggaggcggtcagcagagcctggctgcaaagcccagtggggagtggggatttgctttgtgcagaacggggtcaggaccgggcctgtcccacaagcagctgtgtgatccaggccagactgtccccagtaggagcttagagagagcagaaatgtgaccacagtgtttccctgtacaggcacctgtgccatctgtgtctgtgtgagaaccaacatgaaatgagcaatgcccaggcttggtcctcatggcatattggtttgggctcagtgtygattggccccagagtctcaagatgccctcacggtgaggtgctgaatcataggaggcagggggagacccctggggaagacagggagggggctccctgggagttacttcctaggggctgactagaatggaatctctcccatctcctttcccataccttaattctcagccagctctgagccttttctggcattggtggaaaattcatttcagaaagaatgggtgtcctaggacacmtttaatcattgcagcctcaggggtggggtaggtggagagtggcttcaacttcggcaccaaaattctrtctcgtagcatcttggactggctcaccattttgatgccattgttttcttcacttttgaaatttctccctctccacccttgtgtggttgactgagcagaactgggactcacagctgtccacgtcaggcagaacacctcactcctctgcacctcggtctccttccttgtggatatgggatgccttggctctggcagctctgatacaggggctgggggcctccctcctctcaggccccctactgccctgatccaggatggacagctggcaggaaggacagatgggctcaggcagagtttggcactcatatttattacaggttggcaagagtgaggttcccgaggcagtgtcactcctcatcgtgcattttttgctgcaaaaagaataagaggtgtgagggggcagctggcaagagggagaagtgtrtggggacaaatccctggggctttcwgrggcctaagggagatgcccttggagggagaggcagggccccagggatcytgtggtcccacgttagaggcacttgtggtttagggggatggaactggggatctctgcagaagttccagtcagtggggggctgttttgagcaggagagtggattctcaggttatgtaagctatgggaccctcagaactgcctacatatagggcaagcagtgcccactctgaagggcacccatatcagggggcatgctaatgtggaagtgactagt

SEQ ID NO: 9892 - DNA, 27069 bp, Homo sapiens
ggtggagggaggagttggggctctgagggatggaccacaagctaagcagggctctggtactcactcacataggctggagggcagcatgcggaccctggtygggctcctgaccagcaaccaggccctgctgcagcttgaggcggctcggtgcctgcatgagctctctcactccgagcagtccactgttgctgaggcctgcctgccagccacttcttacctcctcacctacctctccagtcacagctcagacttcatagtaagccctgtcccttcctatcttgttcttggtttagattttaaaattgtgcttttgggaccagtttgagctggcaggtaggaggaagaaaacatgtttgcccttatgcctacagccatggctacacccatcatctccccaccctcttgtgagccgcaaggatagctgctccagcgtccccatcacctcccctccccatctccccacacgcagcctggcwtgaaacaggccaagcccagtgcttttgttgcctgttctcaggagctgtgtctgtatacactgggtaacctgatcgtggagagtgaggctgtgagaaggcagctcctgccacagggcattgttccagccttggctgcctgcatccaggtgactcctttcttcctccctgggcaacccttcctttgctcctccccacatgctccatctactttggttaggtagctccagcctctgccctgtgccaaggggctgaaagtctctgaagacctgatgacccagcttccagtcagatccttaccctgtctacttccagtccccccatgtggctgtgctggaagctctcggatatgccttgtcccagcttctacaggctgaggaagctccagagaagatcattccgtgagtaaaattgtctttagatgtgcagccagaggtgacccactcagtagtatagctcccggatgcctgaatgatttccaaagctgttgcacattttaaattcatgtgtctggctaggaagggctttgggtttggacactttcccatctgggcagggctttgggwttggacactctcccrcctgctatcagggtttggyaagaaccactggcatcttcgtggttcctacttacagccctgcttctgccagcagctccatcttggcctccactctccctcagcacatgctacaaatgttgcaacctggcccaaagctcaaccctggggtcgctgtggagtttgcctggtgccttcattacatcatctgcaggtaacagggcaattgggaaagtaccacagatcttccctggggctcccttccatgacattcaactctttgaacttgtgtctggaattgctatagtgagttttcctccctccactgtcttctctttttggagcccaggagacccacagaccttagctgtttctctttttttttgagacagtctcactctgtcacccaggctggatggagtacagtggtgcgatctcagctcactgcaacctctgcctcccgggttcaagcgattctcctgcctcagcctcctgagtagctgagactacagatgcgtgccactatgcccggctaatttttgtatttctaatagagacggagtttcgccatgttggccaggctggtctcaaactcctgacctcaggtgatccacccacctcagcctcccaaagtgctgggattacaggcataagccaccacgcctaggcaactgcttctcttcttaaaggtggaattgactatatacctagggactgcttgcttcctgttgcccagccaggtcagcaatcctctgctcattrgccatggggctctgtctactctggggttgctgctgttggacttggctggggctgtccagaaaascgaggatgcaggactggagctggtaggtgaagatgtcaggtgaaattctgggagatgtttcttgatactctggaatgcaggtaacctcttccttcttacacctgaccccccaatttgtctttgcagctggcatgccccgtgcttcgatgtctaagcaacctgctaactgaggcagcagtggagactgtgggagggcaaatgcagctcagagatgagcgtgttgtggcagccttatttatccttctgcagttctttttccagaaacagcccagtctgctccctgagggcctttggctcctcaacaacctcactggtacgcaccataatctgcccaggcctggacatttggataatggggatatttcctcatggcctaggctgaggtgggtagtattgacaggggtggtgggggaaagcagtttttcaccctggtacttctcttccagcaaacagtcctagtttctgtacctccttgctctccctggatctgattgagcctctcttacagctgttgccagtatctaacgtggtgagcgtaatggtatgtattggggttacttgaatccaagatctggtagtyggattgtatgggacagcagtcctgagccctcagatgtacccttagttgagagccagcaggtggtggtgtgtggcctcagggcccaaccaatctaggtgtgtgtcccttaaactggattatttatccttggacaaatcaactaaccaccttaagcttcagtctcctcacttataactgaggataatcttgcatcatagggtagttgtaggagtatgagaacatgyatgtagaagagcttggcatggtgcctgggcatgtggtcaccatgtcatatattttagctattgttatgatctktgtgtttcattctttgtagactatatatgtgtctatctgcaggtgctcacagttctgtgcaatgttgcagaaaagggtcctgcttactgccagcggctrtggccagggcccctgcttcccgccttgctgcacacactagccttttctgacactraagtagtaggccagagtttggagctgctgcatctgctgttcctgtatcagccagaggtataggtttctggcccacatcctcagtcacccctgttctgaagccacacagtggctcccttcccatccagtcctaactatagttgtttctctgggcctggctaacytatataggttccatgtcagaaacttcatcctcttgttggggaatgcaccctctggagtrggctgacccatgaggctgtgggaattgagtcttaggacacagagaccaggtgtgttgaattttcttccctgcccctaggctgttcaggtcttcctgcagcagtcagggctgcaagccctggaaaggcatcaggaagaggcccagctccaggatcgtgtgtatgctctccagcagacagctcttcaagggtgatcttgtttctcaatgtcactcattcccctctctcttaacatcaagcttgtttgtccagtagagcctttggagatttaggaccataatgaggtctcatgttctctgctcccacacctaagccaagacctttgggtcccagctcctccccttccactcagcactatccaggcaggaggaccaaaagggactcagtgtggtctacttactctggggccctagaatccctgmccccccgccacccttcatgtttgcttcagcagctggtagcttttgatgagacagaataaagttttatttttatattaagctactttgcctcagtggttgcacagtaaggggtagagggtagatgaggacaagaacaccctgagaaagtattttacagcacaagctttatgaggaataggagaacacatttttttcacattatactaagtccagcagagcccaggctctggggctgttgctcttaatcctcagtggaggcttcaggctttaccacttagaacgttctccagggctctggttacctgatcagcactgaagttgttcaaagggacattcgtctcttggccaaatgctgaagagagagagggaggtgtctttaactattctgcaccctggaggctaccaaagtaaaataaaagatctttgtctttatcttagtcttgttaagacaggaagagtattaaagagatatgatcaaaatacatttggtatgcctagaattaatacaataggtctcaaacacatctaggaagcccaagtccaaatagaattttggctgattctggatggccrcaatgggttgtttcagggaagctttcgggggcactgtaggcatttattattaactacggtgagcaatgtattgcatgggtccagcctcagctgggagcccattctctctctttttttttttttttttttgagacggagtctcrctctgtcacccaggctggagtgtggtggcacgatctccactcactgcaacctccacctcctgggttcaagcaattctcctgcctcagcctcctgagtagctgggattacaggtgcccgccaccayayccggctaatttttgtatgtttagtagagacggggttttaccatgttggccaggctggtcttgaactcctgacctcaggtgatccacctgcttcagcctcccaaagtgctgggattacaggcgtgaaccaccgcacccagctgggtacccattctctaggctcccataggctatctaacataatacccagcacaatacactaaagttactcgtgtctatctcctcctgtagtctactggcttttggaaggagaagcttttttccttctccaattattagtgcatgtctaatgtctactgtgtctcacagatatctactctsagaaccaatctgcttaaggtggtcactctcctccacctcctcccgtcattcccagggcaccatatagttaaaagctgtgattaaaatcctgttattcagtatgtataaacatttattgcatacctacaatgtgttaggcaacatgataggaaaatttsattttgcaatacattgccatgccagtcttagaggggtaagtgcattctaggaaggggaataaatgtaaaggctcaatcctgttaaactctagctgcatctaaagttgcagctagagtttaacaatagtgcaaaacaaagttttgattccgttttctaatctctacagtgagaaaagaagaacacgcttcctcctaactaatgaagattaaatgagttaggcagggaagcactcagcacagggcccagctctatgtgcaaaattactgagattctcacacactacctggactgacwctggctacacgttatttggagaaactatattgactaacttctctcctgtctgaagcccattcttaactacaaaaacgtcagctcctggtccctacgcaggattcggtcagcctgcatacttatgttgcccggaatacaacgcatcatataaccctgcgaatataaatttcttcatggaaacaagatcaacagcaaggctaaagtccgagttctagtttctccacgggtttctgcacgaccttgggcggtcccttctcttctcaaacccttgttcccctaccggagccccagacccytggcgtcccgcactcaccgtagcgggcccagagcttgggctgcacatcggagcattcgcggattaggatgggtaggtcgggattcgccttcttcagctccacgtagcgtttctcaatgaagtccctgcggggccsgagagagcgccgcgcgtgctgtgggcgggggcttccctcaacttcagggaggtcgaggtcgtgaccctggcgtcccgaagccygcccgcctcaccacgccgcgcctcacctgacgccctggctgccgggcgagcgctgacataagtggatgcgaatctcacgcaggcccasctttgccccgactcctcgacttgctgcggccgccgccatccttgttaatatcgaagtcgccaattccaggtcttcaggccaagtgcyccggtctgaccaaccgcggaccctaaagcctagcccataggctgcatgaggcaggggcggggtaaagcttggccaatgatataaaagyattgtaggaccgctgcgaggtcaatttctttgcgctcggggttggtcggagggaaaaacaggaagcggaaaggctgcgaacgcaaagcagtgtgggttgattctgaggtgcactgtgggaaagagcttgtcgctgcggtgttgytgttggagactcgattgttggtgacagcgaaagaacgataacaaaatgccggagcgagatagtaaggctcaggccatccgttatttcttccccatggcacttggggcacttggcgcattattgtagcttctgagcttaagccgggtgtgtgtgtgtgtgtgtgtgtgtgtgtgtgtgtgtgtgtrtgtrtgtatgtgtgacgcttgagcccggagaagccacagggtcctaagtgaggccgacagctccaaactccgtccccagtcctcactcctactccaagtgatgatgggcggcttttgtgcgtggatcgctttcccccagtcctgtccccatacttaatcctgggttgcgcgtatttatcttttacgtagtattttagacgtgatcttccggaagtcttctctgatcctccagcgcaggattagggtcctctgctttgtgctcccacagcttcttgtagtttcctatttcagcacttattacatygtgttgacactgtcgctgttctaacttttgttctgtattgttcactactatatctcaaatttttgcataggatctgacacgtaagagactgattaaattaacgtcaattttttttgtcaggtgagccgttctccaaccctttggcccccgatggccacgatgtggatgatcctcactccttccaccagtgagtattttgtgctaggaccatggaaatgagttgggcaatgaatagaaaagtggtggtgatggtgaaagaattctgaatgtcttgtcatcaaggatggtaaaaaattatacccgctggccctttatctctgtgagccttaactggatcaggccaagtgcataagggtattagaagggaaattcctgcaggaaaggtgttaagtttttttttttttttatacgtgttgtgtaattacacattatataggaattacttcttccaatagcaaattaaaacataggaaataagggtaaaatcatctttttattttttttgagactgagtttcgctcttgttgctcaggctggaatgcagtggtgcgatctcggctcaccacaacctccgcctcccgrgttcaagcaattctcctgcctcagccttccgagtagctgggattacaggcatgttccactacgcccggctaattttgtatttttagtagagatggggtttctccatgttgatcaggctggtcttgaaatcccgacttcaggtgatccacccgcctctgcctcccaaagtggtgggagtacaggcgtgagccaccgtgcctggcccccgataaaatcatctttgataacatccccaattccagtccatttcttttttyttttcttttcytttcytttctttctttttttttttttttgagacggagtctcactgttacccaggctggagtgcagtgatgcaatcttggctcactgcaacctctgcctcctgagttcaagcggttctcctgcctcagcctcccaagtagctgggactacaggcatgtgccaccatgcacgactgatttttttttttgtatttttagtagagacagggtttcactgtgttcgtcaggctggtcttgaactcctggcctgaagtgatccacccgcctcagcctcctaaagtgctggcattacaggcgtgagccaccgtgcccagcctcagtccttttcttagaagtaaccacagttaccttttttggcatatcttttcctcccgttgcccaggctggagttcaatggcattatttctgctcacagcaacctttgcctcctgggctcaagcaattcttctgcctcaktttccccagtagctgggattacaggcatgccccaccatgcttggctaatttttgtattagtagagacagggtttcgctatgttggccaggctggtcttgaactcctgacctcaaatgatctgcccgtctcggcrgcccaaagtgctgggattacaggcgtgagccactgcgcctggccctcctactcttttttaaatgcatttatacacatacatgcatatctgaggaaaacacaacattgctttgtgatttaaaatatttgagttaaatgatattatgctgtatatatcatttttgcaacttgcttctttttaaaccctgctcagtgtttctgagattatctttcagagcagtgacaagcattccctccttggctaaactttagtcaggttccccaaagagtcccatttttcagcaggactcatccgtggcctgctgagcacagttttaacaaagaaatcaaccaccgctccacccccatacctaaccaagttgcttttagtaattttctataaattctcacttgtccctgttgtattcrgaattaagttcagtctctctactctattacaatggtcttgactcttgttacagtagtcttcaataaagtcttccttggggagaagaggaacttgattagatatcaagttggattggatatcaagagtgggaaaactttctgtgaactgacttaggattcctttttaaaactgaggtcrgcaggccaaggaagagccctagtcagaagagagctttaaaggagtctgactttaatttgatcaagagaggagtctttgttagtgtaccaattaaaataatctcttgtaccattagtgctgtctttccctctttgggaaacaccatcatagtttagtcagtctccagctaataaacgcttagtctgtttcagactgattcttttcttttttttatttttttgagacagagtcttgctctttttgcccaggctggagtgtaatacctagatctcggctcactgcaawctccgcctcccaggttcaagcgattttcctgcctcagcctcctgagtagctaggattacaggygcccaccacaacgcccagctaatttttttgtatttttagtagagatgggatatcaccatgttggccatgctggtcttgaactcctgacctcgggtgatccgcctgcgtcagcctcccaaagtgcggcgattataggtgtgagccactgcacccggccagactgattattttcaaggctataactgaattaaatttacaggccttcttatatacatatgtcagtaatggaccaggctaaatataaataaatggagttgctggctcataggatatatatacttaaattttaacaaatactgcaaaattgcccttcaaattggttatactggtttacattctcatcagcattatatgagagagtccccttcccaaattctcactcacacttgatttatcaaactttytggtagttaacactctgatgcattaaaagtggcatggcatatctggtcgggcgtggtggcttacacctataatcccagcactttgggaggctgaggtgggcagatcacctgaggtcagaagtttgggaccagcctggccaacacctctaataaaaatacaaaaattagctgggtgtgttggcgggcacctgtattcccagctacttgtgaggctgaggcaggagaattacttgaacccaggaggcagaggttgcagtgggctgagatcatgccactgcactccagccggggcaacagagggagactctgtcttaaaaaaaaaaaaaaaaagctgggtgcggtggctcatccctataatcccagcactttgggaggccgaggtgggtggatcacaaggtcaggagttcaagaccagcctggccaatatgggtgacagtgagactccgtctcaaaaaaaaaaaaacagtgtcatatctttgttttaatttgtatttccctgatttctgttaatttaatcatgatttttacttgttcctttttcatttcttattgagtcctaatatttaaaatctttgccttttcttctagatcaaaactcaccaatgaagacttcaggaaacttctcatgacccccagggctgcacctacctctgcaccaccttctaagtcacgtcaccatgagtaagtctttgggtgatccaacctgtctcccaacttgtttcttgctccttcctatttctttctactaagtagaatgacttttaatagtccctcaggtatttatgatactctctaaagtttgagaactgcccacctacaaatattgrtgtggatttctgcttgattgaaagtgttactttgatcagtattctaggtctttctaaaaatcctcaaggagacttcttggggtttctggggctgtggcaatattttgctatcagtgaatttctcgtctcttctaggatgccaagggagtacaatgaggatgaagacccagctgcacgaaggaggaaaaagaaaaggtgaaggaagggtgaagggttttagattttaaggtggatagtgtttaggggaaagaagtaggggctaattatgaagctagaaactaagattttgtcttgaggctctctactttcttaatgaaacagagtgatacttagagtggcagtagagggctttggaataggcctatctatattttaatctcatcttcgctagtttcttggtggataacctagacatttgcttagcctctctaatccacagatagaatggagatmcagtagcaataataacttttatcaggatgtcatgaggatcagctgtgaaagtacatgtaggcatttagcaccaatgcctggcatatggtaaccacccaataaatcttgacggccatcatcattattatatcatcatcgttatttatatgatacgaaagtttcaggacctggtacttggcttttcctttattctgagagtggaccagcaaataatacgttcttttcagctgaaatttagaaggtggtaaaaattcagaagattttctgatttttgtgtggaaaagtcttatatctatagagaattggtagagttgggtggtattaaaaagttctgaagtgacagatggagtgtcccaagttggcactggaaaagtatatctataagctggaagaagttgtagttctgattttgagtaactacgaagaggtggccagcagttctatcaggacagacatgagcttttccccatagagagtasgttggagatgtagggaagcaagcaggaacagttctgttgaccttgaggtagcagctgatgagccttatacatttgcctttctctggtcacagttattatgccaagctacgccaacaagaaattgagagagagagagagctagcagagaagtaccgggatcgtgccaaggaacggagagatggagtgaacaaagattatgaagaaaccgagcttatcagcaccacagctaactatagggctgttggccccactgctgaggcgtgagtactgagggaacagggcatggttccctcagcatccgagagtcatgcaaatacaatgtgaactcttcctcttactttcctgccctggagcctacaataagcgatttcagaggcatttgccacccacaaagggctgttcttttttttttttttttttgagatggagtctcgctctgtcacccaggctggactgcagtggcacgatcttggctcayggcaagctccgcctcccaggttcatgccattctcctgcctcagcctcccgagtagctgggactacaggcgcccgccaccacgcccggctaattttttgtatttttagtagagacagggtttcaccgtgttagccaggctggtctcgatctgacctcatgatccacccgcctcggcctgctgaagtgctgggattacaggcgtgagccaccgcacctggccccccaaccccctttcccccaccccctttttttttttttggagacagagtcttgctcttgttgcccaggctggagtgcagtagcgcgatctcagctcactgcagcctccgcctcccatgttcaggcgattctcttgcctcagcctcccgagtagctgggactacaggcgcccaccaccatgcccagctaatttttgtatttttagtagagatggggtttcaccatatccaccaggctggtctcaaactcctgaccttgtgatctgtccgccttgacctcccagagtactgggattacaggcgtgatccaccacgcctggacagtactgttcttatgtggcctctttcattatacagggacaaatcagctgcagagaagagaagacagttgatccaggagtccaaattcttgggtggtgacatggaacacacccatttggtgaaaggcttggattttgctctgcttcaaaaggtgagtcctggtggtcaggtggggagtaatactgtcgtgctgaatgctcttgtatgggtctggcaagatgaggagggagattcctgagagttcagactgagtagaagaagggctaaagatggcccctctgaaaagctgattgctactcatccttcaagtatcaggccaaattttatttccttggagaaaccttccctgatcacccaggtgtggttaagcacttcccttcacctcctgcttcctgtacctttgcatagcccttctgtttcatttaccacagcagttattgtactttgttgaaattgtttaatttgtctgtctcatctgctataagctccattagagtaagaacaatatctgtcatgtttaatattatattcttagttcctggtacagtgtggtgtagtggatgttcaataaatatataaaatgagtgtcctaaccctgcttgctttcctgttaggtacgagctgagattgccagcaaagagaaagaggaagaggaactgatggaaaagccccagaaagaaaccaagtaagtaaatattatggaaaggttgagaatttagaaaggtgggacctaaagttagagcacatttagcaaaaataaaacttttttgtcttttcaggaaagatgaggatcctgaaaataaaattgaatttaaaacacgtctgggtgagtacagtttctatactagtgactatgcattctggawgaattgtacggaatttaatgctctgggaaggatatgcttctcctttcccccaacctcctttcttctttctttctttttgagacagtgtctcacttaatcgcccaggctggagtgcagtggtgtgatcatggctcagtgcagccttgacctcctggactcagcctcttgtgtagctggcaccacaggcatgtgccaccatacctagctaatttttttttttattttttgcagagatggggttctctgtgtattgcccaggccggtctcaaactcctgggctcaagtgatcctcctgccttgacctcccaaagagctgggattctttcttgcccccaaaacaactaactcccataaaatactctaataagactcagacatagatttaattatttcatatgtcatttatgtctcctcaggtagattgaaagatttttcagtttggggcttatgagttaaaagaagtaacatggttagtgattaaaagttcaaaayttggagtcagagagacctgagtttaaaccttgatgatgaaacagcactaagtgtatgattttaggcaactgactttgctgtttgttcatctgtaaaaattgggttactatttaccacatgactttattgtagggatgaagaaaaatgaaatctataacatgcctatcatattgagcaggtagtagagctgttttttccatcatcatcaatattaccttaaacttcatccttcttcctcacaggacttaatacaatacaggtgcatagtgcccttgaagaggcaatgtagaagagtggacaggagcccaggctttggagttacatggcctggttccattctttgctccattacttagtagatacatgactttaggtaaattacttaaatctcagccatagtattcttatcagtaaaaaggataataatatccacttcatagggctgttgcaaagattaaatgaygcaaagcttgcatagcacttggcatggtggctagcrcagagtaagcacataagtgacagctrttcttgtagatcctggctacttgctgctcttctccttattgtaggccgcaatgtttaccgaatgctttttaagagcaaagcatatgagcggaatgagttgttcctgccgggccgcatggcctatgtggtagacctggatgatgagtatgctgacacagatatccccaccactcttatccgcagcaaggctgattgccccaccatggaggtgagtgaatggaatcctgagagcctatcatgtgagcctcaagcctgggaatcagcctggcctctgccccgtgtcccttgtccaccatgtcaccaagtgctgttcacttttacctcctaaatctcaactgaatccattcacttttccactttttcaccaataacattccagtctaagctataatcatttgctggaactattaacttactatttttttagagaccaagtctcactctgtcacccaggatggagtgcagtggtgctatcttggctcactgcaaactccgcctcccaggttcaaacgattctcctgccgcagccttccaagtagctgggactacaggcattcatcaccacacctggttaatttttttatttttagtagagattgggttttaccacgttggctaggctattcctgacctcaagtgatccatccgccttggcctcccaaagtactgggattacaggcatgagccactgcgccagtcctctggagctattaaaaaggcttctaattggtttccgcacttccactctggtttccgcacttccactctgatttgttattatatcttgttattgaggtgttattcacatgccatataattcatcctttaaagagaatttttttaaaaatttttgtggatatatagtaggtatatatatttatgaggtacatgagatgttttgatacaggcatataatgcataataatcacatcatggaaaatggggtatccatcccgttaaacatttatcttttgtgttacaaacaatccatttatactcttttagttgttttagaatgtataaattattactgcctatagtcaccctgttgtgctatcatgtagtaggccttattcattctttctatttttttggtacctattaaccacccctacctcccctacccttctaaaatatacagtttggctgggtgcagtggctcacacctgtaatcccagcactttgggaggctgaggtgtgaggatcacttgaggttaggagttcaataccaggtgggccaacattgtaaaacctgatctctactaaaaattagccaggcgtggcggcatgtgcccgtaatcccagttactcrgaaggctgaggcatgagaattgcttgaacccagaaggtggaggttgcagtgagccaagatcgtgccactgcattctagcctgggcgacagaatgagactctgtctccaaataaataaataaaatgtaaatttttgtctcactacagtttagaagcttttagtagtatctcattcttaggataaagagcaaaatctttaccatgactttgagcctctgcaacatctggcctttctagaatgttctagactcctgactttcttgaatggtcttgattcattttgatgcagggcttttgtgcaggctgttttatctctggaatatcctttcacrgcacttcstttccctcccttcacctactgtattgtaattcagtctttagtttgttaagtgaatgaatgaataaatgaagagatttctgctgagtggtttaacattcttgtttcttggtattttcaggcccagaccacactgaccacaaatgacattgtcattagcaagctgacccagatcctttcatacctgaggcagggaacccgtaacaagaagcttaagaagaaggataaaggtacctggagggttagagagagaarccttacccacagaggacgtttggggataaaaccaaggtctcctggagctttctgtctccagaatattgagaggctcctgggaagcagagaaaaatgggagtactggagcattggcaaggagacagttacagccagattctgtctccttaacctacctaagaagcagtggtcaggtctgaagcatgagkgatggagagtgggtagcttatgtcctatttatttattttttttaaaagagattttttggtgaaaaccagaaaacctagacagattctaaaaaggctctaatacttgaccgacattttattttattttatttatttattttttgagacggagtctcgctctgtcacccaggctggagtacagtggtgcgatgtctgctcactgcaacctctgcctcccggggtcaagcgattcttctgcctcagcctcccaagtaggcactataggcactataggcacgcatcaccacgcctggctaatttttgtattttcagtagagatggggtttcactgtattggcctggctggcctcgaactcctgaccttatgatgtgcccacctcggcctcccaaagtgctgggattacaggcatgagccactcttcctggccttattttattatttttatttatttatttattttgagacgagtctcgttttgtcgcccaggctggagtgcagtgatgccatctcggctcactgcaacctctgcctcctgggtttaagcaattctcttgcctcagcctcctgagtagctgggattacaggcacctgccatcacacccggctaatttttttgtacttttagtagagatggggtttcaccatgttagccaggctggtctcaaactcctgacctcaagtgatccgcccgccttggcctcccgaagtgctgggattacaggcgtgagccaccgcacccagccttgacccacgttttaaacagaagatgtttaaaagggcattaagagctggagaggatggtgaagttcagtggaaattaactgaggagtatgttcctgactcctctctttaaatttcagggaagctggaagagaagaracctcctgaggctgacatgaagtatgtatcctagcccctggcatctgatcagagggagggggtctgtacatttcttgtgtctggcattttggggaggtgctgacatgagaatctggagaaatggtcagggggagtgaaggtgtatgtgtgaatttggccagctagtgakctccattttcccagtatttttgaagacaytggggattacgtaccctccacaaccaagacacctcgggacaaggagcgggagagatatcgggaacgggagcgtgatcgggaaagagacagagaccgtgaccgagagcgagagcgagaacgagatcgggaacgagagcgagagcgggaccgagagagagaagaggaaaagaagagacacagctactttgagaagccaaaagtagatgatgaggtgagatgtgggcccttagtaccaggtgatggagttgcccctctctggaaatgtgagcaaggttgggtaaggaattgtttcaaacttgggggagggatgagtaggaatctctcatggtaacactaacttcacattttgtgttctttccagcccatggacgttgacaaaggtgagttgtacacacagcatctcacagttgctctagcagtcctgctttcccctggtagggctcagagctggcaacggtgggattgggggacctcctggttctgggttcttgtaagaactgtgtcttgctttattgaataggtggagttccctccaccttcctgggccatggcagggcatatttgctcttagatataattcctgtggccctggggttctgaggaggtgaggtagaggtcaagtatggaatgttctggataccctaccctcatctcaaccagagtgactcattaattggagtttgtttaaaactttgttagacaaaagggttctatgccttaaaaatgttttttaagtgtgttgtggggaggaggttgtgagagcctcasttcaagrtctgggctgagttctcttttctcctaggacctgggtctaccaaggagttgatcaagtccatcaatgaaaagtttgctgggtctgctggctgggaaggcacagaatcatatcctttattttaatacgttcctgggttccagagaactggtctctttactccaacccccmmtgcctccctgctccctcctaccctgcccctctccttcccttttaygctgaattttgacagaatgaaaccatcccttgttccttcccagagcacccataacagctcacagcccactcagaattttcatgttggggcttctagcccttggccccctcctggctgaagctttacagcaataggtagaatcctgtgtagtgttttctttaacatagcatatgctgaagaagccagaagacaaaaagcagctgggagatttctttggcatgtccaacagttatgcagagtgctacccagccacgtatgtgaaacctggttaaggaagggaggctgggatgattgggaaacaagttgggggtgaaatggaaatttgattcgctaagtcccagggctacttcttttttttttttttttttttttggagacagagtctcactctgtcacccaggctggaatgcaatggtataatctctgctcgctgcaatctccatctcccgggttcaagcgattctcctgcctcaccctcccaagtagctgggattataggcatgcatcaccacacctggctagtttttgtatttttagtagagatgaggtttcaccatgttggtgaggctggtcttgaactcctgacctcaggtaatctgccctcctcagcctccaaaagtgcggggattacaggagtgagccactgcgcctggcccaaggctacttcttacttggatgaactattttattaggctctaagtgggaggtctagggggtggtcattcctatgcagataacctcttagtcgggtaggtttccagatgaagcatagsgtcagggtatgcaacatctgtttaactcttgcttctccttaggatggatgacatggctgtggatagtgatgaggaggtggattatagcaaaatggaccaggtatgtagttagaaggatggtgggcgcctttgggcagttattatttgttttacatgtatctccttccccactcctaaaaaatctatctcatttactggrccccaccctcctttrgctgcagcagtagaaacagcagcattgagggtcatgagcagcttaactatttcagagtctttgcacaagatcaaatgacatagggtcaaaaatctattttttacttcctatagcaaagtgccaggctttgattcccatggtaggcagtaarcaagcatcaatgcataagtagaaagggcagaaaaaattgcagtctttggaaaataactaaattttattctagccaggattgaagttttcctctaagtcttaagcaaaattaaaaagaaaaaaaccactaatgccactaatagtgaagaagtctgtgttcttcccctgagttcactgtattgaaatagcatggtttaatcttggagccttgtttaatcctgcctctactgtttattagttttgtgaacttgccaagytctttcactgtttatgcctcagtttcctcatcaggaaaatggagagaaatatagttccctcttcatagattttatgagaattaagtgagatatgcatttagtgtacagaataatgcctgtcacatagtaagtatgtaataagcatttattattacttatcagggtatgatttatgaattgtggaacctgggattatgggagagtctggcttcaatcaagggctgaaattccatttccactgacatctcttccttccccatcccccrattctgtcctgcaacagggtaacaagaaggggcccttaggccgttgggactttgatacccaggaagaatacagcgagtatatgaacaacaaagaagctttgcccaagtgagtcggtactgaatatgggcagggtgtgaggaggggtgtggggatttggtggaatagtgcatataaggttagagggtgtggtctrgctgagatgttccccactaagttctttgcccacaggactctgggaaaacctcgccactgctatgcaatctctgatgcattctttcccaactgcttttttcagggctgcattccagtatggtatcaaaatgtctgaagggcggaaaaccaggcgcttcaaggaaaccaatgacaaagcagagcttgatcgccagtggaagaagattagygcagtaagtaggatggccccttgggtgggagggtttcagctgggagaagacattagcctgcagattcaggaacaggcaaggggctggagagccatggaaatgagaggtcagccttgggcctcaggtgagcttagatgggcagcttggtgatagactatcctgttgtttttgcagatcattgagaagaggaagaagatggaagctgatgggtgagcggcattattcttcctctgtgggactggtgggaattgcttagtgtattgatcttatactgacccatttctccttccattgcagggttgaagtcaaaagaccaaaatactaatcactagttacaaccagagatgctccacaaggatatgctccccackgwtttctttctacaatttccaaaggttgcaagatgtttttttgtggatgaatataaaattttattgtgtaattacttggttccattaaaattggttaacttgctattttcttkgttgagcatgtcccctccagtgcccttgaagcaccaagaacactaattccactggttgtgtaaaatcacatgcagaaagtcatcagtcctttcctgagctgtggttctagattcctagacagtaaggatgctctctagccagtgtgcccagtagagaagagaataatgatcctcactgatgggcaagaggtggatagaggaatgtaagtatgattggtctcaaatgtcagactcattccggcccatcttcaggcctagtccctggggaaagatttcctggggattgctgtcagcctgatgggctgctaatctgatctccaggctatgaaggactgggctctggatgaaggcatctaatgaaaatcacttatgggtgggaaccaaaaccttttatgagtttatgtactatgagctttattaatgttgagtacaaatcactgtctccttggctaaaggtgtaaccttagggaagtgctttgggtttagagctgatatagtgtggccctgcaggtacaggaattcctatcctagaccagaagggtttggtgcccttcatcaccctgaaacatttgccaaggcccagaataggtctgttgacctttgaatcacaccattcccttcccttttcttcccttctgctcattaccagcactttggcctggtgctcatcattaggtgtcactactgcttcctggctggatgccacgctgccactgtctaccctgagcccaagatttgtggcctcaccagatccaagaaagctagaaagtcaccttagccattaccttgtctttgattatattcaccttggtaggacaggtttttgtgaggaagccagtattgtgcatggcatgtaagaggctgaaattgggccttgctgcaatagcacctagaatggctaatttcagacaaatgacaccatggttctatggatgtaggtaggcagtcccaattattaaaaatggtcacagagacatggcacaggtgaagacatctggagagtcactaaaagcaagacctggagattgtgggtttgaaattcagtttctgaggccaggctcgatggctcatgcccacagtctcagtgctttgggaggccaaagcaggagagtctcttgaggccaggagttcatgagtctatagctatgcaggaggatcgaaccgaagagttcaaggctgtagtgagctatgatcacaccactgcattctgagcctgggtgacagagcaagaccttgatttaaaaaaagaaattcaggggctgggcgccgtggctcacgcctataatcctagcactttgggaggctgaggtgggaagacacgtcaagagttcaaggccagcctgggcaacatactgagtcctcgtttctacaaaatatacaaaaattggccaggtgcggtggctcacgcctgtagtcccagcactttgggaggccaaggcgggcggatcacgaggtcaggagtttgagaccagcctggccaacatggtgaaaccctgtttctactaaagatacaaaaaattagctgggcgtggtggcatgcgcctctagtcccatctactcggtaggctgaggcaggaaaatctcttgaacccgggagacggaggttgcagtgagccgagatcgcaccattgcactccagccagggcgagactccgtctcaataaataaataaaaattagccaggcgtggtgccgcgtgcctgtagttccagctactcggaggatcgcttgagccgagcggtgatcgtgccactgcactccagcctgcgcgacagcgcaagaccctgtctcaaaacaaagcaaaacaaaaaagaaaaaaaaattcttggtaactgagcactgcttgtccagcccattgagtttctgtagacaaattgtaggaactggcacagyaaactggccacaaagacgttaggggcgtggacaccagctgcttgagctgcctgctgtcccagactcccgtatgtcatcgcgcagcgtgggattttgcggcttcctgacagcccaggctgtcgcttgacttgatcttgggtttcaccaagccacgaaggactagcgtccctstctcctatsccaagggcattaagcctgtctggatgaagtaggagaggaaagatttacacgcagttcycaactttacrtgacgtgactagggagggaattgacggtcgcaccgtctacctagcccaaacggggtcacagcaggacaaggaagtagcmgatctcccagatgcggtctcttcgctccgctccacccrcaccagcagcggcccacccacctctcctgtaagaggaagaacgtcccggagayacttccggccccgccccccgaggcggaagcggagtgccaggctactcctcccgcagtgtgggtggttccgaggctgactaccctgmggcggcgcggytcgcagtccttctcagcatggaccgcacttgtgaggagaggcccgctgaggatgggagcgacgaggaggacccagactccatggaagccccaacccggatccgggacactccggaagacatcgtgctggaagctccggctagtgggctggcgttccatccggccygtgacctactggctgcaggggacgtggacggggacgtgttcgtgtgagagcggggcagggccggggcgccgggtctggaagcttcccgggggtggacctgggaacaggagagatgagagaaagtkgcagggagacaaattttgcaagattctttgggtccartttattcagtaacattcggctcttctatcacaccaatctgttgaaagaactggaatgtcgtgacagagcccagataccgtagtaggccaaaaagccctttaaggccttgttatttcccaccgattattatttatttacttacctatttatttttgagacggagtctcgctctgtcgccgaggctggagtgcagtggcgcgatctgggcwcactgcaacctcccccttccgggttcaagcagttctcttcctcagcctcccgagtagctgggattataagcgcccgccaccacgcccggctaattttttttgtatttgtagtagagacggggtttcaccatcttggccaggctggtcttgaactcctgacctcgtgatccacctgccttcctcccagagtgctgggattacaggcgtaaaccaccgtgcccggactcctaccggattattatattgtgcccgagacaggctcagcaggcccctttaagtgatttttcaaaccacaaatcttggctcacgcctgtaatacccgcactttgggaggccgaggtgggcgggtcacctgaggttggagctcgagaccagcctgttcaacatggtgaaaccccgtctctactaaaaatacaaaaattagcccggtgtggtggcgcgggcctgtaatcccagctacacgggaggctgaggcagaagaatcacttggattcgggcggtggaggttgcagtgagccaagatcgtgccactgcactccagcttggacaatagagtgagacactcccttgattaaaacccttcaatggtctgcttttaggatttagtacaaatttctcaatcctgccttcaacgccctgaccatctgtgctcattcatccataccttttaaaaatacgtcttgggccgggcgtggtggctcatgcctgtaatcccagcactttgggagaccaaggtggggtatcacctgaggtcaggagttggagaccagcctggccaacatggtgaaatcctgtctctactaaaaatagaaaaattagctgggtgtggtggcgggcacctgtaatcccagcttctygggaggctgaggcaggagaatcgcttgaacctgggaggtggaggtggcagtgagccgagatcgtgccattgcactccagcctgggcaacaagagcaaaactccatctcaaaaaaaaatctcgaaacctcagcccatttgcatgtgctattctgtccggaaaactcctttcccctcacttttacctactatctctgagtttccaggatctcttccctcttcctctctccccagactaaaattggttacctgttagatgctgccatggcaccaggtgccatggtacctttcccttaataatgaatggttggtaaccatatgtccatttgtgtaattatttgaatgctgtctccttcactaatgtttttcaaacgtctttgaccttgcctcacagagaaataccttttacattatatatgatgctctgtgatacaattgctgattttattctattattgtgtacatgtacacaaaatgctgatcgtagcttactagtccgttatatgactagaatgtgaaaaaacactgttctggagtgtaatctgtcatcggttttgttctctrttttatctccaacctctagtctagggtagatgctcaacacatgtttgattttgaacaaaagatacaggttagaggcagtggaaaagttgaagatgttatgcttatcagatttacttaatgaatttaaacctcaacccctcattagctgtaatggccttgagcgtgttaacttctgtattttcatctttgaaagggggaattatacctacccttgcagaggggacaagtttgcagtacagcacctaagcagctcttcaacaaatgtaggttcccttctactactatccatatttatggtgccaggcacttgggagttgccctagacatccacctttcttcacattccacacaactttgttgcttcccttgtcttaaaaaaggttctggaggaaaattcttggttctccccttccccaccctcagccatgactattgtgaaaaggttccttttccgaggattaaattcaaacttctgcttggctcatgtggtctcatgcccacccyagcccatctttctagattcagtcatgctactctcctgctacaaggaaccctcctcattccttatctctgctscctccagtatctggcccttgctctctgccaggcaaattctactcttgtatgatccaacccacatgtcaccaccttagctttccagggctctcttctcccttcccaagtattcattcaatttgtgaatgtttattaagctactttttcacgttcagcactgggatagagaaaatgagcaggctcagttctgcctacctggaactcactggcaattaagcatgtattcattctgccctttttgaggatctgctctgaggcaggcacttgggggtattccrtaaacagtactcacctcaaagttgtttacaggctggtgcctctcccccacctccattttgatcttgcctctttttcagcacgtactctcaatgtactgtaattaattgtggctttctctagctcctgcagacctgaagtgcaagagcctgctctaccttactgatttttagatttctaacttctggggctggtcttttgtcattgatgtaacaaatatctcctccacagtggtccagacccaatctttgtccaggctggggctttcaaagatgataaagaggggttgggtgggatcacaaagaaatcttgygcaaatataccttgaactaacatatattgaaaaaagcaggacctaacatttcaaactcactgaaaatggagaaatgagatggtaaactttttgggcttagaggtgtagaagcaggaactcttaggtaggtgggaaggctgctctgtctagttggtytctgcactcaatgcaacccaggctgggtctggagtcatttaccctccttgccctctccccagcttttcctactcttgccaagagggagaaaccaaggagctctggtcatcaggtcaccatctcaaggcctgccgagctgtggccttctctgaagatgggcagagtgagtactggggaagacaaccagcaatgtggtggaagggagcagtgagcagcaccatgacctgrgcaccttttccccagagctcattactgtctccaaggacaaagccatccatgttctagatgtggagcagggccaactggaaagacgtgtttccaaggctcatgggtaaggagagcagccaattctgtgtatgtgcatggaggtgaagggtaaggaccaggaggtccccactgggacagagatgctccaagaagttctacatctgtgtctctagtgcccccatcaayagtcttctgctggtggatgagaatgttctggccactggggatgacacaggtggtatcygtctctgggaccagcggaaggagggccccttaatggatatgaggcaacatgaagagtacatcgcagacatggctctggatccagccaaaaagctgctgctgacagccaggtacaacttcaaagctgccttgcctcccctcccctccctgtgtgaaatgtcttcctcaaatagaccttgcgtc

SEQ ID NO: 9893 - DNA, 14786 bp, Homo sapiens
aaccccatctctactaaaaatacaaaaattagctgggcatggtggtgggcgcctgtagtcccagctactcgggaggctgaggcaagagaatcgcctgaacatgggaggcggaggctgcagtgagctgagatcgcgctactgcactccagcctgggcaacaagagcaagactctgtctccaaaaaaaaaaaaagggggtgggggaaagggggttggggggccaggtgcggtggctcacgcctgtaatcccagcacttcagcaggccgaggcgggtggatcatgaggtcagatcgagaccagcctggctaacacggtgaaaccctgtctctactaaaaatacaaaaaattagccgggcgtggtggcgggcgcctgtagtcccagctactcgggaggctgaggcaggagaatggcatgaacctgggaggcggagcttgccrtgagccaagatcgtgccactgcagtccagcctgggtgacagagcgagactccatctcaaaaaaaaaaaaaaaaaagaacagccctttgtgggtggcaaatgcctctgaaatcgcttattgtaggctccagggcaggaaagtaagaggaagagttcacattgtatttgcatgactctcggatgctgagggaaccatgccctgttccctcagtactcacgcctcagcagtggggccaacagccctatagttagctgtggtgctgataagctcggtttcttcataatctttgttcactccatctctccgttccttggcacgatcccggtacttctctgctagctctctctctctctcaatttcttgttggcgtagcttggcataataactgtgaccagagaaaggcaaatgtataaggctcatcagctgctacctcaaggtcaacagaactgttcctgcttgcttccctacatctccaacstactctctatggggaaaagctcatgtctgtcctgatagaactgctggccacctcttcgtagttactcaaaatcagaactacaacttcttccagcttatagatatacttttccagtgccaacttgggacactccatctgtcacttcagaactttttaataccacccaactctaccaattctctatagatataagacttttccacacaaaaatcagaaaatcttctgaatttttaccaccttctaaatttcagctgaaaagaacgtattatttgctggtccactctcagaataaaggaaaagccaagtaccaggtcctgaaactttcgtatcatataaataacgatgatgatataataatgatgatggccgtcaagatttattgggtggttaccatatgccaggcattggtgctaaatgcctacatgtactttcacagctgatcctcatgacatcctgataaaagttattattgctactgkatctccattctatctgtggattagagaggctaagcaaatgtctaggttatccaccaagaaactagcgaagatgagattaaaatatagataggcctattccaaagccctctactgccactctaagtatcactctgtttcattaagaaagtagagagcctcaagacaaaatcttagtttctagcttcataattagcccctacttctttcccctaaacactatccaccttaaaatctaaaacccttcacccttccttcaccttttctttttcctccttcgtgcagctgggtcttcatcctcattgtactcccttggcatcctagaagagacgagaaattcactgatagcaaaatattgccacagccccagaaaccccaagaagtctccttgaggatttttagaaagacctagaatactgatcaaagtaacactttcaatcaagcagaaatccacaycaatatttgtaggtgggcagttctcaaactttagagagtatcataaatacctgagggactattaaaagtcattctacttagtagaaagaaataggaaggagcaagaaacaagttgggagacaggttggatcacccaaagacttactcatggtgacgtgacttagaaggtggtgcagaggtaggtgcagccctgggggtcatgagaagtttcctgaagtcttcattggtgagttttgatctagaagaaaaggcaaagattttaaatattaggactcaataagaaatgaaaaaggaacaagtaaaaatcatgattaaattaacagaaatcagggaaatacaaattaaaacaaagatatgacactgtttttttttttttgagacggagtctcactgtcacccatattggccaggctggtcttgaactcctgaccttgtgatccacccacctcggcctcccaaagtgctgggattatagggatgagccaccgcacccagctttttttttttttttttaagacagagtctccctctgttgccccggctggagtgcagtggcatgatctcagcccactgcaacctctgcctcctgggttcaagtaattctcctgcctcagcctcacaagtagctgggaatacaggtgcccgccaacacacccagctaatttttgtatttttattagaggtgttggccaggctggtcccaaacttctgacctcaggtgatctgcccacctcagcctcccaaagtgctgggattataggtgtaagccaccacgcccgaccagatatgccatgccacttttaatgcatcagagtgttaactaccaraaagtttgataaatcaagtgtgagtgagaatttgggaaggggactctctcatataatgctgatgagaatgtaaaccagtataaccaatttgaagggcaattttgcagtatttgttaaaatttaagtatatatatcctatgagccagcaactccatttatttatatttagcctggtccattactgacatatgtatataagaaggcctgtaaatttaattcagttatagccttgaaaataatcagtctggccgggtgcagtggctcacacctataatcgccgcactttgggaggctgacgcaggcggatcacccgaggtcaggagttcaagaccagcatggccaacatggtgatatcccatctctactaaaaatacaaaaaaattagctgggcgttgtggtgggcrcctgtaatcctagctactcaggaggctgaggcaggaaaatcgcttgaacctgggaggcggagwttgcagtgagccgagatctaggtattacactccagcctgggcaaaaagagcaagactctgtctcaaaaaaataaaaaaaagaaaagaatcagtctgaaacagactaagcgtttattagctggagactgactaaactatgatggtgtttcccaaagagggaaagacagcactaatggtacaagagattattttaattggtacactaacaaagactcctctcttgatcaaattaaagtcagactcctttaaagctctcttctgactagggctcttccttggcctgcygacctcagttttaaaaaggaatcctaagtcagttcacagaaagttttcccactcttgatatccaatccaacttgatatctaatcaagttcctcttctccccaaggaagactttattgaagactactgtaacaagagtcaagaccattgtaatagagtagagagactgaacttaattcygaatacaacagggacaagtgagaatttatagaaaattactaaaagcaacttggttaggtatgggggtggagcggtggttgatttctttgttaaaactgtgctcagcaggccacggatgagtcctgctgaaaaatgggactctttggggaacctgactaaagtttagccaaggagggaatgcttgtcactgctctgaaagataatctcagaaacactgagcagggtttaaaaagaagcaagttgcaaaaatgatatatacagcataatatcatttaactcaaatattttaaatcacaaagcaatgttgtgttttcctcagatatgcatgtatgtgtataaatgcatttaaaaaagagtaggagggccaggcgcagtggctcacgcctgtaatcccagcactttgggcygccgagacgggcagatcatttgaggtcaggagttcaagaccagcctggccaacatagcgaaaccctgtctctactaatacaaaaattagccaagcatggtggggcatgcctgtaatcccagctactggggaaamtgaggcagaagaattgcttgagcccaggaggcaaaggttgctgtgagcagaaataatgccattgaactccagcctgggcaacgggaggaaaagatatgccaaaaaaggtaactgtggttacttctaagaaaaggactgaggctgggcacggtggctcacgcctgtaatgccagcactttaggaggctgaggcgggtggatcacttcaggccaggagttcaagaccagcctgacgaacacagtgaaaccctgtctctactaaaaatacaaaaaaaaaaatcagtcgtgcatggtggcacatgcctgtagtcccagctacttgggaggctgaggcaggagaaccgcttgaactcaggaggcagaggttgcagtgagccaagattgcatcactgcactccagcctgggtaacagtgagactccgtctcaaaaaaaaaaaaaaagaaagaaargaaargaaaagaaaaraaaaaagaaatggactggaattggggatgttatcaaagatgattttatcgggggccaggcacggtggctcacgcctgtactcccaccactttgggaggcagaggcgggtggatcacctgaagtcgggatttcaagaccagcctgatcaacatggagaaaccccatctctactaaaaatacaaaattagccgggcgtagtggaacatgcctgtaatcccagctactcggaaggctgaggcaggagaattgcttgaacycgggaggcggaggttgtggtgagccgagatcgcaccactgcattccagcctgagcaacaagagcgaaactcagtctcaaaaaaaataaaaagatgattttacccttatttcctatgttttaatttgctattggaagaagtaattcctatataatgtgtaattacacaacacgtataaaaaaaaaaaaaaacttaacacctttcctgcaggaatttcccttctaatacccttatgcacttggcctgatccagttaaggctcacagagataaagggccagcgggtataattttttaccatccttgatgacaagacattcagaattctttcaccatcaccaccacttttctattcattgcccaactcatttccatggtcctagcacaaaatactcactggtggaaggagtgaggatcatccacatcgtggccatcgggggccaaagggttggagaacggctcacctgacaaaaaaaattgacgttaatttaatcagtctcttacgtgtcagatcctatgcaaaaatttgagatatagtagtgaacaatacagaacaaaagttagaacagcgacagtgtcaacacratgtaataagtgctgaaataggaaactacaagaagctgtgggagcacaaagcagaggaccctaatcctgcgctggaggatcagagaagacttccggaagatcacgtctaaaatactacgtaaaagataaatacgcgcaacccaggattaagtatggggacaggactgggggaaagcgatccacgcacaaaagccgcccatcatcacttggagtaggagtgaggactggggacggagtttggagctgtcggcctcacttaggaccctgtggcttctccgggctcaagcgtcacacatacayacayacacacacacacacacacacacacacacacacacacacacccggcttaagctcagaagctacaataatgcgccaagtgccccaagtgccatggggaagaaataacggatggcctgagccttactatctcgctccggcattttgttatcgttctttcgctgtcaccaacaatcgagtctccaacarcaacaccgcagcgacaagctctttcccacagtgcacctcagaatcaacccacactgctttgcgttcgcagcctttccgcttcctgtttttccctccgaccaaccccgagcgcaaagaaattgacctcgcagcggtcctacaatrcttttatatcattggccaagctttaccccgcccctgcctcatgcagcctatgggctaggctttagggtccgcggttggtcagaccggrgcacttggcctgaagacctggaattggcgacttcgatattaacaaggatggcggcggccgcagcaagtcgaggagtcggggcaaagstgggcctgcgtgagattcgcatccacttatgtcagcgctcgcccggcagccagggcgtcaggtgaggcgcggcgtggtgaggcgggcrggcttcgggacgccagggtcacgacctcgacctccctgaagttgagggaagcccccgcccacagcacgcgcggcgctctctcsggccccgcagggacttcattgagaaacgctacgtggagctgaagaaggcgaatcccgacctacccatcctaatccgcgaatgctccgatgtgcagcccaagctctgggcccgctacggtgagtgcgggacgccargggtctggggctccggtaggggaacaagggtttgagaagagaagggaccgcccaaggtcgtgcagaaacccgtggagaaactagaactcggactttagccttgctgttgatcttgtttccatgaagaaatttatattcgcagggttatatgatgcgttgtattccgggcaacataagtatgcaggctgaccgaatcctgcgtagggaccaggagctgacgtttttgtagttaagaatgggcttcagacaggagagaagttagtcaatatagtttctccaaataacgtgtagccagwgtcagtccaggtagtgtgtgagaatctcagtaattttgcacatagagctgggccctgtgctgagtgcttccctgcctaactcatttaatcttcattagttaggaggaagcgtgttcttcttttctcactgtagagattagaaaacggaatcaaaactttgttttgcactattgttaaactctagctgcaactttagatgcagctagagtttaacaggattgagcctttacatttattccccttcctagaatgcacttacccctctaagactggcatggcaatgtattgcaaaatsaaattttcctatcatgttgcctaacacattgtaggtatgcaataaatgtttatacatactgaataacaggattttaatcacagcttttaactatatggtgccctgggaatgacgggaggaggtggaggagagtgaccaccttaagcagattggttctsagagtagatatctgtgagacacagtagacattagacatgcactaataattggagaaggaaaaaagcttctccttccaaaagccagtagactacaggaggagatagacacgagtaactttagtgtattgtgctgggtattatgttagatagcctatgggagcctagagaatgggtacccagctgggtgcggtggttcacgcctgtaatcccagcactttgggaggctgaagcaggtggatcacctgaggtcaggagttcaagaccagcctggccaacatggtaaaaccccgtctctactaaacatacaaaaattagccggrtrtggtggcgggcacctgtaatcccagctactcaggaggctgaggcaggagaattgcttgaacccaggaggtggaggttgcagtgagtggagatcgtgccaccacactccagcctgggtgacagagygagactccgtctcaaaaaaaaaaaaaaaaaaagagagagaatgggctcccagctgaggctggacccatgcaatacattgctcaccgtagttaataataaatgcctacagtgcccccgaaagcttccctgaaacaacccattgyggccatccagaatcagccaaaattctatttggacttgggcttcctagatgtgtttgagacctattgtattaattctaggcataccaaatgtattttgatcatatctctttaatactcttcctgtcttaacaagactaagataaagacaaagatcttttattttactttggtagcctccagggtgcagaatagttaaagacacctccctctctctcttcagcatttggccaagagacgaatgtccctttgaacaacttcagtgctgatcaggtaaccagagccctggagaacgttctaagtggtaaagcctgaagcctccactgaggattaagagcaacagccccagagcctgggctctgctggacttagtataatgtgaaaaaaatgtgttctcctattcctcataaagcttgtgctgtaaaatactttctcagggtgttcttgtcctcatctaccctctaccccttactgtgcaaccactgaggcaaagtagcttaatataaaaataaaactttattctgtctcatcaaaagctaccagctgctgaagcaaacatgaagggtggcggggggkcagggattctagggccccagagtaagtagaccacactgagtcccttttggtcctcctgcctggatagtgctgagtggaaggggaggagctgggacccaaaggtcttggcttaggtgtgggagcagagaacatgagacctcattatggtcctaaatctccaaaggctctactggacaaacaagcttgatgttaagagagaggggaatgagtgacattgagaaacaagatcacccttgaagagctgtctgctggagagcatacacacgatcctggagctgggcctcttcctgatgcctttccagggcttgcagccctgactgctgcaggaagacctgaacagcctaggggcagggaagaaaattcaacacacctggtctctgtgtcctaagactcaattcccacagcctcatgggtcagccyactccagagggtgcattccccaacaagaggatgaagtttctgacatggaacctatatargttagccaggcccagagaaacaactatagttaggactggatgggaagggagccactgtgtggcttcagaacaggggtgactgaggatgtgggccagaaacctatacctctggctgatacaggaacagcagatgcagcagctccaaactctggcctactacttyagtgtcagaaaaggctagtgtgtgcagcaaggcgggaagcaggggccctggccayagccgctggcagtaagcaggacccttttctgcaacattgcacagaactgtgagcacctgcagatagacacatatatagtctacaaagaatgaaacacamagatcataacaatagctaaaatatatgacatggtgaccacatgcccaggcaccatgccaagctcttctacatrcatgttctcatactcctacaactaccctatgatgcaagattatcctcagttataagtgaggagactgaagcttaaggtggttagttgatttgtccaaggataaataatccagtttaagggacacacacctagattggttgggccctgaggccacacaccaccacctgctggctctcaactaagggtacatctgagggctcaggactgctgtcccatacaatccractaccagatcttggattcaagtaaccccaatacataccattacgctcaccacgttagatactggcaacagctgtaagagaggctcaatcagatccagggagagcaaggaggtacagaaactaggactgtttgctggaagagaagtaccagggtgaaaaactgctttcccccaccacccctgtcaatactacccacctcagcctaggccatgaggaaatatccccattatccaaatgtccaggcctgggcagattatggtgcgtaccagtgaggttgttgaggagccaaaggccctcagggagcagactgggctgtttctggaaaaagaactgcagaaggataaataaggctgccacaacacgctcatctctgagctgcatttgccctcccacagtctccactgctgcctcagttagcaggttgcttagacatcgaagcacggggcatgccagctgcaaagacaaattggggggtcaggtgtaagaaggaagaggttacctgcattccagagtatcaagaaacatctcccagaatttcacctgacatcttcacctaccagctccagtcctgcatcctcgsttttctggacagccccagccaagtccaacagcagcaaccccagagtagacagagccccatggcyaatgagcagaggattgctgacctggctgggcaacaggaagcaagcagtccctaggtatatagtcaattccacctttaagaagagaagcagttgcctaggcgtggtggcttatgcctgtaatcccagcactttgggaggctgaggtgggtggatcacctgaggtcaggagtttgagaccagcctggccaacatggcgaaactccgtctctattagaaatacaaaaattagccgggcatagtggcacgcatctgtagtctcagctactcaggaggctgaggcaggagaatcgcttgaacccgggaggcagaggttgcagtgagctgagatcgcaccactgtactccatccagcctgggtgacagagtgagactgtctcaaaaaaaaagagaaacagctaaggtctgtgggtctcctgggctccaaaaagagaagacagtggagggaggaaaactcactatagcaattccagacacaagttcaaagagttgaatgtcatggaagggagccccagggaagatctgtggtactttcccaattgccctgttacctgcagatgatgtaatgaaggcaccaggcaaactccacagcgaccccagggttgagctttgggccaggttgcaacatttgtagcatgtgctgagggagagtggaggccaagatggagctgctggcagaagcagggctgtaagtaggaaccacgaagatgccagtggttcttrccaaaccctgatagcaggygggagagtgtccaawcccaaagccctgcccagatgggaaagtgtccaaacccaaagcccttcctagccagacacatgaatttaaaatgtgcaacagctttggaaatcattcaggcatccgggagctatactactgagtgggtcacctctggctgcacatctaaagacaattttactcacggaatgatcttctctggagcttcctcagcctgtagaagctgggacaaggcatatccgagagcttccagcacagccacatggggggactggaagtagacagggtaaggatctgactggaagctgggtcatcaggtcttcagagactttcagccccttggcacagggcagaggctggagctacctaaccaaagtagatggagcatgtggggaggagcaaaggaagggttgcccagggaggaagaaaggagtcacctggatgcaggcagccaaggctggaacaatgccctgtggcaggagctgccttctcacagcctcactctccacgatcaggttacccagtgtatacagacacagctcctgagaacaggcaacaaaagcactgggcttggcctgtttcawgccaggctgcgtgtggggagatggggaggggaggtgatggggacgctggagcagctatccttgcggctcacaagagggtggggagatgatgggtgtagccatggctgtaggcataagggcaaacatgttttcttcctcctacctgccagctcaaactggtcccaaaagcacaattttaaaatctaaaccaagaacaagataggaagggacagggcttactatgaagtctgagctgtgactggagaggtaggtgaggaggtaagaagtggctggcaggcaggcctcagcaacagtggactgctcggagtgagagagctcatgcaggcaccgagccgcctcaagctgcagcagggcctggttgctggtcaggagcccraccagggtccgcatgctgccctccagcctatgtgagtgagtaccagagccctgcttagyttgtggtccatccctcagagccccaactcctccctccaccacaccatccacactgaccggatsaaggtttgctgtgtttcagggtgctgcaagcctcsacgaaggctgaccagagccccctctctctccttttcctctgtcccccgctgggcttgccgcaggaactgctgcacctggagttcagggcagggaaaggagaacacacggttcacagaaagcaagtcctaagtctctctctgcccacttcacctgtgagccttccaatatcacaccttcagaacttgtcattcacactaatgcaactaataagcatctaccttgcagtggagtggacagagaatcagaactgagttctaataccatacctgccacttactccatatgggacctgaacctaagtttcctcacctgaaaatgagaataacaatatctatcctgccttcatacagggttctttcaaggatatttaaacctctcagcctggcaaaacctactcctctagccattctccccatgcaacctacactctaacaacaaccagcctaacatgagctttttctttttcttttttttacatttccgagcttttgcacatgctatttcttctgcctggataccctctccagcttcccactctcttcaggtttctgctcctcatttcctctgggaagttagctctttttgagagacttaggagtttctcttgttcctcatgtttccttcccttgtgacatctgtcttcttcaccgggctgtgagcacctcaaagaaaaggactctatcctttcatctttgtgtacctcagtgaccagcacagtgtcctggcataaagtaagcatacaatggaatagtatgacctaggaataagttgataatatatatgtcaacatggtatgtacggtaaactatgtacgtaaacataatacaaatacaggggatactcaatgcttactgaataaatcctttcattcactcattcaataaacactgagtacttaactatatgccagataatgtgcaggcaaccgggttttcaatgacaacacaggatctaggttttcctgcaattaaagtctagttggagaaataacaatagacaaaccattagataatgattaatattctacaagaaacaagtaggtggccgggcacagtggctcacgcctgtaatcccagcactttgggaggccaaggcgggtggatcatgaggccaggtgttccagaccagcctgacaaacatgatgaaaccccgcctctacttaaaatacaaaaattagtggtggcgcgcgcctgtaatccctgctactcgggaggctgaggcaggagaatcgcttgaacccgggaggcggatgttgcagtgagccgagatcatgccactgcactccagcctggcgacagagcgagagtctcaaaaaaaaaaaaagaaaagaaaagaaaaaaaataggctctcaagacagaataccaaaagaaacgaacgttagacgtagcgaatgccaagggcytgagacacaaatccgatatatcgttgcaggaactaaaaagaggacggtgggtaggatgagaaaactgataaaatttgagttaggaagaggctagaccatgctatgctttgcaaggcacaggaaagattttggtctccacgtgtttttaaaggacgtagtgacggtgacaagcatagatgcagggtgaccttttaggagactgcagtagtatccagagaggaggtggtggtggcagcttcgatggtgaggcatgtaaagactccaaagctcttcaggaggtaaacaactaggacttgatgatggatcgatatggggttgtgggtcaaagagttgtgcaggatgattcccctgtttctggcttgacccactggatgcgtggaagtgtagagtggattgcgttcaggtttggggcagacctcgagtactcccgggagtctggcgccagcgggcgtggactccagcgcaccctaccttgccccctcacctcggtttccccgaggatcgcagccacacatccctctccagcttcctctggggcgtcgtttctcagcagcctcttgctgaccagctgctgctccctccgcgccttccgcagtgctgggggcagaggagccggctgagcgtgggaaggacgaccacaacccagaacccgcggctccgagcctggggtctcaacttatccccgaccgccatatacccccgcgctccctcggccgcccacacctgcctcccgctcccgccggcggcgccgtagctcctccaccccgcagaccgtgggcctgaggcggccctgccgtcggctccacatggtggagcaggaggaggaaagccgaaggaaacagcagccacaaygctcccaggggcgtagaagatggcaccgactgcgcagcctcagcacagggcgggaacaggcggggagggcgcgaggagcggggtgggtgctgggtgagggcggggctcggcgagtggacgcctcgcggggacggtgggcggggcgagggctagagacgctgcaccactagaccagagccagaggcgtcgctctgcctctgattgatttcctgtcttaccaattctaggaaaaaaagtctctcatccctgacctcgagtgacccaagccagcagtgtcacaatctactcagcaaacacaacttccccacccacaatacgctctaratgaaagttcaaaacaatcccgaactgcgggaagcgccatgatgccgtttcactattaatgcggatcccactgatgagagctgccaaaaacgcttgaagcgtcattgaattgtcaacgaaaagagtccaactctgtaaaatatt

SEQ ID NO: 9894 - DNA, 14122 bp, Homo sapiens
actctaatgctcaccaaatattcccttagttgtcacagatttcccagttgctttgcatttagccagggctattgcccaatactggccagtgggcaatgggcagaagcgatgcatgtgtctccttcaggctaaacatagaagagcagatgaatgtcctccttgggttctcttctgcatggtgattgtagcagccttgtgctatgattacaaaccatacggtgaaacagcctggatcctgagtcactgcatggaggtctgtggctttggggagtcacctgaaccttcactggaatttgtgtggatgataaataaacctttgttgtattaaaccactgagattttgagattgtctgttactatagcataacttagtctagcctgattaatatattttagaatagtgtttctaaaagatttttgaccatcactcacaatgaaaaatgtattttacattgtgatccagtacacacactcagacacacacacgtgtgcacacacacatctgaaacaaatatttcaggaaacaatacttatccttattatgcatgattattctattctattctattctattctattctattctatyctattctattctattctattctatcctatcctatcctgtgattttcttctctcctactgtattctaaattactctattttattaaaaactgacctcctaaattgattttacaacccactaatggatgtaactagagtttgaaaaatactgctgtagataataatttgtgtatgatttatatgttaattataagtcttttatgcatacttagtaaagcaggctctttagatctctctttggcaatttttaaattatctgttcctagaatggatgaaagtattttcatgtacaatatagcacatctcacataatttctggagcrtaatgttttattgttgagcctcctaatttacaacatgtcttttgaaatttgcttataaaattttgtcacagggagcaacaatgttaacctaattattattcacttattttcattttttaaaataaatgactataaataactgtctcttcagttaggatcagggatatcataaaaacatcactagcgagacatattttagtattaatactgatgcaaaaaatgaaatagagaccaaatatttatatatatagcactatatatatttttatatattgtatactcatatcaaaacttgccatttctcttaagtagctgataagttgctttctaattttataaattacaccacacctgtgaaaatatggacaactattttatatttttgctgctatataagacatttaatgtttatacagagagctgaaaaattacagaggtgatgcaatgggaattgatgaacattttcacctgaatttccactggcctttttcagccagaatcatcttgatattctctgaatattcttttagaaatgagtatggtatctgtttcttcaataaatacacatacacacattataggtatatgtgtatatacatttatacaagtgtatgtatatatacacatatatacacacatgtatatagtctacatatgtatatatatttctgtgtgcacttatacacacatgcacacataatgtcctttggtttatttttagaccattaatgtgaaatgaattttcgatgatttccatttattttttcttgaaatctaaactggtttaaaaagacctttgcaacaagtaataaatttcttttaaaaaatcatattattacactttaaagcatgatatagagaaggtcacaaggtgttagagaagacagaaatccatgccaatatgggagaaaagaaagcaaatggggttttcagatttctctcttaaagtggccacyttcagggaattgaacytagtgctctgtgttgctggcttgaaggaaaggtgctccaggctaagctctctgctcccacaggaagggagatggtgcctggagaggctgaagacaaagcatttcttgggaatggatgtgcattgggactggggatgagaagcaatctctgggtaggtcactttggtaatgtctagttgggaatggagtggtgacttttrggattgaccataaccttcgggttgcatgttaaatggtctcagggactgcttagttgccgagaaggtgactgtgtgctttcctcacagaggtcttctctcacctccttcaggcctcaggttcctcygggatgaattgcatggccctctcttggcagaagaggctccatacaactggagaactatgtgaagatagcgctcgcatcttcaaacgtgcccctttcacctcccatgactcttccgggacagaggcctttttcccaacacattaatgacatcaaactgtgggggagtatgagatttctcttccattatattacttggaaatcaaagcccacatctgtgtgtgtaaagctgtaaaaaaaaaaaaatactcctgtcgcctctcastcagatcagattgagacacctcaaagtgacttaggaaaagggacattcttgtttgaaaagctagtaaactactcttcwccaggtgtgttgccaggcttgtcttaattttttttctcttttgggtagctatgtgaggagccccagaaaattggggctgggatgaactctatacaaactgagaaaaatttgggctgctctagcggattttaacataactcagagcagcagctggtgagagcacagccacgctctgtaagttttatatttgccacgccggctgagtagagtgaattatcttggcattggtagtaaaatatccagcactcatgcttcctggatctctttccccatgcagtaactagggctctctatgaatggcatcttttgaatcacatcaccttaatctacatccctggtaaatctcactaaattcaaaacatcgctccccaaaggatttatagcacagtgtctcctgtgctttcagagatgtggcgctcacaccctgtcctcagctttgattttcttgttatgtaacagccccttgtttgagaccatggacaattgttcttggagtcactctatgtggcttttaaaatacgttcttttctcagaaacaaaaaaaaaaatgaggggaaagctgtcccagttttttttttttttttttttttcaggatatcacccatttgaatgacagaaataaagaatttagagtcacacataggacatggatgttgttgggaacgctatatttggggcataragtaaaaaagattgtttccattgtaatgaaaataatcattgacagtgagtgaagcttcagattaaraaracggaattgcctgtacgggtgatggaattgctaggtgcctgcctgaaacgtggagcgaggacagaggcggagctggggagggagggcggtgggaaargcggatgtgcagcgctagttcttgttaaggatgcttttcaggcttctctccacggcttcgtccagctcttcctccagctcctctttcttggacatggccaacttggactggtaatcccgcaccacctggtcgatgtacggggcactctgagtgccatgcagcatcagggtccactccttcagcacccccttctgcggggcgctgccgacaaatcccagctccagggtccaggtgcctcgggcgtcttccccccaygtgtgagtggtcatgaaaggccacttgtcaaagcccaccttggagtcgtcatcccttggacgccggctcagcaaaatggacttggtgcccataggggaagtcatgttgatgttcaggtctcctcttctggttgcgttgaccgtgatgacagcctggacatgctccaggtagcggacaaaattttccttcccctcacaggcgtcggttgtgagtgtcagcaccaacttgccagtggatggtattttcctgagggcagagtgaagaggagataggataagcagtggtgggtgcaccttacaagggattttgagggcagcttcaggtrgcggaaagggcaagggctttggggttgatcaatcagacctgggtttagttcccacactggctgtgtgagcctgagtaagttacttayctcycyctttttttttttttttttttttgtcttttgagacagggtcccactctgttgcccrggctggagtgcagtggtgtgatctcagctcactgcaaccttcagctcctgggttcaagtgattctcatgcctcagcctccccagtagccrgggttacaggcatgtgccaccacgcctggctaattttttgtatttttagtagagacggagtttcaccatgttggccaggctggtcttgaactcctggcctcaagtgatccagctgccttggcctcccaaagtgctgggattacaggtgtgagccacyacgcccggctgtgagcaagttacttacgyttggaaccttctgtgtggaaggagaatgtagtagatgctgtgatgtccctcctgagtctcctaagtcccttctgagttcacctgcagctgaagctcccttgcacgtccactgcttcccaccccaggcacgagaatctccccgtgttccccctgggcttcctcccacctccgtggaagcctgcacagcctgcgtgcagggcggcccaaaggtggcagggatttaacctttgaggggtagctctctcccagtgactgacaggtttttaccccggtttctctattcctcagcgtgacaactcagtgtccctagtgggactgagctcagctgcccacggtggcaactcgctcattaatgcactcttcattggcttttctccccttccttattttacatctccaattcctcacttgtgttacctgggatcatttctcaaaaaactgtcagcacccaagtcttgtctcaggttggacttctgggacaacccagactgaggcaggaactcataatgtctttctttcaaagtgctaagtrctttgataaatagaagctgttgctaatatgactgccattactaccattaagaaaagctgggccgggcgcagtggctcacgcctgtaatcccagcactttgggaggccgaggcgggcggatcatgaggtcaggagatcgagaccatcatggctaacatggcgaaaccctgtctctactaaaaatacgaaaaattagccgggcttggtggtgggcgcctgtagtcccagctacttgggaggctgaggcgggaaaatggcttgaacccgggaggcggagcttgcagtgagccgagatcgcgccactgcactccagcctgggtgacagagcgagactctgcctcaaaaaaaaaaaaaaaaaaaaaaagaaaagctgaaaatgggtaaattaattccagtgaaaggcagtccaatgaatgatcaggagactttgggggagtctttggcgagagttggagcgaggttaagcccaagtactctctaggctgtccttacaggcaatctcctttctggagatggccttcttggagtgggagaagctcaaaggttcttgcagtagaaagaaggaaaaaaggaaaccgcatttgaggattgcgtggtgtaacatcaagactccagactttgagaataaacccatttggattagaattctgcttctatgtttactgctcatgagagcttgggcaggttatttaagcactcgaagtttcactgtcattgtggatrgttcttttttttttttttttttttttgagacggagtcttgctctgtcgcccaggctggagtgcagtggcgccatctcggctcactgcaagctccgcctcccssgttcacgccattcctgcctcagcctctcgagtagctgggactacaggcgccctccactgtgcccrggtaattwtttatatttttagtaaagacggagtttcaccgtgttagccatgatggtctcgatctcctgaccttgtgatccgcctgcctcggcctcccaaagtgctgagattacaggcgtgagccaccgcgcccggccgtatgattcttgtgtggttaaataagaccatgtatgaaataccaggcacaggcgtagctccgcccccagggagaacaggcgctaccatggaggagtaccatcgccactgcgacgaggttggcctcaatgctgaggaagcccacaatattgtcaaagaatgtgcagacggggttttaggtggtgaagattataattacaacaacatcaaccagtggaccgcaagcatagtggaatwatcgttaacacatctgcctaagytgggaaaagcytataaatgtattgtgaaatgtgcagtggtccagaagagcgcatatggctttcgcacagcagctcctgtttttgggataccacatctgatggaacctgtaccgtaagatgggagaactggaccatgaactgtattgtcaatgtttttgccattgctgttctttaactgactaaaaatgttgggttaaagccattaacttaagaatttgtcagtgtatcctttcaaaaatagttatttattagtgtgctagatgacaagtgtgcaatatactttaaagctatcaacaaaaactgaatattgtaagcaagcartatcatagcaattggcagattatctcatattctatacagcatcatttaaatacgaaaaatttaatgctagcaaaaaataaatgcagaaatatggcatgacatgaaaatacaatcttacatttacactagcttttcactaatattttgtacgtaaggtgatggggaactccattcagataataaaattctctttcagctagagaagttaacaggaataaatatatgaacaaataagctgcaaggataaatgtggagaaaatgatgagaattagctaatatcttttcattttttaaaactttcttcccctcacttarttgtacacaatatttagtggaaagtaatttttaaaaattttctatcaactaatagcatagtaacaactatgattaacttgtttactttttctgaggattagtaaatcgattttttttaatttaaartttttggatttatacttgagggtgaattaaatctggtaaactgaatttcctagttaaacaaaattagttgcagtatatgatgaacagtatatgactcaaacagctgccttacaattcattccatgtggaacaaacatttatcagatgcctattatgggcatatgtctctgctgagcactatagttatcaatgtgctgtgtaaatgctaagttccttttagcaattgttcagttggaagacaagtattaatatttggggaaggaaaaaaaacagttgttttacacgggaggaaaaaagtgagtctggttacacatatagaagtaagcaaaatgaaaagcacttaactgctttctgacagaatgatagatgtaattttaagagttgctcctagcaagttaaaagtgcatgtaaaatatgcaactcttagttaaaggccttattatcagtcttatctatacaagtagtaaattttgtcattgctttaattacaaccatctgtaaataattttgaagacttattatgtggggttcaaattgagtggaataaagtatagattaaaagtatacaatcattagcaggttatctcagggcttatgaaatgtaattaaatttattaagaaaatagataaaaattagggtacacagctggccaccaaatgcgaagtcaatctgctacttaaccytgcamacaaaatcagttttgcatattaccactaacactaacacttacagagagtggaatcataactcattgaattttggagaggaataaacttagtgttaatattaacaatattaaggcaagattcwtgtaggaataccatgtgcatgttggatattttgccaaataacaataattaatacctgttaaatgtttaataataatattaacaaaataaaggagttcaacgcagtgatctttgtttttggcacatcaaaacttctcagtcattattcatgtttctttatgctgctggcttttgtgcccttgaagattataatagtgaccaacatatatatgcagacttgttttttattattgttgtttaagcctgatttaagaaaaaaatattcatacctcgtgaacttgctatctgttctgtttctagttaaaatataataaatattatcttcctgtgctgaaaaataaataaataaataaataaaataaaataaaataaaataccaggcacaatgcttggcacatgtactggcccattgcctatgcaaatatccttcctcaatatggcttttattttggagtataagtaaaatatttttaaacacacatcttgtaaagcacatttacaaaaagacagtggtcatgtgcccagttggagtcaagccttggttctgcattgccctaggaaccaaggccatgaacctgggagggcttgctgaaacatacagtgcagttcattaatactctctggaggaactttacaaatatagacttaaacggtttcayggagtactgctgtattcccctctcccacccccggatactgatgctgaatcatgtatggagtgtccatcagctatggggatccagtgatggtggggttggtctttctgttcccaggatctggggaaaccatccatttggtggaaagcaggcattaagccaactttgcgggtcggggtaatgagggccataacctggatttctcaaagatggtgctatttattcagaacaagatcagaaacaaaacaggtaaggtgatgaataactaaagattgggctctagcccagcagtggacagctgtgtagggtagcacaaagagtctcagagtacgagtccagttgtgggcaagtatttgcatgatctgagctattaattcctgccctgaacagttgctggcaagataaattatcctacatatacattatatatgcacatatatataacgtgtctatatgtgtatatacatgtatactcatatacatagtatatttacaaatgtctagacyagcattggccaataggacactctacgatgatggaaatattctatatatataatctctagtatggtagccactggctacatgtggctaatgagcaattgaaacatagatcatgtgagtgctgaaatgaatgttcaatttattttattcarttttaactaatctaatatgttattatataaccacttgtggctggttgcgtctgtactggacagtgsrggtctaaattgtttatgtatgttgaatttgaatctgataagaacaacaacaacaggcagagagtctcttggccttctgtttcaagggcattcagttttttcccggctcacrggctctaggaaaagcagttggggaaactgcagctttgttttgcaggttttctggccacctctctggaggactctgaaatattcatccagaacctcaaggtatgagggaaatgacacattctatcacagggtttctaggcagacaagcagccaggcccagaatcgggctttccttctagagttgagccagaggggctttgggagtctttgagaagcacagttgcaggaagcagagaatgatamcaggaagagagaccctggctctgagttctgtgttgaatttgagctctcttttctttcctgtagtctagggcttcttgaaaagtttcaagaaggaaattcacaagccaacaaccaaagactgtaactgagtggcaatcattatagatattataaaacatcactaatcatttgtcaagtgcagtrgtcactattatcttaagaattcagaacaccagctgaattctaagaaaatttgttttctgtcccaatttgcacccaggacccttgtggactggagtcatagtgacagaccctttacaagtcaatttgtagaaactctggcagaaaaatggcattgcttgccttgtggaaaactgaaaatatttcttcaattggctaagaatcagagatgagacagccacttttgctagaaataagaccacagcccaccatacatgaagtttctgtgaattaactataaggtccttcgctaygtgaaaagagttgttctagtgctgagatgacttcttatgatggaaggagagaaatatggattagactaaacctgagatgaccttcaggcataccacagctaagggtgttttggtagatagtgatagtgcctcattcagatccccttccctgggctgtgcaccaccccagctactgtggrcattggctgctaactgtggtcttctgcttgtgtctctgaagaatcaccctcaggagctatggaaacctggctgaaataagaatacataaaaccaatgctcctgcccccaagcgggacaamtgtgtggtggcgttgatgctccaaagcccscggtgggtcaggccacatgcacatacctggttccacatcctttcttggctacttctgcccctcccaaatccctcactctcctacagttctccctgaaaagccctccctcaataaagcacatgtactcaaacccaatctcaggctctgcttccgagcaacccaacctaaaacaggtgttatctgtctctggagaagagcaattggaaactgattaccacatccctctgcacagtgtctgaggactattgactatatttatgtcatcgttggtgatacagaatatgggcctcattccatctgtgggctcagtcaccctcacttcttttgctttctttaaaaagcccttaagaagttattgtaaagatagatgtaggccggcgaccactttgacattaagggcatggcagaggagcctggaatttgagtcccaagaaggagcctcactggcagaacaacaagggccggtgtgttcctgtctgtgtgaatcttctatggtggctgtcgtatctgtttctcccaggagmcccacgctcatggggaaggccttagcgactaagactaagggagggaaaatgacagcgaggctgagaaggggaaactagaacacaggccacygattgcccaggctaaaggtcttatttgagagtgagtggtgtgcatttgtgatagagggtgcaagggagagatggagggagactgaaagacatattccatgcaccttggaaagccgaaagacaggtgggagtagggacaaacacacaaacttgtgttaagaatcayacattttcctagaagccttggacactgggrtgtgcctgggggtcacaggccatgctggctttggagcatcwacgccaccacacagttgtcctgcttggaggcaggagcatgggttttatgtattcttatttcagccaggtttccatagcccctgagggtgattcttcagagacacaggcagaagaccacagttagcagccaatgcccacagtagctggggtggtgcatagcccagtgaaggggacctgaacragaggcactgtcaccatctactgaaacccccttagccatggtgtgcctgaaggtcatctcaggtttggtccaatctgtatttctctccttccatcataagagatcatcccagcactagaacaactcttttcacgttggctgaggagtctggcttttttagcaccacggagagactgccagctagaaaaacgccccgatcctgccctgccatgtgaactgcttcctgcacaggagctgggtctgctgagagaggagacatgtggctggactcttctgagaatattaagttactatgaaattaaattaaaagcatgctgtgaattccagaggcagcgaacttggtagagaaagaacaccattctcccctcacaggtcaggtttttttggctggcatcgtggcattgggagagcctaggaacagtattttccagatgtttcttgtttctctcttcatttgctcacttgyattttctgattttcttacagtgaccatgtattgcttttatgagaagaaaaggaatgaaacattcttattttaaagcaaaaaggagatatatgctcaggaattatcaatttataagaaggttaaataggaggaggttggtggtggaacaaaaagaggctctgcagaaacattttaaatagtcacagggtgttagtttccaggccatgatctggagctcatttgctgcagaaaatgaagcatgctttctggaggtttaagagttcttaggtcaggcgcggwggctcacgcctgtaatcccagcactttgcgaggccraggggtyggawcacgaggtcaggagttcaagaccagcctgaccaacatggagaaaccccgtctctactaaaaacacaaaaattagtcaggcatggtggtgtgtacctgtaatcgcagctactcaggaggctgaggcaggagaatcgcttgaacgcgggaggcggaggttgcagtgagctgagatcacgctactgcactccagcctgggtgacacagtgagactcgatctcaaaaaaaaaaaaaaaaaaaaaaaaagagttcttctttgacctattagagataacatgcaaaatcstagtgttccagtcttataaaagacaaacttggggttgtcggggtggcttgtatctttattttattgkgtatcattgcaagtaagtgtttaaactkccttgtgtcaagaaataggtgttgcttcccaggaggccctggggaatgcttcttgtgttatgaatcttcaactgtaagataaagttatgaagctgtggtggctcatgcctgtaatcccaacactttgggaggccaaggcaggcggatcacctgaggtcaggagctcgacaccagcctggccaacatggtgaaaccccagctctactaaaaatacaaaaattagccgggtttggtggtggatgcctgtagtcccagctactcaggaggctgaggcaggagaattgcttgaacctgggcagtggaggttgtagtgagccaagatcgtgccactgcactccagcctgggccacagagcaagactctgtctcaaaaaaaaagaaaaagttataaggctgtgattgttttgatagaataatcacaatagtaacaatgacagccactctttctcaagtgcccaagatgyctgcttttgtggcagtcacatgacgacacgcagcaggtggccatggtgaggttttctcctccccctgtagcagagtcaggtgggcatgaacttgtgcaggaagcctctgcagctcgggagtgctggtccacagtcccccaggtggcacagggccgagcacacgctgacctctcactcccatgctgcttccggcattgataccaggttttaacatttatttccaaattcacttaaacttcagagctggatcacatattttggcacagccttaaaggagctcagtgaacagtcccctcagggtgcccagaggggctgggggcagctgtgttagacaggtcactcccagctggctgatggggccggcctgggctggctctgctcattctacacacagctggtgcagctggtcacagccaggtgtattttcccctttgattgtagctgagcatccttcactgactctcttgataaagcctctttagaaaattgcttttcaaattgactccatctccgggaagattaatgccaaggaaacccacaaacctgacaatcaccactcactccaccttggaagctgtttctgtgcagccctgcacattatggagagtggcgattgccacggctgttgattcctgtaccccaccgctcctcgagtgtgcttcgtggtcacaagggcctcctctgtcaagcggcacagccagccctggggctgctctccaaatctccctgtggagcctctgcattcttcaacaagtgtatttgccctagacctaactcatctgcatctgagaacaagttctggtgtgggggtggacgagggaccggagggcactgagaggaggcagagcccttccaaccaaggcagagcctccttcccacatttgccttgctggcccgccggtcctattgccagcagtcagacatttcccttgtgtccggctgctgctggctgaatattttcattccctcattcatttaaaaaatatttatcacctgtctactatatgcccagcactattgtaggcactagggttacaccatgaatatgacagacgagggcccagtccattgggaggccccaactgagttagtgctgaaatatagtgctttcccatttctcttcattgaaaacac

SEQ ID NO: 9895 - DNA, 47648 bp, Homo sapiens
ccagaagaagggaggaaaagagaaagtgggaagggaaagcatgtgagttcatccctcctgcctgtgattttctcacactgcgtccgttcctccattcatcatatgtcttcagaaggcatgaacaaaaggctaggagaacagtagtatcaggtcagaatatttccccacttgtatctggtcttgcaagaaatagctggtttgcacaaaggatttaattgaagtgagtttaataaatggactattaacagaggtgcaacagccttaagggaactcggcaaagagtggtgaagaaccagggacaagcacagcaggaagccaatgccactcatagacgcgtagaagcaagtggtgatggtgttactggacccctgtgagagccacagctgtggagaagggaacacttgaaagtcccgtggcaaagaggaatgcagccactgcaaaaccatgtcccaacaaggagtcacagtgggataaataggctgacctggcttcctgccttctaatccccagtcagcaccagccatyagccaaacccaattggaagccagaggacaaggagagtcagatgacacagttgtaggcgtcagcctcccagagcacaagccaaggcaaagggtggagagtggaggggaaaacagagaggaaccaacacacagtcaacaatcagaagtgaaaaatgttcggcttatcccacaaagcaaaccactgtgtgcagcttattacgactttctgttagcatactggacttctttttttttttttttttggagtcatgtgcgcctttattagctgagccattacttgagagggatgaagcgggaggagtgggtggccccgatgccgggccggccgtgctttacgggcttgtaggtgatggagaactcgcccaggtagtggccgatcatctcgggcttgatctccacctggttgaaggtcttgccgttgtagacgcccaccatgctgcccaccatctcgggtaggatgatcatgtcccgcaggtgcgtcttcaccacttcckgcttctccatgggcggcgcctccttcttggccttgcgcaggcgcttcagcagggagtgctgcttccgccgcaggcccsggttcagccgccgccgctggcgcgcactgtacagctgcatcrgctgctccagctgctcgtaggacatgtccagcagctggtccaggtccacgccgcggtaggtgaacttgcggaaggtccgcttcttcttctgctctacttctgccatcttgccggatcctcagaagagcagcatactggacttctgwatgcaccagaagaaatgcaacattattttgtggaagttcaaargacagatggcatstagggctcccagtgcctcatctcctgatgggtgggatttggattttctttccacarccctcacaacatgtctycttactctacattctacatctgtgtgagggacaaaaaattctgcatgagcatgtttctagcatctaggtgttttttttgtttgtttttttktttttttttttttttttgagacagagtctcgctctgtcgcccaggctggagtgcagtggcgtgatctcgtctcactgcaagctccgcctccctggttcackccattctcctgcctcagcctcccgagtagctgggactacaggtgcctgccaccacgyctggccaattttttgtatttttagtagagacagggtttcaccgtgttagccaggatggtctcgatctcctgacctcaagatctgcccgccttggcctcccaaagtgctggrattacaggcgtgagccactgcgcccggccagcttctaggtttttaggaaggccatcttcttcaatgctctcccccacctgctacatcaggaatcacccaacagcattgctgacaggttattgagtctgattaggtactttggtgacaaactgcttacaatctccagagggaaacttctatcatttaacaactctgttttaaaaaagttcacaggcaggggtggtggctcatgcctataatgccagcaytttgggccgccaaggcaggtggatctcctgagctcaggagtttgagaccagcctgagcaacatgatgaaaccccctttctaccaaacatacaaaaattagccaggcatggtgacacacgcctgtggtcccagctacttgggaggctgaggcaggagggtgagtccaggaggtggaggctgcagtgagccaagatcatgccactgcactccaatctgggtgacagagtgggaccctgtctcaaaaagaaaaataattaattaattaattaaaaggttaacagtaagccacaacaatgtttattgaaaaatttccccttctcagtgacagttttatttaatatcaaagttaggttcttaaaagataatttaaaagttgaaattctctcagttttacatataacttcaagatgattcaacaccattggtaccatttggccatgttttcatcctcccraaatgttttgttaaatggggtctggaatcccagagattctcatctgctgctgctatgaagcaaaattaactcaagagtggagtgaaggtgttaggtcaatggggtgaaaacattaattgaggacaaagactagatacttttagggagagggatagggatacaatgatgtcattatagaattacaagctaaagttcgcaaaggaaaagaatcagtgtaagatgaaacaggcaatgtttgcagcactcaggaaccaaaaaaaggtctgaaaaaataaaaccggaagattcagggatagtttccttttattcctagggatccgctctcactcttctctcttctgctctgtgccctaagttgacctgggatggatacatggactgccctgtggcttctgattaggttctggttagcccctgggacaccctaggcagaagatcagaggggagaagagtaaggctggaatatttatctgcttccatctttctccctatgaggtctctgcaggctggctgcatccctgtactcaaggcctctatcggacttccccctccgcacaattttctctctggattccagtaattctctgcccttcagacctggggcactgcctaaccctgaggtttcctacactgcccacaacttcataaacagtcttgttcattatgaaattactcaattccaatatgctgtttgttttctgccaggaccctgattaacacactcagtctcattagcctcccaacacatgtttattgagtaactrccacatcccaasgaggaataaaatgatcaattagagaatcmatgccttcaatagggcagtctgagagtggagacagccagagaagcagatccttatattacatcctgacaggtgacacaaggaggcactggatggggaggtcagtgggatataaaagtctgggcaggggcagactcagggaaggtttctcagtggagatgggrgtcagggaaatttagaggcagtggcgtgggtaggaagtggtcagaagctgccagagcagtttacagccaaggacatcagggccagtcaggttgtggtaagagactggcagggggtgctaggctggaccagatcaaagaaagccttgtgctggggaaaggtatccttctcttccatttgcttactctccccaccaagggaaaaataatgacacaggtgaggtctacagccttttactctgagcccttaatcctgccctactaccatggcttgccactcctatttccttagcctgctttgaaaatcatccccgtatacttcctgcacattctaaggtctttcaagacggcaacaagacaatayagcaaagtagtccttggagatgagctacagaagagggctagaagtgaacgttcccaaatgcattctggaagccctggcagtcagaaccctttttcttataatagcattagataatgctgacattgtttttgtccagtggagaagggtraggataatgttggaaagagggcagggagcragcttcacttcatcaaggaggggctttggttcaaatyggtttgggtgggcgggcactttgaaaatccatttgtcacactaaacggcaagtccrggtccaggaggttcctgtcttccctctctcaagagcaaactgcaagtagtttcattgcaggataaggccaagcccaccgctgcccatgctgtttttgttttgtttccagacagagtctagctgtcaccaggctgcagtgcagtggtgcgakcatasctctcctgagctcaagtgattctcttgcctycacctcccaaagccctgggattacagctgtgagacacctcatggggacccggtttactgggttttttttgttttttgttttttgtttttttttgagacagagtctcactttgtcacccaagctgaagtgcagtggtgcaacctcagctcactgcagcctcgaccttctgggctcaagtgatcctccttcctcagtcccccaagtagctggggctacaggtgcatgcatttgtattttcagtagagacagggtttcaccttgttgcccaggctgttctcaaactcctggactcaagtgatctgcccgccttagcctcccaaagtgctaagattacaggtgtgaggcactgcgccyggcctttactgttaacttaaaacaaaaaattataaatttgaaaaaagaggagactttatttcttataaaaggttatagcctgcaaggaggccattccataggctgataaacatagcctctggcctaagaccagagacaggcacttggaaggcagaggggttggggtaggagctttatgctgaacagtttggccaaacatacatacgtaacaggttacaggaggagctatgaatattaatggaggtggtccttacacatgcatattgaacaaacatgcatgtaacatgttctctttggggtggagacttaacatttaattgtattacttcaaatacatttaaatgtattacttcaaacctacacttcaaaaggtcttttcaggacgtgaatgcatacaagtgcacaatccctstacactggccagaaccggtccatggtcggtcttctwatcatgaaaaagttcctgaaatcagcccagtgaaagctgtagttctggctggtgcaacaggggttcagctggtcagcatctgtgaactgattaagttgtaattgttttaatattgcttatctcaagccagtgcttgtttagcctctagaggaaaagaaaacstttgtggcagttagaccatagtttatttcttaagtgtaggagtgtgtgacttaggtcctttttataatttgatgtcttattgctacaaagagtctgttctgtccgccttatgatttctattttaaacattaatgctagtcagctgttgagtctaaattccaaaatggagggggtagacttcccttccggctgtagctagaaactcagctttaaggtttttcyggrgtctgcttggccaaggaggtccattcagtcagtgaggggcttaggattttatttttagtttacaccaccttacaggttcctccttaacaccctttgatgtcagagacagccaattctccagcactgtggctaaggaggcttcgttagtagttaaaagcacacacataaccctacccaacggatccctctcttctcttaaccaagagggcgcaccactgccctackcaacctccccacaaataaggacgagacacgggaagtgttaaaagcaagtggtgagtataaaatcctcggaattttctctttgagcaactaactaggtctgttactgaagccctctgcgagcttggatgctggacgagggagagggtgaggccaccaggcartgagcgccctcggcggccgcgtgatcccgggggtggggcccatttctgagttggggccagctccccacccscaaraggccccacattccgggccagcagcccagaaagtccmtccccgcaggcggagacagccccaagaagtcgacgccccggtcccgccgcccggccactacccagagggctgccgccgcctctccaagttcttgtggcccccgcggtgcggagtatggggcgctgatggccatggagggctactggcgcttcctggcgctgctggggtcggcactgctcgtcggcttcctgtcggtgatcttcgccctcgtctgggtcctccactaccgagaggggcttggctgggatgggagcgcactagagtttaactggcacccagtgctcatggtcaccggcttcgtcttcatccagggcatcggtactggcacctcctgggggggtgcggggaggaaagcggggagaacggcgggggcagagggtcctccgtgaagccccttccagctgaggaagtgctggaggatcgcggggcccggaggagtgcggtgaggagcgcgcgggaagccaagtcggctgggcgggagggaggctggctggctctggggcgggacagagctgcggttcaggaggatcgccgcgagcgcggggccgggggtgcgcggtggagacgcgctgctgggggcggcggagcggggccggccccacttggttaactctttgcggcgactggctaggacgcactggaggggcctccaagacccagaaacttgagcccgggcgcgatgccggagcgccgcgcagtcgggccgctgcagcccacgcgccccggaaagtcgcccctgtggaccgagcctgcgcratcgggggcgcggaaacactttcgcctcagccttttgctgaacttgcttccaggctgcagatgaggaggggaaggcagcggggaaaagattgccrgagcgagaatttgcccgtatttgtaacatcctcggccctgggtaaaggggctggccaaggggggcgagtgaagcatccgccctgggttcctctcctcctagagtgttaaactcagtcgagtccgggaagctgccaggacttccaagtgtgtttcrccgccctgcccagtcattggacggtcttgagcccgacttgtttatgtggcagaagagtggcgaaagttcccccgcggggcttcctattgggcactggcccagcactccgggtgggagatgcccggagagggcccgcggctgcctggcaccgagggatgcctctgctcgggatgcccccggcgcaagctgcgtccgtgtttggcccgcggcgagccagccccgggcctgcattctctgggctgaggctggcgcgggggaggggctcagcagtcgctggcaatgtttgttgtcattgtgtagtgcctctcacaatgtcctgactgcttccttcggtttgccgtgtagctggaggaacctctagcttttggcgcaaacaccatttatttgtaaccacttccccaaaggcacggccttcagaaagtagttagagaaaggcagcaaggggtggagtggtgytatgtcgcagaaaataatcgagaggagtagcaagggtttggaaagatatgcccactggccgaaatctctagctttgcctgcgggcaggctgccttttcttcaccaaatatttaactccccacaaacgagtgtgcaaaagagtgctgacctcattcctaaagaaaagtgattttggcttttgtttttgttggttgttttaaacttgtactgcagctttsgcaagtgtggccagcattctcccactctggaatgtagtggaaggtgttactaaccctcagcattcaaaggcttccctggtgtgagatcggcatcasggtgtgagcaccactgggcacctaaggcatttcgttgcgtaactctcagttattttgccactatgcttataagaraaaaacatactcaagttccaaagtaactgtcagaagcactctttccttcgtggtggagcccttaagtttggccccgagctgtctacaccttgtttgctcaaagagtagagccagtctcctcttctacccaactcttcagagcagcttctaataccaaaaagctttctggaggtcttggaatatcttctcataattgagggtaagggaaacacaagtgttattgctcgttgcctgacttgccacagaggagaagacatcagaatggctaatagtgattgcatgctgtgtgtccactaagtgcattatgtcacatcacatgtatgtaagagtaaactgaggcagagaagttatgtaacttacccatgaaagttgttttaagtcttttcagtgaccttatcgtcaaagttggattctctgcttttatggcaatatgcttattttctgccaaatctttttagacagcgaaaaccttcatctaaaatatgttttgaaactcttcattcatgttagagtccaatatacggttttctaaaaggtttttwaatttctctaaactttgtacttctcttaatctgttcatacttaactcttggacaaaaatgtgtaaattttggcaattttcatctgctgctcttacgaaaatcttgtttctttttttctttctttcaagacgtagtcttgctctgtygcccaggctggagtgcagtggcgcaatcttggctcactgcaacctccacctcccaggttcaagcaattctcctgccccagcctccccagtagctgggattacagatgcctaccaccacgcccagctaatttttgtatttttagtagagacggggtttcaccatgttggccaggctggcctcgaattcctgacctcaagtgatccgcctacctcggccccccagactgctgagattacagacgtgagccacagtacccggccgatcttgttttctttaggttcaattactgtatttgtatcaatggtccagagtttgtcccgtcattactcatcctgtttcctgtttggatcctggatgtgcaaatcactttaatcataatgcatttaattgacatgagcataaatgttttcatacatgtaggcacatgtatagttctccccagttcttccatatcttggccaacccatccacattcctcaccctaagtattaggaaggctccagtggaaggagggggagtaataaataaactttataggctgcgagggacccacatgttacagactcgccatgttataacagacttttttaccgtgtgtgattgctgcaaggaggaaaattttaggctatgagatttcaaatctctaacaaagaacacgatgtattggagttcttctcttctgtaatacacaaatatttggagatgaagaagagaaggctaaagtacagttattactctaagtataaaatgctttagaaatgcaatatacaaatagtaaacaatatttgaaactaagaacaagtatgagtcctttgaaacacctttaagaagtaggctctgggccggcacagtccagctacttgggaggctgaggcaggagaattgcttgaactcgggaaacggaggttgcggtgagtcgagatcttgccattgcacttcagcctgggcaacaagagygaaactcccgtctaaaaaaaaaaaaaaaaaaaaaaaaagaagtaggctctggccgggcacggtggcttacgcctrtaatcccagcactttgggaggctgaggcgagtggatcccctgaggtcaggagttcgagaccagcctggccaacatggtgaaacactgtctctactaaaaatacgaaaattagctgggcgtggtggcaggcacctgtaatcccaggtactcaggagtctgagacaggagaattgcttgaacctgggaggtggaggttgcagtgagccaagattgtgccactgcactstagcctgggcaacagagtgagattctgtctcgaaaaaaaaagagggataaactccaaagaagcaaagctaacatagaagttacaaaacaaatctccctctccttctttattcccctttccctttctcgctcaccctctctctccttgtcccattttctcytctgtgtccctctcccttcctttccccctctctctcccctcctttccccctctctctccccacctcccatactccaagtatattttggaatatgtatatattctaaattaaagtataacagatcatgggaaatctaaaactaaaataaaattttaaactagtgggaaatctagctaacagactctaacatgaatgaggaagggtttagaagaggctttgtgcttctctgaaagaaatgtttcccatgaaataagtatactactaggaaatcagagaaacgaaccttgaaaagagggccacagaaaagactgaaacaaataaacgctgtcaaagtggctgttgaccttttaaaaggttcagcaaggtggaatgtgttctttagtgaaaggtagaaaattcgggtgtctacatttagcgaaaagaagtcttggcaattctatattccttcctttcctgtgtagaactccttttattgtataaactgaagggagagaaattaaatagtctaatgatctcaagttgatttcgtgagakaatataactacctttaagtaacatttaaaagactaacagaaattaagagcagttcttaaaaaacagttgggatatcctattaatttatctaaaagtgaccaaattccaagattacttaaatagacttgaaaaggctcttggggtaaaatccagcaagtaagataacggagaaagtgtcccaaatacctactctaaaagaagcttcagggacaccattgataataaatcctatcaatattagcgatacaagggtttttacaaagcgtaaagagatgatttaaagcaattttgtgaccaaaaccacaaaaaatatccccaacatattttttgttgtaaataaatacacatagatttttaaataatgcaaccaataaaaatgttttagatatgactgtggtgctcagtgctatatccccagtacctagaataacactgagaactggcacatggtagacgagtaagtggttgttgaatgaatgagtgattatttctgtaccatcattgaattgttagtaacaaaatgcagtttacagccacttacttgtgacrataacaatagtgtctaaagtaaacacaccctcgcttttccctagtgattctcctgttcagccagtttaaaagcactggcttagtcaacctccaggaagaatggacatcatattgcactggaaacscatctttattctgaggcctctagctgatgagaatgttgctgcttaagtacaatctgtacctcctcttcccttcatcccagttctccctcctttttctgcatcattaagtttctcccccaactggcttatttccaacatgttataatttctatcatcttcgaaaacaaaacaaagcaaaacaaaacaaaatcactcttgaccctgtatatccctcagctactgcctcagttctctgcttgccttactatgaacttttgaaatttttgtccatacctgcagtttctagttcctttcttcctgttctttctcgagccbgttccaattaggttttcatctcctgctccaccaaaattgtgcttaatatggtagctaatgactaccatgtcactaattccattggtcaattctcagtcctaatagtgtttgagtggaaggcagcatttgacataattgacccctcactcctccttggggcactttattttattttattttttttgagatggagttttgctcttgttgcccaggctggagtgcaatggtgtgatttgagctcaccgcaaactctgcctcccgggttcaagcgattctcctgcctcagcctccagagtagctgggattacaggtatgcaccacgatgcccagctaaktttgtatttttagtagagatggggtttctccacgttggtcaggctggtcttgaactcccgacctcaggtgatctacccgcctcagcctcccaaagtgctgggattagaagtgtgagccaccacgtctggccrggacactttctttacttggcttctctttcttcacctggtaagttgggtggcttccaggacacctgattctcatggctcttctctctttcctggctgccccatcctcagtctcctttgctggttcttcctcatcttcctgatgacggcaggttagagtgctcaagcctcagtcttctgaccacttctttttttctacactcacttctttggtggtcaatcttatccagtctcttcttcgctttaagtactatctatacactgaaccctctcaaatttgtatattcagcccagactcttccctgaactccaaatccaaatatctgtttgcctactcaaactctctacttgaatatcagataggcatgtccaaatctcagctcttgatcttcctcatgcctgcaaaaccaactcctcccataggttccaccatctcagtaaatggcaactttatccttgtagtcgttcaggacgaaattatgcagtcatctgtgattcttctcttccatacttctcagccatttcactagaaaatcttatagactctgaattcaaaatacagtattatctaaattctgatcactgactattaatttattgtctgtcttctcctactagaatataaactcccagaaggaagggattttgtctgttttcttcaatgctgtatccatagcattacccaacacataataaacattcaatgaatatttactaaattgatggaagtttggccagttctttaaaccagagggtcacaccaacaaggattggagtacaaagtaaataggtgaagtagatttagtatacagcacccaccagggtgtctttctggattcaactaaacattcagacacgagaaactgctgccaggggcggtggctcatgcctgtaatcccagcactttgggaggccaaggcaggtggatcacctgaggtcgggagttcgagaccagcctgaccaacatggagaaaccccatctctactaaaaatacaaaattagccgggcagggtggtgcatacctgtaatcccagctacccaggaggctgaggcaggagaatcgcttgaacccaggagacagaggttgcggtgagctgagatcatgccattgcactccagcctgggcaacaagagtgaaactctgtctcaaaaaaaaaaaaaaaaaaaaaaaagacatgagagactattaagaccatactgaacaccagtctactcagaaggatgtaggacagaagtcagagcttgctggcaggacagtggctgggcagtggcagtgggcatccttgcagcagcagtcatcatagccctcagtaagctatcctttcctcaggtaacagctcaggcaccaggagatgagatctgcactggtgagatcagagcttaaagtccccttgccccataggaaccactgtcttttgtagtactctgtatacctacttctatgatccctgcaagggataggtagtgggttgaacagtgccccccaaaaaggtatgtctaaatcctaatcccaggtatccatgaatgtgaccttacttggaaataggatctttgcagatgttaactatrgatctcaagatgagrtcaccctggatttagactgggctctaaatcctatgattggtgcccttataagagaaaggagaaggagatttgagacaaagacacacagagaagaaggctatgtgaagacaggcagagattggagtgatgtggccacaagccaaggaaaatggagaattgttggctcccctagaggccgaagagggtatggcatggcttctccctcaggaccatcctgctattataacaccttgatttttaatttctggcctccagaactgagagataataaatatgttgttttaagttactagatttctggtaatttgttatggtagctctaggggattaatataggctataacagttatcactgcactctgggaagcmcraagtattggcatcgtcatcaggtatttacagatttttcattgtttctctcagtccagacacagtttaccaattgggtcagtttttattataaccagcgttgcctaataactggtgacaaaccacttatctgtttactaaggcagttaattaaaggtcaaatcctcatgcagcagagtataggtgtacacttgtgtgagaggtgggaactgtagggaactagagagtgctcactcctggcaaaacaggaagcttccacttagccccagtggatcgtggctacgtgaggatgccagttcaaggttgccagggcttctcattctcccgagagaatccaggtttttaaaaaattggttcaaacaaaaagtaaaccagccacaaaaacaaaacctccaaaacattgggctgatcaaacaaaacaacatctttggaccaaattccagtccatagcttccagtttacaggtgactcctgctagggttttctgacttgactttgcaaggttttaaatttttcccttaaaaggtagaacattcttcctttttaagaaagatagagggccaggcacagtggctcatgcctgtaatcccaggactttgggaagccaagtagggagacaagcctgggcaacatggtgaaaccccatctctacaaaaaaaaatacaaaaattagccaggcgtgctggtgtgtgttggtaagtcccagctactcaggaggctgaggctggaagatcacttgagcctgggaggttgaggctgcagtgagccatgaccatgccactgcactccagcctggggacagaacaagaccctgtctcaaaaaaaaaaaaaaaaaagaaagactagaaatctttgttataacttttttctttatatagagacttccttaaaaggtcaaaacaagctttgaaatgactatacagactttggctgtacttttctaagtttttgttgttgttcattcaatttcttcrtattatcctatccatttaattaacatatttattaagtacttactgtgtaccagacactgtgtaaaacaagtaagatacagctcggtctgcaagctgttcccatttaatttggttggacacgagttatggtttctttctttttgcttgtttgttttgatacagggtcttgctctgtcagccaggctggagtgtagtggcraaatcatgactcactgcagcctcgacctcccgggcccaagtgattcttccacccctctcaaagtgctgggattacagttgtgaaccaccgcaccgtcccagctcaaattatgatggggttttttgttgttttgtttagaaatgtaggttatattgatccttaaatatttagagctggctgggaccttaagttctacccttcattttagagaccaaatgtctggccagggtcagacaaccaggtagtatcaaagccagtactctttctaacctgtcataatattgatatgaggcacaagaaaatatagctgatctttctgaaaacacacaatttctgaatatttttaaatgtgtagkcaattaattgaatttttttctttttctacatgtatttggtaccaagtagctgcctttgcgaggattttaatcactcagagatgtttctagggctaaaaatatcttccaaatcatctgaatcacttccttcattttgactttccagagattttcagtttcatgacattcgtgctgtgagacagtttgaatgcacagacatgtttcaaagctctgattctctttgacagccactgcaggaatcttttcaagaagtttatttaaagaagattctctgctttttcatttaaacttaaggtcctttggatagaatctggtaagctcttgcgtgcagagggaaatgagttgtggagactgataatcctgttctgagcattctgccaaggagagtgaaataatactttattcaaagagggaagggaagtgtaatgrgcacaccatgtttaagtagaattcataagtgttttaaaattccagtgtacttcaaactcaataacttactcttattttatttttgaattcacttcaagttgttaagtgggtccaagtgcagaatgctttttacttatttgaaagggccatttggtcttctattagctaatacttgcatcagcagtacaatttttcttgagttttttgatttgtgcattttatgggcctggcatggtggcttatgcctgtaattctagcactttgggaggctgaggcaggagaatcacttgagcccaggagctggagaccagcctgaacatcacggcaaaaccctgtctctacaaaaaaatacaaaaattagccgggcatggtggtgtgcacctgtaatcccagctatttgggaggctgaggcaggagaatatcttgagcccaggaagcagaggttgcagtgagccargatcatgccactgcactccagcttgggcgacatagtgagactctgtctcaaaaaaaaagaagactaaaaaataagtatgtgaggtgatggatatgttaattagcttgatttaaccatttcacgatgtgtgtgtgtgtgtgtgtgtgtgtgtgtgtgtgtatggaaacatgttgtatagcacaaatatatgcaatttttaattgtcaagtctctaaattaaaaaaataaattttaaaaaaagtaaaagaggatttgctcatttgctggcaatactgaatgaactactgtgctttattagcaattattcctgtgctttatttagaattatttgggccgggcatggtggctcacgcctgtaatcccagcactttgggaggccaaggtgggcagatcacttgaggtcaggagttcgagacgagcctggccaacatggtgatactctatctctactaaaaatacaaaaattagccgggcatggtagtgctggtctgtaatcccagctactctggaggctgaggcatgagaattgcttgaacccgggaatccgaggttgcagtgagccgagatcccgccactgcactctagcctgggtgcaaagagagagactctgtctcagaaaacaaaaacaaaaacatacttactgaattcctactatatgccaagctctatgctaaatactgggatgtgacagtgaacaagatagacatgttcccgccttcatgaatcacaagatttaaacacagaagaactagagtcaaaatgttttccatgtttggggacatttctctccctctaagcactcttcccctaccacacacactttgacagattctaaatttgcattgcctgctctaagacaaacttgtgtatataaatagttttgtaatggtatatggatggaaagctggtgtcaaaccagagattacattttagagagtatacattttcacatattcccaagttttggttatgcaacaaggagctgagacattttcttttcttttctttctttctttctttttttttttttttttgagacagaaactccagctctgttgcccaggttggagtgcagtggctcactgggactacaggtgtgagccaccatgcccggctaatttttctatttttttatagagacagggtttcaccacattggccaggatggtcttgaaatcccgaccttaagagatccgcctgtcttggcctcccaaagttctgggattacaggcgtgagccaccacacccagccgacattttctaataattaaacccaaattcaagttactgkatttttctcttcattgtcttaagataattatacacaggtattcacttcttcctccctccctttctttstttttaagtttgtcatgctagcatgttccaccatcaatatcttttcttttaaaggatttaaagtgtatttctcatctataatgtttgtatttcccctcattttctgggagaaatggaatgccaactacagcctctaacagcaaagccttgtttccgtcacaagtagctgttttataccatttccccttcttgtgggcttaggggacctttttcttccttctcattgaacctcaggaatggtgtctaggtaagtgccaagccaaagaagcaagaaatatttaaattccgctctccaggcagtttttataactgttgagaatagattcttgtttaggaaatatggcttggtttgttaagattgcccttttctcccaaagtccaccatatttcagttacttatacattttaaaaagcatgtaaacagcttatgcaaatgcaacattttgcatttatccttcatttatccagagagcattttgaagcatattgagctttgcagcagagcctctatgtagccaggatagatgctgtgaaaactccatgtgctagaggtcacctgcctcacttctgtgagagcccctcaaatctctgcgagccacctattgagtaggtaagactaattggctagtgggtttgcaggcttatggaaatattgttttaactttaaaactggaatgagctctttcaaccataagaaaaaacataatagatccctaagtacccacgacccagatttaacagatgttaagattttcagcaacataaaattttataagctgttagctgggtgtagtggcacacacctgtaatcccagttacagtggaggctgagatgggaggatggcttgagcccaggaggcagaagttgcagtgagccaagattgcgccactacactccagcctgggtgacagagtgagaccctgtctcaaaatagatgaatgaataaataaaaataagacattttataagctaaaacttagagctggtgggaaccaaggatgagacaaagtgatggaggagagaggttggaagtaggtgccctaactcaagccagaaacaaaacgagatagaaaaactctgagagagacccagggactctcaaaccataattgtatgggctcatttggatcagaggtgagcacctctcctgcttcagaaacccctaagggcttccctttagagtaacaggataataattggtgtttgattgatgaccccaaatgatcaataaaagactgaatatattctattcattctactgctggacagggaaagctagcgtgcagccaatttgygtaaatgtaaaaggtttttaaaaatcaagttttgacactcagagggggcaaagttcagttttacagcaaatttgacacatttctctgtgatgcttcatagcattagaaagagtaagaagtcttcactgggaacacggttgtctttgaatttttggctttatttatttatttttgagacagaaaagagtaagaagtcttcactgggaacacggttgtctttgaatttttggctttatttatttatttttgagacagagtcttgctctgttgtccaggctggagtgcagtggctcgatctcagctcactacaacctccacctcctgggctcaagcaatcctcctgcctcagcctgctgagtagctgggactataggcacacactgccaggtgtggtttatttttgtatttctttgtagagatgaggtttcactgggttgcccaagctggtcttgaactcctgggctcaagcagtctacccactttgacttcccaaagtgctgggattacaagcatgagccgctgtgcctggcccccacactttttaaaagtaaactttttactgaagaacaacatacatgcataaaagtacctaaatcggaagggatgtgtgtttatcacatgcacacatccgggtacccagaacaagaagcaatattctgtgcacatcagaacccccccagcaacccttgtaactcctttgagtcatgatatcatgatagttactctttttttttttttttttttttgagacagtgtcttgctgtgtcacccaggcagggtggagtgcaatggtgcgatctcagcttacctcaacctctgcctctcgggttcaagcgattctcttgcctcggtctccccaagtagctgggattataagcacatgctaccatgcccagctaattttttgggtttttttgagacagagtctggttctgttgcccaggctggagtgcagtggtattatctctgctcgctgcaacctccgcctcccgggttcaagcgatcctcctgcctcaagcctcccaagcagctgggattacagacatgcaccaccatgcccagctgatttttgtgtttttagtggagacggggtttcaccatgttgrccaggctggtctcaaactcctgacttcaagtgacccacccgccttggcctcccaaagtgctgggattacaggcatgagccaccacgcccagcctgtatttttagcagagacagagtttcaccatgttggccatgctagtcttgaactcctgacctcaaatgatctgcctgcctcagcctcccaaagtgctgggattrcaagtgtgagctactgcgcccagcctactcttgacttttaatatcagagatgagtttttattttgggaatttttgatataatatgatccagattggggagaaaatgctactgtggttcattgttcataatttgcttttcgagtgttgaaatcctgagtattktttttttctgtatgtagatgttcaagttcactcatctaagactccttacccggagtggtgtttgcataatgtgatggtgatgatgataacaaaaaaacaacaatattaattttaaaccatgaattgaggagggacaaactacttaacctctctgcctcagcttcctctgtacaatagtaataataattctatcttcacagagttgaggtgagaattataatgaaactgtgaagcacttagatggtacctactacctagcaaggactcaattgtgtgtgtgtgtttgtgtgtctstgtatgtgtgcgtgtgtgtgtaataaatgagcccaacacaggcaagggggagatgtgttattaggtcttcatatatcgcacatttttattttactattgcgtgatcacacacagattgcagaaggctccactttgtagataaaagttcactaggtcattgggtaaagaggcatttgctttcccaggaaactaaagaattatgtagggtctgcttagaggagaaaaagcatgaggaggggaaaccacagtgtttgagttgacatcaatttagtttccagatttgatcagtctgtagaaagtgctttgtgtttgtttatttaaacaatacttatgggtcacacatacacacaagtaacctagtraaatctgaataagggatggaggaggagggagagaaaaaaataaaaaataagtaaattttaaaaaaacctgaataaggtcagaggattgtatcaatgtcaatttcctggttgtgctatggtaccatagttatataaggtgttagagaaaactgggtgaagagtatatgagatttctctgtactgtttcttacaactgcttgtgaatctatgataatctcaaaatagtttaaaaaataagttctagtgttctatatagcactgtaggacgactagagttaacaataatatgctatatgctttcaagtagctaaaagagaggatattgaatgttttcaacaaaaagaaaagagtttgaggtgataaatatgctaattaccttgatctgatcactatacattgtatgttttgaaacattactatgtaccgcataaatatgtacaattattatatgtcaagttaaaattttaggccaggcacagtggctcacacctgtaatcccagcactttgggaggccagggtgggcggatcacctgaggtcaggagttcaagatcagcctggtcaacatggcaaaactccgtctctactaaaaatacaaaaattagctgggcgcgtattcccagctactcaggaggctgaggcaggagaatctcttgaacccaggaagtcgaggttgcagtgagctgagatcgcaccattgcactccatcctgggcaaccaagaatgaaactccatctcaaaaagaaaaatacagagatttaaaaaatacttatggaggagctacatgctttgagtccagggctgccttaggctctggggatacagtggagaaccagcaagacacattaacgccctcagagaagatgaagtaggrgtgagagggggccttgagtttgctttaaaagtgtactttttaaggtattgcattaaatcatttgaaaagattccttgaatatagaaatgattatccaaaaagtctccacgttctcaaggaagtataaccaatcgacattcataggatacccatatacacactaaatttagtaagtagcagtccttcagggttgggattaagtaaaagaaatattgtcctaatggtgaggactgttaagtgttagaatggaaccaaagaataggaaaaatgacatcctgtgctgaaagctttaaagaggctgaattcacatyggtctttgtaggtttagatgtgtttctgtctgaaaaaggaatagataatyccttatatttttataatcctatgaagttcttgggtgtttgtttgtttgttttttgagmcagagtctcattctgttgcccaggctggagtgcaatggtgcggtcttggtttmctgcaacctccgcctcccgagttcaagcgattctcctgcctcagcctcccaagtagctgggattacaggtgcctaccaccacgcccggctaatttctgtatctttagtagagactgggcttcattatgttggccaggcttgtctcgaactcctgacctcaggtgatccacctgccttggcctcccaaagtgctgaaattacagcaccgagtggctcactgagcgcagtgagccactgcgcctggcctgaagttttatatattaaaattataaaagcctttggtgaagtgaggctcctttttattttctggaattaagaaatgtacatgaggccaggcactgtagttcatgcctgtaatcccagcactttgggatgctgaggcgggtggtgcacttgagcccaggagttcaagaccagcctgggcaacatgatggaatcccatctctgctaaaaatagaaaaaatagcagcgtgtggtggtgcatgcctgcagccccagctactcaggagactgaggtgggaggatcacctggtcccaggaggtcaaggctgcagtgagctgtgatcgcaacactacattccagcctgggtgacagagaaagaaaagaaaagaaatatacgtgataccctgctgatatagtggaatccatcgtctgaggaagtattctataaactttttcaatctgccacacatttccagatatctaaattttccctgacacagactggagggatggataggggcaggattttatcttcagaacaaaaattaactgaatgttggttaaggtggccatataatttattgcttaaaccaggacacttaagacaaccctttgtaaaaaaacttttgttttctttttttttttttccccgagacggagtcttgctctgtcacccaggctggagtgcagtggcatgatctcagctcactgcaacctctgcctcccaggttcaagcgattctcctgcctcagcctcccaartagctgagattacaggtatgcaccacaatgcctggctaatttttttgtatttttagtagagacagggtttcaccatgttggtcaggctggtcttgaactcctgacctcaagtgatctgcccacctcggcctcccaaagtgttgggattacaggcgtgagccaccgcgccaggccataaaaaacttaattggagtttgttctacatgcagaatgatgaatcttctgtctatgacacctgtgaaaccagcacctagattgagaaacagaatgttagtaggagtcttcaaaatcccttgtgtgttccattgtaattgctgtatccttccccacgaaggcaactactatcctgacttttccaatgcagagatgagttttgctggtttctatacttcatataaattgaattacactatatacttgttaacgtctggcttcttgagattgacattataggttgatccatattactgggtctagttctagttgtagatcgtttctttccatggtgtaaatttatttattcattctattgatgatgggcatttgggggagtttccaggttttggttactataaatagtactgctaataatattctagtatcttttgatgatcatataaatatttctttttggcatatacccgagagtgaaattgctggacaataaggtatgcataactttaccttaagtagatactgccagttttccaaagttttgttctcattaaagcactcatcagcagaacattagagttctgactgctgtatattcattttgatacttggtgttttccaggtttagccattcagatatgtggtagaggtattctcattcggcttaaatttgtatttctctattgcatggtttaaatttgcatgtttttctgttcctttctttttcttatcaaactaagactttttttttttttttttttttgtcttcctctgttgcccaggctggagtgcagtggcgcaatctcggctcactgcaacctctgcctcccgggttcaagcgattctcgtgcctcagcctccagaatagctgggattacatgtgcatgccaccccatgcctggctaatttttgtatttttagtagagatggggtttcaccatgttggccaggctggtcttgaactgctgacctcaagtgataccccgcctcagcctctcaaaktgctgggattacaggcatgagccactgggcccggccaaactgagacatttttaagaagaaaggagacaacaggcataaatcagattgttaagattaggaatttggttttggataagtttgagatgtctgggaagcaaacrccgtacggaaataccaagaagacattggattatgcagatctgaagcttagaagacagttctgggctggagatataaattttttggagtccctgccatggagacagcatttcagtgaaagagtgaatgagatcacccacaagagggagtgcagagggagaaaaagccctaggaccgagcctgagaggcaccaaggttcattcacaagttgggagtgaagaaaatgccagcaaaggaactcctccaccgtcccctagagggagccactgagaggcaggggtaacatggggaagaggggagaagcaaaagccragggaaaaaggtttcaaaaagggagtgtccagtgtgtcaaactgttcattttgtgttgtttaaaaaacaaaacaaaacacattctgtgtcctttcgtctttccstagccatcatcgtctacagactgccgtggacctggaaatgcagcaagctcctgatgaaatccatccatgcagggttaaatgcagttgctgccattcttgcaattatctctgtggtggccgtgtttgagaaccacaatgttaacaatatagccaatatgtacagtctgcacagctgggttggactgatagctgtcatatgctatttgttacaggtcagtayttcagtgtatttacaagcaagttataaaaacaattcagagactgtaaatgttttcttttctttttttttttttttttttttgagacagagtctcgcttagccacccaggctggagtgcagtgctgcgatcttggctcactgcaaccactgtctccagggttcaagtgattctcctgtttcagcctcccaagtagctgggattacaggtacccaccatcgtgccaggctaatttttgyattttagtrgagatggggtttcaccatgttggccaggctagtcttgaactcctgacctcaggtgatccgcctgcctcagcctcccaaagtgctaggattacaggtgtgagccaccgcgcccagtgactgtaaatgttttctaaacattctttacatttgtttctattataactattttcccctcagagagcaccagaattgcagaattcacagaacaaaataataagaaataaagatttcttatactggatatgacttttaatctggattctctaaaaaccaacttatactctgctctatatcttaatatgtaaaattaagaaatatcaggctgggcatgctggctcatgcctataattccagcattttcgaaggccgaggtgggaggatcatttgagctccgaagttcaagaccagactgggcaacatagggagactgtctctacaaataaaggaaagacagagagagagatcgagagagagagaaatcaagagagagacwgatctaacaattagcaataaagagaatacctatttaaaaatctgtgggtcctggctgggcatagtgcactgctcactcctgtgatcccagcactttgaaaagctgagaccagtggatcgcttaagcccagacgtttgagatcagcttgggcaacatggcggaacctcatctctaaaacaaaaacacaaaaattagctgggcagggtggtgcacacctgttgtcctggctacttgggatgatgaggtgcacagctcccttgagaccaggaggcagaggttacagtaagctgagattataccattgcactccagcctgggcaacagagccagaccctgatctcaaaaaaataaataaataaaaatctttggggtttaattaaaatggttcccagaggaatataggcttaaatgcttttattatattttttggaaagaaaacttaaaatacataagctatttacttaggtaactataagggaacagcaaaatataccaggaaaagtaaatcaataaaggtaaaaaaaaatccataaataattcattttctattgtggtaaccaattaccacagacttaatggcctgaaacaacataaatttatgacctcacagtayctgtacatcagaagtccagattggcttgtctggtttctctgctctgggtctaacaaggccagtatcaaggtgtcagccttccagggctctgattgggagactagggtagaatcagcttaaagcaaattcagcttgatggcagagtccaggtccttgtatgtgcaggactgaggtccctgttcccttgctggccatcagctggggctgccctgaaccttggagtcctctcttccttgtacccggctcccttcatctccctaccagcaatggacatccagtccatctcgctggcttggaaactctctgacttctccttctccttcctcctcatctcttctcctcaaccagataaagttcttacctaccccaacccctagaggttaccattctcccggtgtttattctcattctctgctttttaaaatactttaatcacatactgtgaatcaatatattgattaaacaagatgtttaattaaataatattgattaattaaacaagatgtttaaatattgattaattaaatcatatattgtttaattttgctttttaaatgaaactttttttaaaaaatggtctcatatatattctattgcaacttttttttaactctactgattaaactgtattgattcctctggctatagttcattcatttttacttttgtattccactgtataaatatgccacaaatttacttacctgttctcttgctattttcagttagaaactatgctgcattgaatattcatatatacatctcctggtcctcacatctaaaggtttctctgggcatatacatagtagtgaaattacaagctcaacctaaaaagataatgctaaattgttttcccaagtgattgacccagattatattcctgccagaagtttatgagttcccatatccttaccagcttgcaccctctttaaactttaaatccttgctaaactagttggtacttaatgatgtattcttgtagttttaatgttcatttcacttgtgttttatcttctaagacacacctgtttgtgtcttttgtctatttaaaaaatgtttctctttttcttaaagatttataggaattctatatcgaattctttttcatttatatatattgctatatyttctcctagtttgaagcttgcattttctctgttgttaacatcttttgataaacagaaattgtcaattttaatgtaaccaaattaatcatcttttcctctgagactatcattctttgttttgttttcttttggtgacttgtttatgaaattcttctctaccctgaggtcaaaatatcatcttatgctttctactaagagcattaaaattttgtcttttacttttctactctagtacacagaaaaaacaaaccaaaaaaacyccaacaatatgaaaaatagttttgtctttgatatttaagtacttacttcatctggaattaattttaatgtgtgaggtgatgtgattcaacttcatttttttccagatgggtaaactatcttcccatcaccatttattgaatcatctctgctcctactatttatgtacaaagccaattgcatcctatagagtatcttatcctctgtatcctagccagtgcagtacagaattcaagtgtgtagaagtactgaagtatgtagaagtgtatagaagccataagaagtagagaagtagagagaaaaatctttgacttttggggccaggcacagtggctcatacccataattccagcactttgggatgcctaggtgggaggattgcttgagctcaggagttccagaccagcctgggaaacatggcaaaaccccgtctgtacaaaagatataaaaataagccagctctggtggtgcacacctgtggtcccagctactcagaaggctgagataggaggattgcttaagcctgggaggtcaaggctgcagtgagctgagatcccaccactgaactccagcctgggtgacacagcaagaccctgtctcaaaaaaaaaaaaaaaaaaagaatctttgactattttttattttaaagagaatgcctgccaaaggctaaaaaagaattaataaataaaaagaatgcttctaatattttaccattgrgtacagatgcgtcacatttcctcctacccctgtttgtgcaaaggttttgtttttcttcttaaatcataaatggatgtggaattttattgaatgcttttgctatctctgctgagatgaatataccttttttkttttttttttttgagatggagtcttgctctatcacccaggctggagtgcagtgctgccaccttggctcactgcaacacctgcctcctaggctcaagcaattctcctgcctcagcctcccgagtagctgggattacaggctcgtgccacaacatgtggctaatttttttttttttttttttttttagtagagacggggtttcaccatgttggtcaggctggtctcgaactcctgacctcaaatgatccacccgcctcggcctcccaaagtgctgggattacaggtgtgaaccatcacgtccggccaatgtttatttattttttaattgatgtataataatcataacatatttttgtggtacatatgatattttgataaaagtatmcaatgggtaatgamcaaatcagggtaattgggatacccattatttcatttatctttactttgtgttgggagcattccagttcttctcttctaggtattttgaaatatacaataaattattactaacggtaaacaccctaccttaagttttcttctttaacatcttaatgtagtcaattatataaatatattctatttttaaacttgggtgagttaaaaacatatttgtctcaaaattctcttttgctgtctgaaatatmcagattcatatctcgcgttgttgtctttgtgctaaccgagcttctcagaaatattatttcacaacttcatggctttgcttagtgggaggaattttggcacctggcttcttccttgctcagatccagaggrcaggtagtgtttaagaaaacaggatttgcaattaggaagacctcagtttggattaggttcatccatttgatagttggtgaccgtggaccaagttacttctctgaatttcttttgcacagctataaatcaaggattataatccttcacaaaatcataagaatcaaagccaaataatgcatctaaaggtccagcccagggcttagcacactggtataacacaaactagctgttgttattataagtgtaaatcctgtggtatgcccctttatgacctgcagatgacattttccacttctactattgatcataggtaccttcatggttaagaacatgcattttttgtcattgcaattttattcccaaatctattcatrtattcagcagtgaaccgaatacccgttatatgccagataccttgctaggctgggctgtgggtgatacctgttccacaagacaaatgtgggctcaaagagacatgctctctgcccttgtaaagcttgcagggaagataggcaattgagtatttggtagataggaagtgttctgggaggcctctcatatagtatgtgagagctctcatataggggataaaggaagtcacacctcayaccaagacctgaagccacacacctggtgtagaaagggcggagagtcttctaggtggatggaatagcatgtggggaagagtttgtggtatttgargagtagggaggagaccaggctgtccagagcagggcatagaagatgaattggaggctggacaggtataattatagggagactagcttgcaggtgtttatggagttaagatgagaaacaatggtggcctagaggagtagcagtagcaatgtagcaaagtggatagattctaaagatatttagcaggtagaattaatgcgtgatgtaaagaatgagagagagtcactcacaggctttattgagcaggtgggtagccacaagtttgaataagtgggtagatgagaagggaaacattggaggggaggagagggctggaggagtgttagatgctactgaggagataagcaaaataaagtctgaaaactgatcattaggcttagtaacctggaagtcactaatgaccccagaaagcaatttcctggcttccttcctaggagccagactgcaatggattgaagagggagcagaaggtgaggaaacagagtggtaactcagtcaagaggtttgggtgagaggggaggagacagagagggtgacaattggacaggggcaagagtccaaggaggcatttgggtgctcttttttttttttttttgtctacttctgctttttattgtgagaagtttgggcttatggaaaggctaacaggatggcaccagtaaagaaagagacactgtgaacactggagagacacagtgatgtatagctaggtccttgggaagcaggtcacagagcacagctgaaaaattggaggacataatctccaatgtaattgaagaaaagaattgttggcttggggtgatttcttgctttgttttgtttggtggcaggaaattgaggctcttctctgaagttgcttctgtttttcccatgaggtgatagtaaaatcatcccccaagagtaaggaggcacatcggagagtcagacatttgaggatgggggagaatggagagctcattgataaataagacaatagaggtttgctgagcagggttgttgaactgctcataatcatgaacttggagtgatgctagtctctgtggttgtggtttactccagtattacctagcagaccaggggtagtcatgaagatggctgagccagggttggggtattgccaagttgatgtgatgaaaagacagtgtagcaaggagatgtagaatattggcaggagacttaatgaccagtttgagtgtctgttacgtcccttataaaaaaactatgggcatattgtagttggtgctggttagatttatttatttatttatttttaatttttttttaacccctggaagaaaagtgtcattacactggaggaatgcaatttggcaatgacctaagacagcgtttggtccctagaacagcagcattagcatcactagggaaattagaaagacagattctcagcttccaccctagatccactgaaccaaagactcgggctggggcccaacaatctgtgctttaacaagcacataaggtgattcagattagtgctaatatttctgaataattaatctaagagaaaagcctatgaatggtcaaaaagttggacattaacagtaatattaatgaaaataaatgtgagttctttaacattgggagcttgtctgtcttgtgtagcattcccaacactccgaacatctgggtcataagaggggcaaaacgtatgtggaatgaaggactgaatgagtttataaaatagtacaaagatgaaggagagctgggaggagcttccatataataatctacagtttacttgaaagctcattaaatctacctgtaccctaaaaaaaaaaaaaaaaaaaaagcaaaccatacctactacaaaagctagccaggtagatattttctggtctcattaatgtcttttgcaataagagcttttgttatgtctaaaagcttacacacactaaaaaaaaaaaaaagaaaacaaaagaaaagaaaaaaaaccaacctcaggccagacatggcatggtggctcacgcctgtaatcccaacaatttgggaggccaaggtgggaagatcagttgaggccaggagttgaagaccaacctgggcagcatagcaaggccctatctctgtaaaaataaaaacaaaaaaactcatctgtttcataaagtgagaaactgccatagtagtatacatttatatctttaagaatagtaataattaactgagaaatgcccaggcatttaagatggaaactttattctattctattctatttatttatttatttactgagacagcgtctcaccctgtcgcccaggctggagtactgtggtgcaatcttggctcattgcaacctctgcctcctgggttcaagtgactttcatgcttcagcctcccaagtagctaggattacaggcccatgccaccatacctggctaatttttgtatttttagtagagaaggtgcttcaccatgatgtccaggctggtctcaaattcctggcctcaagtgatccacccacctcggcctcccaaagtgctggaatggcagacatgagccactgtgcccagccaacatggaaactttaaaagtaaacttttattgtctatttctaattataaaagtaatacacattaatgttaaagtttataagatgtagaaagatatraagaaaaaaccctggctattctgggcacactgcctgtggggtattcctgttccacaaggagtagaacctctgctgctgctacaaattaaataaaaaaacaaaaaatgaaaaaacccactgatactgccataatctagagatatcattagcttttggcttattccctttaggcttttattatgcctatgcaaatgtagatatagatatttaatttttaaacataattgggtcatactgtattttcactttcatctctaagtaataactttttatgaaagtttatttttccttagctcttaagaacttccactgtgttgaagaacagcttcctgtaggtgatgattcctaaacactggggcactttgtttgcatatagttggcatttagtgtgtttgtagactatatataatggaatattccactaccttctcttttgagggttttccagactgtttatccatatctctagaataatttgagtgaatcaacagcagtcattttcaaacttcaacatacgtaagaatcgtctgggcagyttgttaaaaatacagattcctgggccctaatccagaaattggatttagcaggtcagaatgtggcccaggcatctttttattttttatttttttgktgttgttgkttttgttcttgagacagagctttgctctgtcacccaggctgaagtgcacaatgtcagctcactgcaacctccgccatccgggttcaagcaattctcttgcttcagcctccagagtagctgggactacaggcatgtgccaccatgcctggctagtttttgtatttttagtagagatggggttttgacatgttggccaggctggtcttaaaatcctgatctcaagtgatcctcctgcctcggcctcccaaagtgctgggattacagcaggcatccctttaaatgcatgccttctgtgaacagcacttccastactgacttagagagacaaaaggtcttataattttcggtccactaggttataaattatcaccttcacttgtaaggtagtaagattaagatagttaaaaggaaataatgattatttataaattataagttattataaattataaatatgcattattgcagcattcagaacacttttaatcaaagttaagcattctgtaatgtttttcttttccttttaaatgtaattttcttttgttgcaaaaaatgtttaatggtgaaagtcagatttagggtagttaagttgctcagggatcctgtaagcaaatttctgacctcctacctgcttagactgttgagccctacaggattgtaagagacacacatgacaaattatggaggaaatgagagaaaacagaaagaatcttaggaatgaaaataggagagcaggaatgagaaatatatgtttctatgggtaagccacagaaaagatatgatgatttatggagatatatttgtgctatatccctgagccccattttcttttcctttcttttcttttttctttcttagacagggtctcactctgtcacccaggctggagtgcaatggcacaatctcagctcactgcaacctccatctccaggactcaagcaatcctcctgcctcagcatccacagtagctgggaccacagacgtgcaccaccatgcccagctaattttttgtagagatggggtttcgccatgttgcccgggcttgtcttgaactcctggactcaagtgatcttcccaccttggcctcccaaagtgctgggattacaggcgtgaggcaccacactcrgcccccattttcatatagaaagcacaacatggacatcaggaagcttgccctttgatactaatagaatcactgaagttcactgaagaagatttaggaatattctgaaccaccaagagggaaccctctgaaccatttctaatatattcaggcattttggttattaactaaataataaaatatgcaaaccaacctatcaaatgcatttgttattactttttaaatataaattacagaatttattgtattaggatatacttcagaaaacaacagttaatcttggctattcttggccctttgatctatgtaaattttagaatcaatgcatcaaattccaccaaaaatctattaggattttatttaatctatagatgaatttgagaaccgacatctgtataatacaagtcttccaactcattatcctgagcctgtttttttagccttctccaaaatattgcaaagctttatattttctttgtagagttgttgtctccaacttattgctagctccttgctattaaaaatggtatcattaaaaattaattcacttgttgcctctttacaaaaagtgcaactgatctcaagtataaatttatacctagcaaacttgataaacttatgttagtaattaatctcaagattcttttggattgtgttttataatcttatgtgattaataagttttgtttctttttctatcatcatttttttttcttgcttaactcagtagctgagactttcagaaaaatgctgaataggaataggtgataagggatataagacaaatcccttctagatctgagtcatgtcttggaagagagctactctgaaatgcctatagaccataagcagactgtgtgtgagcaaraaatatacttttatatgttaagctcttgaaaatggagcctgttagttcctatagcatgttctgtcctaatataatcagattaaaataatcatcttccattcctagtttgttaaaacatctcatacatgactgttgaatcctaccaatgtttttcaccatctgttttgatgattatatgatttttcctctgcagtctgttaaagtgacaaatcatacaaattgttttgttatcagtttccatttattactacttggtattacacatgagctgattctcagtgtgaattagggcgttggacccctccccctgcctcccttcttctgtctccccattagcccttggatctcaatcaagaaagctgaacagtgatgttagtgctttctccccactctcctctcttttcataattgttttgctaggatggtagatcctaaataggcatctgaaaaaaaatgttcctttaaactcagtaattcagtaaccacaaagtcatctttatcttgttgaagagaggatacttgatgggcaaacgtgtggggtgacaaaaccgtgaaagcgcaacagacttcagtttatataggaaccttgctgtcttctctgcaaagaggtatcccactagcgatttcattatcaaggaaatgaagacaccttttctgcagaattcatttctttctcataaaacaaaaatcaacttcattccacatagctttttaggttgaactgactaaattctgtgtcctaatgtactcggttttagtgatttaaaaaatcttttccttcccttcctacttagcaaccttaggagattggtaaaaacaaacaagtaagtaccagaatgttcactatagtcggattaaggatagcaaaaaccaaacagaaacatccatagagaactgtataaataaattgttatagccttaggatattagccattaaaaggaataaattaggtaaatgtataggtatgaaaaagatttccaagatattctgttaagggaaaaaagcaagatgcagaacaatatgtatagggataataaattttctggaatgatccatgagaaggtgataaaaggggttacattaggtagtggaactggagygaggaaacttcattttctaccctttggttctatatgaaaggttttgtcatattacacatattgctttttaaataatttaaaattagtttagaacttaaaattaaatgataacctttgcactttttggtgtttagcttctttcaggtttttcagtctttctgcttccatgggctccgctttctctccgagcatttctcatgcccatacatgtttattctggaattgtcatctttggaacagtgattgcaacagcacttatgggattgacagagaaactgattttttccctgtaagttgcatagtcttcttaattgtaatacttaagccacaaaatgttaaatacttgttcactgggaaaatgtaataaaaatataacaaaattttttagatattaaaattaaaaaatattttaaagaatttgttatatcatataggtaatatgatattactaaaagtttagaaggrccaaaaagtctgacaaattgtattactcttatgaaacaactattgaagttatacattccctttcaatcttgttgatatgcatgtttttatattaattgtaattatagtgtacatacatttttgtttcatcctttttaaaaattttaagtgataactgttactggtggagggtgtccaggttcttggcgttttgaacaaagaagtggacaaaacacacaaacaaagcaagtaaagaatgaagcaacaaaagcagagagttactgaaaatgaaagtacactccacagggcgggagtggcctgagcagccactcaacggcccgatagggaatcttcttgggtccaaatagcccctagaggtttcccattggccagttggtgttcactgcatgtaaatgaagtggtggcctgcagtcagtttgattggttgtagaaagcaaccaatcagagatactttcaattttccatccgccatgcagaaaagcggggtttgcaaagggagtagcytcgggtccttttgctacttagatgtggaaagttggggttttccttttggtttagttctaggaagtccgtgtgaattgacctgaggttgcctgcctccagaccctacctgccttaaaacaagtgttacagatgctatattattttcatatttattatttttaaatcaatttcattatatattccygagtgaattgtagcataatttatatttctccttaatagcaagctttgagagtttacattgaaactgtactagtgtgcmttttgagcagataaattcaagactgttttgcatgttgctgtatcatcctstttgtaattggatacatctcttatttcataggagagatcctgcatacagtacattcccgccagaaggtgttttcgtaaatacgcttggccttctgatcctggtgttcggggccctcattttttggatagtcaccagaccgcaatggaaacgtcctaaggagccaaattctaccattcttcatccaaatggaggcactgaacagggagcaagaggttccatgccagcctactctggcaacaacatggacaaatcagattcagagttaaacartgaagtagcagcaaggaaaagaaacttagctctggatgaggctgggcagagatctaccatgtaaaatgttgtagagatagagccatataacgtcacgtttcaaaactagctctacagttttgcttctcctattagccatatgataattgggctatgtagtatcaatatttactttaatcacaaaggatggtttcttgaaataatttgtattgattgaggcctrtgaactgacctgaattggaaaggatgtgattaatataaataatagcagatataaattgkggttatgttacctttatcttgttgaggaccacaacattagcacggtgccttgtgcagaatagatactcaatatgtgaatatgtgtctaytagtagttaattggataaactggcagcatccctggcctgttgtcatgcagtcatttcctgttaattctgggagacaatgatttcacaactagmgggaagcagtcctaaaagtttaaaatccgataaggaatatctgggacagggtttagatcatgactctacacagataccatgatgagagtatattaaagaaatttaggaaagcacctggttcctttctccccatgcctgccttctgctccctccccagctggtttgggctcaaattgtccctggagactagggtttatgttagggtattgatagattagagcaggtggttgaagagatcttctctggtcagacttggaagaatttccaaaastgaagttagccccaagacttccctagggttgatgtactttatgatccagatgctaaacttcttagaatgaaaatatgcttcaacacttaagtagcatacactgccctacaaacctcagagagcacttttccccaagttcttgtttttatttttgaaagtactcacacagcacttactatgctccaaacactcctctaagcactttacacatattagctcattcagtccccagacagacgggatgaagtaggtattgttactgttcccattttacaggtgagagatttgaagcctggggaggctagtaactcaccccaaggtcacacggctcatacatggtgggactgagactcagatgcaggcagtctggcacctcagtctggattctaaccatttcactaagctatttttgtcttgtactactttgacccacccctgaataaacctcaattgctggagtggggtgtagttattaaagggatgctttttaccttttgctgtytgctgtggcagattccccagataaccaaggaaaaggggccacccatacctggaaataggccatagggcccctactactgccaacaagccatggcctaccttgacamttgtttgatcttaaaattgtgtcttggtaacaaaagatttggacaggcatatctgtagctttcaagttaattaattgcaatatttttttcttcaggattttagctgctgaacaactttcagtttggagctaaaagagacctgtctcatggtctgcccttccctggggcaatagctagggtctttcctgatttttatggaattttaggggatattttgaacttgggttctcagtagtgaattgagacttggaggtgacttttcatgtttggagtatcatctctgtctgggmtctgggctgacaaattaaaacytagagtagtgcttatgctgaaatgatacttttcattttttggttgatttttttgccttcccttcaattttaaactgaagcattttaatrtgggtagaaactctacaccaaatacactaaacattttggtgcttagtggatttctttttaggtaactggtacttacttccaaagactgaatacaagccacactccatcatatcccttaaacttcatgaaaaaccattcaagatccccttgctgcaacactgktctcttcttctctactaaattctatttccaaaattggtaatagagccagaaggatccccagtacccagccctctgcctggcacaaastggtagcacaattaaattcagtatgggtggagcatggtacagtcttggtgccatagaaggagtagttgcatagtcacacatcatttgataagttggatgttccattacatagaggaacacaaaattccagggtttttggaggaagggattagatagtgactaagccgccagaattgaggtggccattcctttttgtataggstaagaaacaggttatcagtgaaaagttaattatggctttggcactagaatagcactgttgcaaagtatttaagcaccccccatctcagccctttattttatctttcatgtgggctaatgrgaggataatcttacagatattataggaatttcttttctatctttatgaaaacaacgtatataaaatatatctagaaaacctttgtttgagactcttatttaatgggcttttgattctaatgataattgtacctttatctttcaaaagctgatatttcctacctaagcatctcccgagaaaaatatctcattaaaaagcccataaataataggggagaagaaagccttaggtatcaattccaaaacagtgattgaaatttcccaaaataattatggcttctgtcatctccagagataatctggcttggtttaccccataatctaatttcagaaaagaaagctttattttaacactcatctgaatcaacattaaagccttttctctcaaagcgtttattgagaaactcaaatgaatatactttttgaattactgtcatcaaaagtgtacggcttcctgtgctgcttgtgtcaaatggaacctgccctctaaagcactttctttcctttacttgcgtggtttcatgtaagctgtgctgtttagaaacaacatctcagactttacaaagaaatgacaaagaargcaattgcactttttaagggatatcgacaagcagtttctgttttctaaaggacaaaatacagagtgtgtgtcatttttaattagattctttcccctgctgagttggaaattccagtgcagcactgattgaccacagttgccaatctaaaagcacaaagacagaagtaaagctttatgctaattttatttcaatatgatagaaaatttatcttggyatgtccttttttagataactccagcaggaaactgtaactgctatgtctttaggaaaatgtagaagaaagaacattattrttctttaattcctacaaggtactygaaaaccttaagtgaaaaagatttctatctttttatcttagygcatttatggaaaaaatattaactrtcctgaatattttataattttgtaggaaaaatatgcatctattttttcttgacttcttttatatagtaataaaagttattttggaagctctttgtgtgttatcaatttstctggggtarcaggggtaggcattgttgtgaaagtttctttgccatggtttttggtttgtttatttttcagcagagatagtcttttttcagtttcttgattatgttaactgaaaagccagactctgtaatgtataatacatattttataatatttactattaatattatatatttatatataatatttactataaatatcatatatttatatataatatttactataaatatyatatatttatatataatatttactatwaatatyatatatttatatataatatttamtatwaatattatatatttatatataatatttactawtattatatatttatatataatatttaatattttatatatataaaatttttygcagtaaagagtttaattaatgcaaagcagccaagcagaaggactggagttatcactcaaatcagtcttcctgagggctcagaggttagggtttttcaatgatagtttggtgggcaggggcaagggaatggatgctgctgattggttgggaatgcaatcataggtgtgtagaaaacaatcctcatgcactgagtccccctctggaggagggccacaggaccaattaagtcatgagtcacaagtccagatggggtcagctcttcactacctgaccaatcttaggttctacaatagtgatgttatctataggagcaactggggaagtcacaaattttgtgacctctggccacttgactcctgagcagtaasagattagagaaactgatgcaggtcaggggagccccaacgtggagcttagcccatgtaggtttttggctttgcccaggaaagaattcaagagcaagccagaggtggaagaamacagctttactgaagaggcagtgttacagcaccatgactgctcctgtagagcagtgctaccccctaggcagagagtagcctgtaaaatattttaaagaggtttattctgagccaatacaagtgtcaatgacctggggaacacagtctcaagaggtcctgagaaagtgtgccccagcrgtcggaattacagtttgcttttagatattttagggaagcaggagttataggraaaggcataaatcaatgcatggaaggtatgcagtggtttgccccaaaaaggtgggataacttgaaacagaagcttagtttataggtggattcagagactctttaatatgcaattggttaaaggaatagagctctgtctaaaaatttggagttggccgggtgcaatgtctcatgcctgtaatcctagcactttgggaggctgaggtgtgaagatcacttaagcccaggagtttaagaccagcctgggcaacaaagtgaaaccgcatctctaaaaaaacaaaattaagaagttatctaggtgtggtggcatgtgcctgtagttccagctactcaggaggctagggtgggaggatcacttaagtccaggaagtcaaggctgcagtgagccatgatcatgctactgcactccagcctaagtgacagagcaagactctgtctcaaaaaataaaaataaaaataaaaaaataaaaaaaaatttgggagtcaacagaaaggaatatttatggaatagcaaattattctacgtagtggttctctgctaggtttaagacaaatttctgccctgtaatagctacaataaggtcatgaggatctggtaaaacatactcaaatatcctacccaactttctacaccttgctgaattcagcatctcctctaaaactcagattttagagcttttcagctcctgcttcatctcctttgcccctgctcccaccacgcctcagtctgggtggaatgtttctcctcacagcattcaaagaacttggttcctgcctctagcccatctttttttttttttcagttgcaagatttaatagagtgaaaacagagcttccataaaatgggaggggacccaaagggggttgccgttgccggctcgaatgcctgggtttatgtcccaatcattgtcccttcccctgtgctctcacgtgatagatgattggctatttctttacctcctgttttagcctaattagcattttagtgagctctctttactayctgactggtctggtgtgagctaagttgcaagccccgtgcttaaaggtggatgcagtcaccttcccagctaggcttagggattcttagtcagcctaggaaatccagctagtcctatctcttagtaccacctctcaacaggaaaacccaagtgctgttggggaggttggccaaagacygctctaactgcttcctgctgaattgggacgtagtaggggtcgtgcaattgagatttcctcgggaggsgtgccttcgatgtcattaacatcagagcatgggctagcaggccggtccaggggtccacggtagatcttagtcatggactgcttctggggctccatttgaagaacgatttgtagttttacagcttcgattctggaagagacaaacttaacaaggaggttaaagatacagggattgaaatgtatggcctgcagtgcaggagattatttctttggcacacttcacaggccctgactatctgcttgatagttttgaaaaggcctggtcccataaataatgatttggccatctgatgggtgctatcaatggctaagtgaaaggtttggtgaagggttttaagtaatttccattggttagctgcaggcaaaagtattttcccttctttggtggctagccatcctgaggggaggaaactatgtccccgtgaggttccccattctatttctcctgctgagtacagaggggattaccccacactaggggtccttctacaagcatttctaatggagggtcccaccttgtggctcttttggcttcaatatccacttggcagttcccttccgatgaccccgacagtgtaagactgccacctctttaggtttctgtacagctaataataatctcctaatggcttcctgatgtttgataggtgttccctcggaagttaggaattccctttctctccatattgctgtgtgggcatggaggactaggtaagcatacttagagtctgtatatatatttaccctttttccttcttctaattctggtgcccaagtgagggctattagttctgccagctgagcgctagttcctggagtgaggggattactttcaagtattccattatcactgaccactgcataccccgcttttcgaagtcctttttctacaaaggaacttccatcagtatacaagttgaggccaggatcagtcaagggaatctctagaaggtcccctcgagtggtgaaggtttgagcaattacttgttgacagttatgttctatttttttcttcattgcctggaagaaatgtggctggattaagagttgcacaagtgtgcagtcgcagcactggtccctcaagtaatagagcctgatgtttaagcaaatggttgtctracagccacaagtctccacacagtgagatctcttccctgtatcattttaactgcttcagatactaagactgctactgctgccactaccagtaaaaaatgaggccaacccgttgtcactgcatcagtttccttactcaagtatgccatgggttgcaagctggtccctcggacctgtgtaaggactcctagagctattcctgtttttttctgttgcatataaggaaaagtcttgccctgttggcaagcttaacactggggcttggttagggcctttagggcctggaaaaccacttctgcttcaggtgtccatcttactaaatgggtattggctttctgagttttcttaattagtgtatataatgacctggctatttcgccgtacctgggaatccatattcggcagaagcctgttatgccaaggaaccctsttagttgctttagtgttttggaatgaggataagccrgtataggctggatacatttctcaccaagggcaaaacttctggtgagtgtactctttctgcaggaagtaaaaatggccttactaaataaattaaatttatgttcaagtactatttctttacagcacctgggaacaagcatttcaaacaactccttaccatttattccccgggtccacatctcttcttaaaggaatgtggactttcttccatgattatcggctgtatgaagaactgtcttggaaccaagagaatacatcttcataggatgcaggcttcagggagctagaatagaggagtggggagcacaaactgaaaagggttcccctcactcactacagaggcacaacccgtaaggccagccattctaaggacaggccaatttgggtgggtgaggatgctcgatacgggagcggtccaggagcacatgtctgccgacctttgttcatgtcagaggtagcccacagggcagtgctcatttatatcaccaatccataagaatacatttttgttttgtcaaaaagmcaatgtctatagaattatctgaaacctgttttttcagatctgactagagtgagttagctatgatcamtttccttctggtagccactcaaggggcgtgataggcragtgaggtttatagagtgaaaggaagacggctcatgcaggatttggctgrtgagtgttctattagggtgagaattttggaaggagaagctttctgattgactttcaaatacagttggcaatctggttggtataatatctactggtacataactaggaaatttctaggctgagtggaatagtatgagtttttctgtttcaacgggaagaatatctggttgtcagcctcagggtcagaactgtacataagcaatcccttagtttggtgaatgttatggcagaaatttagtctgaagtctagtccaaataaatgttttctatattctcatatctatttatatgaatcttatcacattaaggctagactgagacaygtcacaaatttctctcttgtggaatgaaggtgaaaaagagaaatataagcattgggtgaatgttgaaatgsataagttctgagattcctcttaaagtttagattctgatgagatttcctgaacaggtgcctctcttgtggctcaggtaccagagggactctgtagaactccagggggccaggccctagctcagccctggcacacacaggcaggccctagagtagccactagtgatgaaggaggagggcaggaagcatccttgccctccccaacccacgacctggctccctgtctctatcagcgctcacattccccattcaaacctctaggtcttgagcagattgtaggaggttctggcccagtgaactcacytggaacactcaaatgaaggaagtaaaagggtgtgaggcaagaggagcagtgacagccttaagtgtgagctaattcaccccaagagcaagcaaaagtgcaaataaaactcaagggtgtggaaaagtgtggagtgatgattaggattcaggcctctccttgcctagccttcctccattctctctctctcaacctctcactctctctctctctctctctctctgtctctgtctcatttaacagagcactggattgcgaatggagtgcaagtagagactgagaatcaccactgtagtgattgtatctgtgtggcaaatcatcttaaagatttcttgtatttggaaacaatgtctaataaagaatggccaaatacaaagttacactatacaaaaactatgtcatcaaaaattatattgttcaagtgaataattagcaatatgaaaatatgttcataaaatattaagtgaaagaaattgaatataaaagagtttgtaaatgtgaatgtgcatacactttcaaataactggaggcataatataccaaatagttaattagttaataatggttatctttggcctggtgtggtggctcatgcctgtcatcccagcactttgggaggccacggtgggtggatcacctaaggtcagagaccagcctggccaacatggtgaaaccctgtctctactaaaagtacaaaggaaaa

SEQ ID NO: 9896 - DNA, 12531 bp, Homo sapiens
ggacattgtgagaggcactacacaatgacaacaaacattgccagcgactgctgagcccctcccccgcgccagcctcagcccagagaatgcaggcccggggctggctcgccgcgggccaaacacggacgcagcttgcgccgggggcatcccgagcagaggcatccctcggtgccaggcagccgcgggccctctccgggcatctcccacccggagtgctgggccagtgcccaataggaagccccgcgggggaactttcgccactcttctgccacataaacaagtcgggctcaagaccgtccaatgactgggcagggcggygaaacacacttggaagtcctggcagcttcccggactcgactgagtttaacactctaggaggagaggaacccagggcggatgcttcactcgccccccttggccagcccctttacccagggccgaggatgttacaaatacgggcaaattctcgctcyggcaatcttttccccgctgccttcccctcctcatctgcagcctggaagcaagttcagcaaaaggctgaggcgaaagtgtttccgcgcccccgatygcgcaggctcggtccacaggggcgactttccggggcgcgtgggctgcagcggcccgactgcgcggcgctccggcatcgcgcccgggctcaagtttctgggtcttggaggcccctccagtgcgtcctagccagtcgccgcaaagagttaaccaagtggggccggccccgctccgccgcccccagcagcgcgtctccaccgcgcacccccggccccgcgctcgcggcgatcctcctgaaccgcagctctgtcccgccccagagccagccagcctccctcccgcccagccgacttggcttcccgcgcgctcctcaccgcactcctccgggccccgcgatcctccagcacttcctcagctggaaggggcttcacggaggaccctctgcccccgccgttctccccgctttcctccccgcacccccccaggaggtgccagtaccgatgccctggatgaagacgaagccggtgaccatgagcactgggtgccagttaaactctagtgcgctcccatcccagccaagcccctctcggtagtggaggacccagacgagggcgaagatcaccgacaggaagccgacgagcagtgccgaccccagcagcgccaggaagcgccagtagccctccatggccatcagcgccccatactccgcaccgcgggggccacaagaacttggagaggcggcggcagccctctgggtagtggccgggcggcgggaccggggcgtcgacttcttggggctgtctccgcctgcggggakggactttctgggctgctggcccggaatgtggggcctyttgsgggtggggagctggccccaactcagaaatgggccccacccccgggatcacgcggccgccgagggcgctcaytgcctggtggcctcaccctctccctcgtccagcatccaagctcgcagagggcttcagtaacagacctagttagttgctcaaagagaaaattccgaggattttatactcaccacttgcttttaacacttcccgtgtctcgtccttatttgtggggaggttgmgtagggcagtggtgcgccctcttggttaagagaagagagggatccgttgggtagggttatgtgtgtgcttttaactactaacgaagcctccttagccacagtgctggagaattggctgtctctgacatcaaagggtgttaaggaggaacctgtaaggtggtgtaaactaaaaataaaatcctaagcccctcactgactgaatggacctccttggccaagcagacyccrgaaaaaccttaaagctgagtttctagctacagccggaagggaagtctaccccctccattttggaatttagactcaacagctgactagcattaatgtttaaaatagaaatcataaggcggacagaacagactctttgtagcaataagacatcaaattataaaaaggacctaagtcacacactcctacacttaagaaataaactatggtctaactgccacaaasgttttcttttcctctagaggctaaacaagcactggcttgagataagcaatattaaaacaattacaacttaatcagttcacagatgctgaccagctgaacccctgttgcaccagccagaactacagctttcactgggctgatttcaggaactttttcatgatwagaagaccgaccatggaccggttctggccagtgtasagggattgtgcacttgtatgcattcacgtcctgaaaagaccttttgaagtgtaggtttgaagtaatacatttaaatgtatttgaagtaatacaattaaatgttaagtctccaccccaaagagaacatgttacatgcatgtttgttcaatatgcatgtgtaaggaccacctccattaatattcatagctcctcctgtaacctgttacgtatgtatgtttggccaaactgttcagcataaagctcctaccccaacccctctgccttccaagtgcctgtctctggtcttaggccagaggctatgtttatcagcctatggaatggcctccttgcaggctataaccttttataagaaataaagtctcctcttttttcaaatttataattttttgttttaagttaacagtaaaggccrggcgcagtgcctcacacctgtaatcttagcactttgggaggctaaggcgggcagatcacttgagtccaggagtttgagaacagcctgggcaacaaggtgaaaccctgtctctactgaaaatacaaatgcatgcacctgtagccccagctacttgggggactgaggaaggaggatcacttgagcccagaaggtcgaggctgcagtgagctgaggttgcaccactgcacttcagcttgggtgacaaagtgagactctgtctcaaaaaaaaacaaaaaacaaaaaacaaaaaaaacccagtaaaccgggtccccatgaggtgtctcacagctgtaatcccagggctttgggaggtgraggcaagagaatcacttgagctcaggagagstatgmtcgcaccactgcactgcagcctggtgacagctagactctgtctggaaacaaaacaaaaacagcatgggcagcggtgggcttggccttatcctgcaatgaaactacttgcagtttgctcttgagagagggaagacaggaacctcctggaccyggacttgccgtttagtgtgacaaatggattttcaaagtgcccgcccacccaaaccratttgaaccaaagcccctccttgatgaagtgaagctygctccctgccctctttccaacattatcctyacccttctccactggacaaaaacaatgtcagcattatctaatgctattataagaaaaagggttctgactgccagggcttccagaatgcatttgggaacgttcacttctagccctcttctgtagctcatctccaaggactactttgctrtattgtcttgttgccgtcttgaaagaccttagaatgtgcaggaagtatacggggatgattttcaaagcaggctaaggaaataggagtggcaagccatggtagtagggcaggattaagggctcagagtaaaaggctgtagacctcacctgtgtcattatttttcccttggtggggagagtaagcaaatggaagagaaggatacctttccccagcacaaggctttctttgatctggtccagcctagcaccccctgccagtctcttaccacaacctgactggccctgatgtccttggctgtaaactgctctggcagcttctgaccacttcctacccacgccactgcctctaaatttccctgacycccatctccactgagaaaccttccctgagtctgcccctgcccagacttttatatcccactgacctccccatccagtgcctccttgtgtcacctgtcaggatgtaatataaggatctgcttctctggctgtctccactctcagactgccctattgaaggcatkgattctctaattgatcattttattcctcsttgggatgtggyagttactcaataaacatgtgttgggaggctaatgagactgagtgtgttaatcagggtcctggcagaaaacaaacagcatattggaattgagtaatttcataatgaacaagactgtttatgaagttgtgggcagtgtaggaaacctcagggttaggcagtgccccaggtctgaagggcagagaattactggaatccagagagaaaattgtgcggagggggaagtccgatagaggccttgagtacagggatgcagccagcctgcagagacctcatagggagaaagatggaagcagataaatattccagccttactcttctcccctctgatcttctgcctagggtgtcccaggggctaaccagaacctaatcagaagccacagggcagtccatgtatccatcccaggtcaacttagggcacagagcagaagagagaagagtgagagcggatccctaggaataaaaggaaactatccctgaatcttccggttttattttttcagacctttttttggttcctgagtgctgcaaacattgcctgtttcatcttacactgattcttttcctttgcgaactttagcttgtaattctataatgacatcattgtatccctatccctctccctaaaagtatctagtctttgtcctcaattaatgttttcaccccattgacctaacaccttcactccactcttgagttaattttgcttcatagcagcagcagatgagaatctctgggattccagaccccatttaacaaaacatttygggaggatgaaaacatggccaaatggtaccaatggtgttgaatcatcttgaagttatatgtaaaactgagagaatttcaacttttaaattatcttttaagaacctaactttgatattaaataaaactgtcactgagaaggggaaatttttcaataaacattgttgtggcttactgttaaccttttaattaattaattaattatttttctttttgagacagggtcccactctgtcacccagattggagtgcagtggcatgatcttggctcactgcagcctccacctcctggactcaccctcctgcctcagcctcccaagtagctgggaccacaggcgtgtgtcaccatgcctggctaatttttgtatgtttggtagaaagggggtttcatcatgttgctcaggctggtctcaaactcctgagctcaggagatccacctgccttggcggcccaaartgctggcattataggcatgagccaccacccctgcctgtgaacttttttaaaacagagttgttaaatgatagaagtttccctctggagattgtaagcagtttgtcaccaaagtacctaatcagactcaataacctgtcagcaatgctgttgggtgattcctgatgtagcaggtgggggagagcattgaagaagatggccttcctaaaaacctagaagctggccgggcgcagtggctcacgcctgtaatyccagcactttgggaggccaaggcgggcagatcttgaggtcaggagatcgagaccatcctggctaacacggtgaaaccctgtctctactaaaaatacaaaaaattggccagrcgtggtggcaggcacctgtagtcccagctactcgggaggctgaggcaggagaatggmgtgaaccagggaggcggagcttgcagtgagacgagatcacgccactgcactccagcctgggcgacagagcgagactctgtctcaaaaaaaaaaaaaaaaamaaaaaaacaaacaaaaaaaacacctagatgctagaaacatgctcatgcagaattttttgtccctcacacagatgtagaatgtagagtaagragacatgttgtgagggytgtggaaagaaaatccaaatcccacccatcaggagatgaggcactgggagccctasatgccatctgtcytttgaacttccacaaaataatgttgcatttcttctggtgcatwcagaagtccagtatgctgctcttctgaggatccggcaagatggcagaagtagagcagaagaagaagcggaccttccgcaagttcacctaccgcggcgtggacctggaccagctgctggacatgtcctacgagcagctggagcagcygatgcagctgtacagtgcgcgccagcggcggcggctgaaccsgggcctgcggcggaagcagcactccctgctgaagcgcctgcgcaaggccaagaaggaggcgccgcccatggagaagcmggaagtggtgaagacgcacctgcgggacatgatcatcctacccgagatggtgggcagcatggtgggcgtctacaacggcaagaccttcaaccaggtggagatcaagcccgagatgatcggccactacctgggcgagttctccatcacctacaagcccgtaaagcacggccggcccggcatcggggccacccactcctcccgcttcatccctctcaagtaatggctcagctaataaaggcgcacatgactccaaaaaaaaaaaaaaaaagaagtccagtatgctaacagaaagtcgtaataagctgcacacagtggtttgctttgtgggataagccgaacatttttcacttctgattgttgactgtgtgttggttcctctctgttttcccctccactctccaccctttgccttggcttgtgctctgggaggctgacgcctacaactgtgtcatctgactctccttgtcctctggcttccaattgggtttggctratggctggtgctgactggggattagaaggcaggaagccaggtcagcctatttatcccactgtgactccttgttgggacatggttttgcagtggctgcattcctctttgccacgggactttcaagtgttcccttctccacagctgtggctctcacaggggtccagtaacaccatcaccacttgcttctacgcgtctatgagtggcattggcttcctgctgtgcttgtccctggttcttcaccactctttgccgagttcccttaaggctgttgcacctctgttaatagtccatttattaaactcacttcaattaaatcctttgtgcaaaccagctatttcttgcaagaccagatacaagtggggaaatattctgacctgatactactgttctcctagccttttgttcatgccttctgaagacatatgatgaatggaggaacggacgcagtgtgagaaaatcacaggcaggagggatgaactcacatgctttcccttcccactttctcttttcctcccttcttctggttaagagatttggaccagtggctgggcacagtggctcacgcctgtaatccgagcactttgggaggcagaggtgggtggatcacgaggtcaggagctcgagactagcctggctaacatagtgaagccccatctctcctaaaaatacaaaagattagccaggtgggtgcctgtaattccagctacttgggaggctgaggcaggagaaccgcttgaacccaggaggcggaggttgcagtgagccaagatcgtgccattgcactccagcctggacaataagagtgaaactccgcctaaaaaaaaaaaaaagatttggaccagaaagctgccccagatgaccaagacaaaggaactccctgccggcaccatgactcatgaggcaagccaagccccagagtggtcagaggcttcttgatgaaataaagcaaggattactgctttgaagagaacatagccaaacccatgttaaatggggggaataaactttcttcatgtaaggctggactgtgttgtctaaaacaaacacctgcattgctgagggatttttcctctgagggaactggagagattagcttctgctctcactgtggggatactggctgtggaagcagccctctaccagttctccaattcaagaggctctgggtccacctgccccacgtgggcagggctggggcagtggaaggtttcatttgtattggtccatagcctcttcctttgagaagaggcaggaagaaactctcttactaagggaacagagtaagacactggactgacaagcagacacaaggataagaggaaggtwtctgggagaatggggagtgagcagagcatctttgagaggcattccagcaaaatgtctaattcagtacagcctcttttgtgctacgtggggagcatgggagaagaagagcatgggaagaagagtaggttagacctaggcatgacttctgttccctccacactatactgctttgtaagatctgcctgatcctccatttaaattttaaatacttctgtgaactccaagtatctgagacaggtcccagtcaatttggaaagtttattttgccaaggttaaggacatgtgcccatgtcatagcctcacgaggtcctgacgacatgtgcccaaggtggttggggcacagcttggttttacacattttagggagacatgagacattaattaatatatgtaagatrtacattggttyggtctggaaaggcaggacaactaaaaatggggaggggcttccagattatagaaatttgcattttttaaagtttctgattagccttttcaaaggaggcaatcagatatgcatttatctcagtgagcagagggatgactggatagaatagagaggcaggtttgccctaagcagttcccagcttgacttttccctttagctgagtgatttgggggccccaagagttactttgctttcacacttccgtcaccatccagtgcaagtttggtttaaggaaaactggtaaggcaggaagcactcaggaaagacattggtaagtcttcctaatcatctccctccccctcctttttttttttcttttgagacaggctctcccactgtcacctaggctgaaatgcagtggcatgatcacagctcactccagcctcaaactcctgggctcaagcaatcctcccacctcagtctctagagtaactgggagtacaggtgtgtgccagcacacccagctaatttttaaaattttttatagaaacagagtttccctatattgcccaggctgatcttgaactcctggactcaagggatcctcctgcttcagcctcccaaagtgctgggattacaggtgtgagtcaccacacctattcctaatcatcttgcatcttcctaatcatgtggcaagataaaattaaaaggaccccatcctggtcgtttctccccagcctaggcattagtaggtggagtgtgctctaggcagagtctggtctttatccaggcaaaagagaattaggattaaatccttgattccccaattctcatctactacctttatcccatatgttagcagaaaatasccagatggggaagaaaaggatggtgcttgatcacatctaggttctatttattttagagccctcgctcatgcaaatgtataaaccctaggctaaaatataagctccttcaaggatcttcagcttttcaaagacagatttggtgtgtcttacttgctgctgttcttccagcctattgtctaaaaatttacctggaaattgttttgagcagatatagtacaacacacagacacaaaatgccatgaaggaaggaggttttttatgttcacagtcccctagaaacaggaggcaaggcatggcaggcagggccacatagggaagcaccgaagccagatgagcaggcagaaagggcagaagcctttattgtggcttttgaaaagaggaaaggggaaagcaaagtaagcaagcagaacaaccttatgattggacagtttaaataayttcagcagggcctgtagtgatctgataaaagcaggtaggttggggcgtggaaccctaattggttggtctgcatatcaaagatgtgctggcaggcaaattcttatctctaggaattagttaactctgggaggagtggttccccaggtccacaaggctccacatgccagagatctaagaatacagacaaatagttaacatagcctagaacagttgtcaacagagaagaggccgttaaaaacacattcaagcactgactggctgacagactgatgagaagtttagagagcctaagacagagaattagcaaggaaagaaatgccctggcacatttttcttataaccaaattttacgacattggactgtttggatggcacattttagtatgtaagaactgggttatacgattattatagagtagccagaaacattgttttacctttggagaaytttttttttttttttgagacggagtctygctctgttgcgcaggctggagtgcagtggcgcaatcttggctcactgcaacctccgcctcccgggttcaagtgattctcctgccttagcctcctgagtagctgggactacaggcgcatgccaccacatycggctaatttttttgtatttttagtagagacagggttttaccgtattagccaggatggtcttaatctcctgacctcgtgatccgcccacttcagcctcccaaagtgctgggattacaggcctgagccaccacgcctggccctggagaacttttattggatgctttcttgtttggctttgtaataacaggaataaatgttctaattataatctctgtcacatggattttttaaaggacgttcactggcagtgtctcagaattttggctcatagatctgagggccttattgaagtatgaaggaatcatgcaagtccaaaaagaactctgaatgtagaccagagargccctcttaataggtcaagtgtttggctagataaattttgcctacaaactttatcttacacttcagtggatcttaggaaggcttgactacatttctgttagcagataaagctttttttaaaagagaaatcaaatggtrtaagtcagcattttacctttgttggaaaataatttagcttgacttctgtcatttgcatgttgctaaagccaatgctgaatccttgagattctagtcaacatgaagcagtttggaataagggaatagatattgttctaggccttcaatctgctactagtttactttgtcatcaaacaattcacaggggtcaaaaactgggctgcagtttgctaatccgtgacaggacactttgggactagattagtgttcttaacccggtatatgtggacagaacatggatgaggggaaattkcatctttattttcagtaactcctaactgaaatttagcartctctttattatgaatgcagacaamaaaccccactagtattcataggacctgtgaccttgtcaccaatataaatcactgataatttcatgttgcatcagaatttttgcagatatctcaatttatcaattatacccagcacttcttcaaagtaaccctagttactttgtagggrgggaggagggggaagttcttacttgatttactgtcataggctggcacacatgcaaagctgaatacctctcatggaaaaacacccatgggttctttgggggctcccctgctgagcccctctagctgtaattcccctgtcactgctgtacagcctattcctcagctactgttacccgctcagctctgggtttttcattcagactcttcctattgcaacttcatcatctgcttcctcttccctaaggcaggagcaaaaacacttgttccacagaaatgacctatttactctgtcctgacaaactctgggagagacaggctgagctgaacgcagctgcagaccttcatcctctgaaacmaaagcagatcaccagttcatctttcttgccctttaggtttcctgagcagcagttagactcagtcctttgtggccccaaactcaaggggatacagactaagttcttaaagcccctctaattagtgaagggaaggggaagttaccctctgtccccctctcctgctgggagggagagtgcaaagtcacagctctgcccaaagaaaacctcacaaagtagtccatctctgcttttgccatctttctatatcttcctttgagtttgagagccacatcatatgttctaggccatccacttggaaattcccacttggtattgtggcatgcatggtggccttgaccatttattatgttacagtgcagtattagttttccattgctgctgcaacagatgaccacatggcagcgtagctaacacaaatgtrttatcttacagttgtggagcacgtaagtctgacatgggtctcactgggccaaaatcaagggttcacagggctgctgagctcctctctgaagcttctaggggagaatccatttatctgcctttccagcttctacaggccactgacattccttagctcatggccccctcctccacttcaaagcaaacaatacctgcatctctctgagcctttcttccatcatcacatctctttctctgaccctcttctcctgccctcttccacttttatccactcttaaatgttccacctagataattcaaaataatctctactttaaagtcagctgattatcaaccttaataattctatctgtaactttaattctcctctgctgtgtaagctaacacattcacaagtt

SEQ ID NO: 9897 - DNA, 15678 bp, Homo sapiens
taacccaaccacacacatagacaccactacacaccaccacaaccacatatgcacacagcctcccacaccaccccagccatctccatcatcacacacattcacaaccacacatgcacacagcctcccacaccaccccagccayctccrycatcacacacrttcacaaccacacatgcacacagcctcccacaccaccccagccayctccrycatcacacacrttcacaaccacacatgcacacagcctcccacaccaccccagccacctccrccatcacacacrytcacaaccacacatgcacacagcctcccacaccaccccagccatctctgccatcacacackttcacaaccacacatgcacacagcctcccacaccaccccagccatctccaccatcacacacactcacaacaacgcacatcaaagcctacacacacgtggcccacataccacccttaacacacagctctccaggcttacacacacagaaacagttctcgcacataaccttatgtgcacccagtgtttacaaatagtgactgagagtctgtacatkccaggccctggtaatgtggcaggaacgtgaccagggagctccctgctctcctggagataatttcagagacggctgtgaagagtgtctgctgaggaagtggagcaaggaacatttggggtgggggtgggggaaccagggaacacctctgtaagaaggtgagacctgaataaggaggaggaagcttccaagtaaagagtcaggagaaggcagtccaggcagagagaacagcaaaggcaaaaaccagaaggctgacctgaatgtggcttgttcaagaaccagaaagaaggccactacagcgcccaaggggatgagagatgggggagaggcaggactaggtcgcctggtgccttggggctcaacgtcaagagagtggatgccagtctaaagttaatgataagtcactgtaaggttttaagagggaagtggcatgatctattaggttggtgcaaaagtaactgcggtttttaccattactttcaatggcaaaaaccacaattacttttgcaccagtctaatagatcgttaaaacactacttcagctagaagcaaccacgggaaaaaatgttattgcagtcctcagagtggtgaaggcatttctaatgacaacaaaacccaagggccataaaagataatattaatacactggactacataaaacatgtttaattctgtatggcaaaacccccgtctataaagtcaaatcacaggtgtcaagaagcagcagaggcagagggaatcctttctatttgtatcacagacagaggagggcttatttctttagtatgtaaagagctcctgagaaataaataataaaagtcaaccatccaatagaaaaatggcaaaggcaaagaactgttcacaggataacaaacaaaagcggcccttaaatatgtgaaaagatgctcaatctcactcataccaagagaaatgcaaaataaagtatgatgagatatcattgacaaagatcataaagcttgataacgctctctattggtacgtatatggggatacaggcactcccttgtcccttggagtgcaaactgaaacatctgtgaagwcgattgggcartatgtatcaaaattttaaatacacatacaactttaaagcaaacatttcacatgtaggaatatgtcctgtagacacaattttcaaatgtgttcaataatgattatccaaggatagtcacgcaatggtatttgtaatagaatgaaataaaaaagtggaaacagccttttcatcagaataggactgattaaatagagtacatatactattcagctgtttttaaaatgagagagcaaggcagctccatatccactgatggggggaatgtctcatattttgttaaatgaagaaagcaaagtgcaaaagagtgcagatagcatagcacacttccataggttaaatgtaaaaagaatatatagttgaatatgaacaggtgatttgggagtaagaacaagaaactagggaccctggtgttcaggtaggcagctccggttacagtctggtgttcagggagaagtcacgtccggtgttggaaatgtgtgaatcatcagtgagtggatggtatctagagccccaggactgggtgagctcacctgggaaggaagagactgggccctgggacatgcccaccttagaggccaggatgtgaggcctgtggtgtcaaggaagcacggggaagaaagtgtttctagaaggaaggagtgccccattgtcccaggtgcttctgaaggtcaagggtcatggggacagagctgtgattgctggatttagcattatggagatccacggagactctgataagccgtttttagtgacatggtagggacaggaacattgttcaaatgtgtcaaaaaatgactaggaggggaggtagcggggagcaagtcttgctctgacagggagcagagcagcaggcggcagagtccagggccccacaccctcatgctcacttccccgctgcccatgcacagagcatagcacatgcacctgagccacctggcactcctcaatctcagcaaagattttcaagggccacgaccccagtgagtacaagggagcctctgccctgcggcttttctgtatctggaaacaacactgctgaggcctccagagctgggtctgctgcttattatctgtgtgaccctgagcaagtcacctcacccctgtgtgcctcagctttctcattcataaaagtaggagggattggaccttcctcatctggatgctgccatgatgaaataaagcatgtgggacagtgtcgggtgcaaagatgccgctgggctcccaactcagtgctcattctctaccaaaatgaataggaggagggtgaccataattgatgctcctaactttggggcatttttgaaagtaaaagggggcattgttaatgatgccagcactgcaaacataaaccagtacagtcctgggcaaacaccatgtggagccaccatagtgccagcaatatcatctctgtggagacaggactcgggccccaccctaagatccagggactcccaagggaggctggaaaccctggggttttccaaaagaggctggggcrctgcaggcttttattagttcctagtcaggacacactagtaaataagacaatgtgtccttatccccagggcacagcccagccccaccccagccgcagacccacctgctttggcagaggctatttactgcaatggtatttgtaatagaatgaaataaaaaactagaaacagccttaatttttatcagagtaggactgataaaatatattacagtacatatactattcagctgtttttaaaatgagagagcaaggcagctctatatcgactgatgggagaaatgtcgtattttgctaagtgaaaaaaagcaacgtgcagaagagtgtagatagcatacttccacaggttaagactatayagttgaatatgaacagacgattcaggaaggaaaacaagaaactagggaccctggtgttcaggtaggcagctccggttgcagtctgcccctctgagtcactccaggcggtgacctcccccaacccgccctcattcctgaacttctttcctggcacaggactcactgtgccccttcccgctgtgggtacaaggtctgccccccaccccagctctccaaagcccaccggcctccctggaggccgaggtcgacggcccgtcgcaccgggagggggggctcccaggggtgccccacgcacggtcaaggtcccgcgccaagcggggaccgggctgggccggaagcgggcacggtactcgcggcaaactagcgtgggcgagtcctgattgcagtcggacctgccgccgcggcacttaacagtttgcagagtgcttcccgcccctgatctcattggagccttcggacagcccagcccatggccaccgatgcccccatttcacgcctgaggaagcggaggctcagacgggccaccagcccctccggaggctggcccgggagcgcctggcagcgtcgggtctaggagccggctccctcctgctccctcctccgcgccgcccggggtgtgcccgccgtctgtgtgcaccactgctgagcccagctccggcgccctcgcctctgctgtgggccccggggacgcggggtcaggccaccgcgttggccaggccgctgcaggtaagtgctggacggggcggggcgaggctgggcgggaccctcaggggcgccaagcgctcctggcgaccccctgcggcagggctggggcttgagcctgccagtgcgctgggatggggcgcgaagcgggggtgcggggagcccgccaccccgtacctctcaatcctccctctcgcctctcaattctgggcccattaggggtcccggctgcgggaaggttccgagacaccccctccccaagtccgcaagctcccaagctgcctaggatggagggaaactgggaaggaaagggagctttatccttcagggacattgtggggcgggaggtagggctgggcacagtacagtctgggggtcagggaaaaaacggttgcgctgggagctggctttggagggcagctgggggaaccagaaccggctccaccagtccccagcctagacttgggaaggaaattctttgccagtgaagctcctccctggggtgtgtcaggagggactgggcagacagcacccaagggtagaagatgggggcccaggagggagctgcaccctggtgggcagccatgggagtgtgtcaggtggaagcagccgtcagggtccctctctgctctctgtccggacagacagggctccaaccttcacttcagttcttgtgaactcccaccaggtgagtagcagcctgggagggaagagtctcaggattctaccagaaagtaggaattatttccctttagagattagtaaatagggtcaatgagattagggaattcttggaagtcgcccagctactaagtggccaagctgaggtttgaatccaggtggaactccgtgttccatgctatcccactcccttcccccaccacsagggcttagaaggagcagagtaggggagaagaggagggtttccaagaatgaggtcttcccaatcaccccatcctgcccagactgtgattcccagaggaaacgcagccaggagagccaggtgctgagaaggaactgtgctctctccctctctccagtgtagggaagtctttcccccaatccccctgaccaggctgccccctgaccaggatcctgcccaccctcctgtcccctccctccaagctgccttgctgaaaactcagcattcatttgtttacccattcagcgctgagtgcctactatgtgccaagcactgggcactaaatataaagcagtgagcaagaccaagttgacattctagagggggagccagataattaataagaccaaaaaaaaaggacaaattctttaatttcagatagtgactaagtgctataaagaaaacagagggggctggaaaaattaggtgggcatagtggtgtgcacctgtggtcccagctacgtgggaggctgaggtaggaggctcccttgagcctgggaagcagaggttgcagtgagccaaggtcgcaccactgcactccagcctgggcgacacagcaaggccttgkctcaaaaaaaaaaaagaaaggggacaggaacagagtgacagaagcaggggctctttcagacccagggtaatctggagaggcctctaaagagatgaggtttgagcagaggcctctgtgatgagaaggatccacccatgtgaggttctggaggaagagcattccaggcagaaggaatcagtaaaaagcccccaaggcccttattccagggtggcagggtgaaaatgtcgaatctggggttttgctaagcctagcgagaagctagtagagtcttaaacaagggagtggcatgaactgatttaatggactctaggggcacagggggaaggtgaaaagccagtaaagaggccataatacaggccagaataatagtggtttggggcagggtggtggcctcgcaggcatcacgcatgctcagaggtgcaagtcagctccagggggactcacatgcacataggcccacacacacacgtggacaggcaggcgggtgctctcacacccacagcagcacagaaacaaggcacactcaggcagacccacccgtccacaccctctgagtcactccaggactgggaggaagatgtgtgagttaaggcctgaacaaagcacatctttccaccacaaggccctggcaactagtgtggctgggggtggctgggcttccccaggcccagcacagggagcagggagttttctctagatattccctggatctagtgtcctcccaggagtcagatcataaggctccatgcaccccccacctgaactsgtctcccctcttcaccacccagcagctgtgagaccttgagctggttatttctcctctctgagcctcagtttccctgctgtagaatgggactcataactgcaacttcacagtatagtagtgaggcatccacaaagtaaacgtttcaagaatctggtctagggcaggagtccagcggagaagggaagaggaggtggtggagagcacaggctctggtacccaacagcctggccttgaatccacctcttgttttaagtgagtgacttgacctctctaaatttcacagtaatgagtagccagcatttatggggcacttactatgtactacttgctttgcaatcgttcaatgatcagtttcatctgtaagtgaggagcactgtaataactaccttatggggtcattctaagagattaaatgaggttctgctcataaagtgtttaacttcatgcctgactctgagtaaacactcaataaatggtgattgttattatcagccaaagcatatttgcttccttccagcatactagctctgttgcctttggttaagttatataaccttgctgtgcctcagtttcctatctgcagcttgggaggaataacagttctgaactcagagggtcgttgtgagtattgaacaagtcagaactcagaacactgcctggtacatagtaaatgctcaataargtcacctattcattcatacgatggtttttcctctaattctctcaggtaggcacggcccccaccaggcgccatggactggaagacactccaggccctactgagcrrtgtgaacaagtactccacagcgttcgggcgcatctggctgtccgtggtgttcgtcttcygggtgcyggtatacgtggtggctgcagagcscgtgtggggggatgagcagaaggactttgactgcaacaccaagcagcccggctgcaccaacrtctgctacgacaactacttccccatctccaacatccgcctctgggccctgcagctcatcttcgtcacawgcccctcgctgctggtcatcctgcacgtggcctaccgtgagragcgggagcgccggcaccgccagaaacacggggaccagtgcgccaagctgtacgacaaygcaggcaagaagcacggaggcctgtggtggacctacctgttcagcctcatcytcaagctcatcrttgagttcctcttcctctacctgctgcacactctctggcatggcttcaatatgccrcgcctggtgcagtgtgccaacgtggccccctgccccaacatcgtggactgctacattgccygacctaccragaagaaaatcttcacctayttcatggtgggygcctccgccgtctgcatcrtactcaccatctgtgagctctgctacctcatctgccacagggtcctgcgaggcctgcacaaggacaagcctcgagggggttgcagcccctcgtcctccgccagccgagcttccacctgccgctgccaccacaagctggtggaggctggggaggtggatccagacccaggcaataacaagctgcaggcttcagcacccaayctgacccccatctgaccacagggcaggggtggggcaacatgcgggctgccaatgggamatgcagggcrgtgtggcaggtggagaggtcctacaggggctgagtgaccccactctgagttcactaagttatgcaactttcgttttggcagatattttttgacactgggaactgggctgtctagccgggtataggtaacccacaggcccagtgccagccctcaaaggacatagactttgaaacaagcgaattaactatctacgctgcctgcaaggggccacttagggcactgctagcagggcttcaaccaggaagggatcaacccaggaagggatgatcaggagaggcttccctgaggacataatgtgtaagagaggtgagaagtsctcccaagcagacacaacagcagcacagaggtctggaggccacacaaaaagtgatgctcgccctgggctagcctcagcagacctaaggcatctctactccctccagaggagccgcccagattcytgcagtggagaggaggtcttccagcagcagcaggtctggagggctgagaatgaacctgactagagsttctggagatacccagaggtcccccaggtcatcacttggctcagtggaagccctctttccccaaatcctactccctcagcctcaggcagtggtgctcccatcttcctccccacaactgtgctcaggctggtgccagcctttcagaccctgctcccagggacttgggtggatgcgctgatagaacatcctcaagacagtttccttgaaatcaataaatactgtgttttatacaggttggctctgtctctggttctcccacactcccacccactgacagaaccctgaaggtagggaaaggtaagccctcagaaagggaaagagttccatggctcggggtggagctagggtsggggctgtggctgtgsctgcagctggggcttgagctggagctcggttaggctggggctgatgttgacagccgggagctgggtttgtaccagaggaggaggctggggtggaacctactgatacatatgttgggattctagctgtggccacaagagtgcgctgtgctccctctgcaacggtgcttccagccttcgtaattrgacttcaccctgagtacacacacaatcactgccactctcactatagacaaaccacactccctcctctgtcacccagtcactgccatctcaacacacatccccaccctgtgtacacacaatctctgttattcatactctcactccttatgcgcactctcaacagggcatgtagtctgcactcragcatgccatcccagcctcaccctgcattttattcggctcatcccattttccctgaacattttcgctgaactagggccctggcaggatgctgggactgtgcaaggaggtaggacctatgcccacggagctaagagacaggaacacaggctcatctcccgcactaaccaacccctgggatggctcacagccctgctcccagtgctgtgtcatgacctgaaatttaggggacaccaacayccaaggccagacccaaatggaaagcaaaagaggatgcaaggctatattaacccagtggaacacttagtgactatcacagccgaggccgggagtcagaaattcaggagccagtgagccaagcgccacagccagcaaagacaggtggggtcatcacggaaacagaacagccagtggttcacctgtgctctcacaagtagccatttgaaggtggataagccagccaagtttaaaggacccagggccggctgacactgtccctacacccccatgactgattcatagcttgaccattcctgagcacagcttcmccgcactacatcttgggcaggcctttagaacctcagtcttgccatcggtacaatgggaattggatcaatcagggtcctagcagaaaacagatggcacattcaaaccaagtaactttaaagggagtttcctagagagactgttttcaaaggtatggctactgcagcaccctggggctagtaccagggtaacaatggacaggatgcatccaatgccagcaaccaagtaaatcccccaacttcactctcccatctgctcgcctgccagtggctcccactgacctaacccaaccggaagtcagagggcaagtcagcctcccagtgtacagggcagggtggagagtagacctgagggacacagggaatayggtcagcatgacacccagttgttcctacacagaggatttttgtagaggtagaaggagacactgcaggtaaaacattagcacagcactaatgtatctgataaattcccaggtatgactgtgctcaggagagtctctgcctgatgcactggaggtcagcctctgcttgggctggagggttgcaaaggtctcagggaggggtggtcgccacctacttgccracatgcattccarcatcttcctgggtggttctggctgcctggccaagggtggcttggaggtcagagtaaccagagaacatcactggctattcctgcagagaattaacgctcagcaaggactgagcttctagtcctggccccttttctccaggctgtgggccaggaccatggaggaggggacattccagccctgcacagcctgcctttggcctggagctgttctgagcagtgcagttcactgatctcatcyagtatgtattgggtgactactattcaccaccaagagccagggcacattaagtcaccacaaggtggccctcacgtccccttgacgttctcagggtacgttcctctacctccgccttccccacccatgaggattcactgcaaactccctccaatcatgcatatgagattaggatttcatatagtcttcaaatccacatctactgtgtaaggtcacagccaccctgcagcccaagataaacaggacattcctttgtattcattcaccctggtccaagtccccatatggactgaatgtttgtgtcttcccaaaattcatatgctgaagctctaccccccagtgtgatggtattaggaggtggggccttcagggatcattaagtcatgggatggagccctcctgaatgggattagtgcccttataagaagagataagaacgagatgatctctctctctctcctccatgtgaggatacaaagagaaaatggccctcaccaagaacttgaccatgctggcacctggatctcggacttctgtgctccccagctgtgagaaatgaatgtttgttgtttaaactactcagtcttacagcagcccaaactgacaaatctctccccgggatgactgcttccatcttctcgcttcctgcccctgactctgggaagtggactctgaggaagggctaagtgggtacattggggagtgaytcctataagtgtaaaaggggaggaagcaggattgagcaacaagatgtgtcccagggagctcagaagcagagactgtccatgcgggcagctctgcaccggacagcaatggcgaggccttgaccaccccctggttcagtcatggcctgaggccaccccaagaagaacatggccacttagacagcagaagcacacctggaagtgctgataggtgaaggcagtcagctggccagtctccacaccgctacacagcaagtcctacattgaagggggatgtctgtctgtcacccacccctgtagtctattcccagcacagcagctggggtgatcctgtcaaaacctaagtcaggccatgtcactcctctgtcccaaacctccaaagacatcttacacaggccttcaagggcccgcaagatctgccccatccgcatctcgcctgttgcctttctaaactcacttcgctttsctcacctgctgcaaccacactgatctcctgctgtcccccaagccaggaaacaccaggcacactccttccccagggcctttgcatcctaggttccctctgtctgaaatgctgtgcccccagatagccacggggcttcctccctgccttcagggcttgcatcaaatgtcagctgcttagtgaggcgttctctcctctcctactagaaattgagkccggccacagtgactcacgcttataatcccagcactttgggaggccraggcgggtggatcatgaggtcaagagatcgagaccatcctggccaacacagtgaaaccccgtctctactaaaaatacaaaaattagctgggcgtggtggcatgcgcctgtagtcccagctacttgagaggctgaggcaggagaatcgcttgaacctgggaggtggaggttgcagtgagttaagatcgcaccactgcactccagcctgggcaacagagcaagactccatctcaaaaaaaaaaaaaaacaaaagaaactgaaacttgccacccctgcactctcactcctccctacttcatttcccccagagcattcatcaccgtctaacatgttctacattttgctagaatgtaaaacctccgaggacagggatttttttgttgttgttccctggttatctccactgtctaggatggcatcacagcacataggaggtgcttagtaactattgcttttaatagcaaaaaccacaattacttttgcaccaaactaaatacttgttaaattaacaaatttatatacagatctggtgccctgctaggtggtggagatataaagacccagctgcctgccctcaaagggctcacagtctaatggaggaggggaataaagataagtagaccatgcaccaaggaatggggaaaggggagtggtttactagagacagagtttcagttttgcaagatggcaaagttctggagatctgttgcaaaacaacgtgaatatactcaacactactgaactgtacacttaaaatccttaagatgatacattttatggtagctgctttttaacataattaaaaatttttaaataacaaaaacaaagcaccatgggtagtagctgagctgctgaragcacaaaggtacacctagcacagagggagccagcaaggggacttctgggagaaggcaacaactgagaaaagtcctgattcacagcgttcagcacgtgagggtgctccatgcagagggaacagcagggacaaaggcaagagcgcacagagaaccccatcagtgagacctggttgggtcacagcgagaagggtgaggggtaaggctggagaagtggccagggactggaggttggggagcctagggcttacccagaaggtgayagggagccatagatgacttttcagcagggcgatgttggtcagatttctagggaagtgtggaggctgagttggaagggtggggctagaggtcaagagaccagctgggaggccactgaggtggcagcagcctgaacaggaccagggcaaagggaatgcagggaagcatgtggttccagggacatttccaggtggaatgaccaggttgtggtaactgttgtcttagttgatcccagcttcttcatcctctggggaggaggccgagttattcaaacctccaaagcccttgaggaaggagtcagagcagggtgagggcagccttgacgtcactccccagccctccactggctcttccctctttcccagtatactgaatcagaaaggctttgggagagctgggcccagccccaagagaggaaaactcggtagtgagcagaggctgcagtgggggcgtggtgagaaccagcctccaggggcctcggttctcatgccctcaagggtcagaattaagtggggcagttgttagcttcagaaatccaggagactcagttcagcctggccctgagggagaggcctagaggggaagccagcccagccggatccctcagggcagctagccctgaagttctcaggtctgcgtgtccccaaagatgtcctcctgctggtcctgaagacagaaccctcagggacccggccctggrgcccagggaatccaaggactaaatcttgctgtggaggaacagggacttctgtgccaccagccccaggcctcaacagccccctgccaccttccctttcctcagctgcgccagcccctaccaccctctaagaacaacccacagaccctttttgttacagtatcacaatgtttttagccaccactcacttgaaaaactttatgtaccactattacactatgtgctttgatcacactgtatgccatcaaccccacaaagtagatactatcactattctcattctgtagaggaagaaattgaggcacagggatttgagtaacttgcctaagggtacrggagtcaacagcaaagtctcagctcctgggctcagccaccaacaacrtctcagcactccgagggcagtggccacagtctcagaaccccacagctccaggccctcgagccacactcatgccgcccctctacctagaatgctcttcccttccacttggctaatggagggggaaaagcatttcctctcctccaggaaatgttcctaaccaagtcccctgggaatcacccagtacctctcaggagaactttccacatttattatcttaccgttatccaagggctgatatgctcaatccctgcaccagccagtgagggaggaggccagagaccaagtttggctggttcctcagggtatccccaggtccccaagcagcgtctgcagcacagcagatgctcactgatgctcatccacctgtgatgcctgaatgcatgaaggcaggctccgcatagccctttcattcctatggatgtcccccacaccacccagccaccatttagaggcataagaacggggtccaagctaaaggtcaggtggttcccccacccccagtctcaaggagtccatgggaattgcttaatggcctctgattgtgtagcctgcccagacatggggatgtttgagaattctggaagaacgtgggctgggcgtggatagagacgcctgctccaccatgtatgctggaggtgtggattacaacccctgtcccccattggagcttcccgcgccgtaattagccttgatcgcctcatcctggcacactagggccagccacctagcaaatgagtggtccccacactccatccccatccgcccacccctcacagccccgcaggccagttgcccagatccacagcccttactgcaaccccttcaaatccagccaccctgagagatcctggcctgggagaactctccttccctggccaaagaaacgacaggagagtttactgtctggaatacctggtggagagagaacagaggagaggaagggtaggtcagcccctcttgcccctccccaccgcaaatcacacaggcccacctccccggagtgggtttagggagtctgcacctcccagtccccgcccccgccctctctccagcgcccgccgccctccccgtcgcgtttcctgcccccaccccgcccctctgcgctatttaaggcgcccccgccgctcgtgcggtccagcagggctcccgcgggcgtcactccggccatcgtccccacctccacctgggccgcccggcaggcaggcggtgagwcgggggctaggaagggaccaggggcgccacctgctcgcgggaggccgggaggagtcttgggtcctccgatgccgggacgggggttgctgcggaacgcccgccgcgacagagccgcgctcacccaggtggccttggccaggctcccaccctctttccatggaatccttgtaacaa

SEQ ID NO: 9898 - DNA, 17263 bp, Homo sapiens
attgccctaacttgtcctgtagacaagcaaccacctctctctttattccaagcctgtaaatcagagcatatctgggagggcagctggactctgataagggatgtgatttattttagttacaaataacttggttggcatctctgatatctgtggccaaacctggccaaacctggggagagacaggccagggcagggcagccaagagtccacagcctgccggggatggagagagaagccacccatgcaagagttcacttatgctggccacaggggacaggtagtgtgggagagccacgtatagcttccaaagtcctccagacacrtaatgaattgaaggagcataagcattggagtctaacatgggaggatgttagataatgcggaaatcccaactccaccactggatcctggggcaagtcatgccatctccacaagtctcgatctctttatctagaaaatggagttaaagagagtgctaggtgtattgggctgttgggaggcttagataagatatcctgtgctacccccggcttcacatctagtatagagtcagtgctcactgagcagtatttcctagagactcaggacttaggaccctgctttacacaggaccatatggtaccacagcagagcatcaggtttttaaaactttggtgctcctgaccatctagcgatgttccaggaggtgctagaagccccaggacaatacagagaatcattgtcgaacaccaacattgctatatggtcaaaaatatatatcattattattgtattaaactcaaattgggtatattgtagagtaatatataaaactgtaatgagtctgtaaggtagtatttaaggtgtgaaacaaatgttgttaccccagtagaccacaccctccccacccactgcagggggtggggttgaggctcccacagtcctcatgatagagatacatgagagaaatgccctgccctaatatcttaacaagtcgcagagaggggaagtcactagtccctctctttcagattttctaaatgatccttagagttcccatctctgagtctatgacaatgagtcaggaaatagttcctgaatgaatggaagggaatctgtcatgaactaagaatttcatgctgtccagcatcccctcctttgtggggaaatttgggaaaaaacaaatggaacattttcctactggctgccagcctcccacacaaggacttgtcaccatgcctttgcagcaagtagatgtccaatgtgtaaatggggaatacctgaattagttgatgctagccccaacagagatgaagctttgcctctttgctccttcacatgggaaaacacagctaaagttctaactcccagcarggggcggagtctctaatgctcaattagagagaagggagcagaaaggtgtgtgccagccctaagacccagggctctcagacgctctcctctttctcaacaccaggcatgcaattcccaagcaaagatcccctcayccagtctatcattgttggacatttgggttggttccaagtctttgctattgtgaataatgccacaataaacatacatgtgcatgtgtctttatagcagcatgatttgtagtcctttgggtatatacccagtaatgggatggctgggtcaaatggtatttctagttctagatccctgaggaatcgccacactgacttccacaatggttgaaccctaaaacttaaagtataataataattaaaaaaaaagatcccctcacccacagagacaaggagatgcatgtgcatgaaggactcatcccccctggcctccaccaagggccactttcttcctcctgcacaagaccccgaattcaagatatctgttccccaactcagagtttctgggtccaatgtcacttaactacatttggccatttctccactttttgctttcccatacaaagactggactcctcctcaaagccttgctcctttccaaagtttcctcrtggttgtccagagtccaccactcyccagaatggggcaacaagagctcctttccttcccctttcctccttctccccttcgccacycacaccatgcccagccccaagccctctgacaaagtcatgtctcctttccaagtcccagttcctgccaaacaactttacaagcacatgaaagcgagggccggggcagttattgctactggcacttcattgtacttcctctaaatgatgctgcgcaaaggggccgtggaaacacggggcaggagggagactgcgggtctctgggagaacctcaagggttaggacagtgccaaatatttggaagtggggccttttagaaggaacggggagacaggttggaaggagtcaggrgtcagaatgcccaaagacaaagcagaagatggcactggtaggtaacatacaaataaacttccctagagactatagggaaaccaccagggccctcttctttcaggccaggcccagggctctccctgatctccagcttgactcttctctcccatcctgaatgtttccacttttcaagggcttatttgagctccagtcccttttggaactttccctaaggcctagagtccaccaaaatccttccctccctgaaatccttccaagttcgtccatcttatacagtctaacatattctaagcctaggctttggagctcrgtggagctgggtttccatccagcactgctcctggctatgtgaatgccagcaagtcacttaacgtctctaagcatcagttttcctcctgtcaaacaggcctgataacaggaagcttcttactaggccattgtgagggtagaatgagataacacatggaaaatatttaacataatgcctggcacagtgaaaatatacagtaaatggtagctagcactgtattcatttttttttttttaacagagtcacgctttgtcacccaggctggagtgcaatggcataatcttggttcactgcaaccttcacctcctaggttcaagcaattctcctgcctcagcgtcccaagcagctgggactacaggtgtgcaccaccacaccctgctaatttttgtattttttgtaaagatggggtttcaccatgttggccaaggctggtctcaaactcctgaccttgggtaatttgctgcctcagcctcccaaagtcmtaggattacaggcatgggccaccatgacaggctgtgttgttgctatcattattattattatttcagcttcagtagtataaatcctagatccccaaatccccacctagcaaagacctctcactcacacagaaagggagatgcatatgcacagagaactcatcctgcctagcctccacctagggtcactttcttcctactgcagaaagtaggaagatagagaaagcagaaagtaattcaagatactttatactgggtactcaatctaaactacctgggtgagactrtgtgtttcaatttctcagtactcccgtggaactgggttaataaatatttgctgagtagaatttactgcatgcaggctgagctgtcttaatgacccagctggcacttcttaaaagaaagattaattttggccagcgataagcaaatcggccatgtaattatctgtacatacatagacaaagaaagagaatgcttggagttgagccgtgctagaatataccttacacgcagcccctcccctccatagccaccacaaagcactgaccctgtttggatgagatattggagccctagctccagggtccctgatgttgccctggtatcaaggctcttctctctgctctgaggctgccaggcagggaatatragccaccttactgttgagatttccccacactgattggcagaagcaggaggtggtgaggaccaagcagctggtccagtggttgcctctcatattcatgctccctatcccaggctggaatctcatggagacccaagacctcaccgcagagctggttcaagcttccacagcgctaaggtggcagtgacactgcggactgtaagctttggaacaaggctcagtggggagctgggagaacccaggacccctytctggaaaacccattgccagctagtctcacacttggaattgtgatcccttctgtgaccaccttgataacagccactcgccctgttccagccccagtctctgccccgcccagctctgccctgcctagacacagccyggtggggcttggcgagcccttgggcacaggagcctgttagtccagacaacgactgtgcgcatccgggagaacggttactttctgccatgtgctgcagctctagcgacctcgcccaaaactgcgcgccggcagcctgcccaacaaactttcttctctttctctttttctttcaaccaaatggtgcttccacagacacattctccaacggtttrgcgcaaatcccagccctgctttccggagcccaatgcacttcgcagacagctcacttgactccagtcccccagggccgactcagccggaggggctgccgccgggtccgcgctgagcaccccgcacccatcttgctgcccaggctgcggcgggcactcaccgatctgcgccaggctcagcggcacgaggcagagtccccaggctgcgtgccaccaaaacttgtccatggtgtccggagygaacggagggcgcgggcgaaaggagctggaggatccctgggcgcggggcaggggccggcggaggacgggacgaggatggcggaccgaacctggcagaggctggggtccgctgggcaatgaggctgcctcggaagttggctgcagtttttattcgaggttgaaaacagtgacctaagacggagggagggagcgagcgaaggacacacccaagcaaggggggctgtgactaagcagccmgcagaggttttaagaagtagcagccctcccgggcgggcccctctgcccccgccccgtgctctgctgaggctgtaaataatcggggctgccagggacgtgggtcggggaacctggagtgtcgcggggtgcctgtgcctccgagccccactggcccctgcgcccagagacgcactggctttcttctcccgctggccccgcggcgtcaggacagaggatgaccgaaccgtaaaaccttgcaccattgggttcagcctttggcctctcctttcccgctaaatttctctgaatccggctggagcaagatctctkggtttcacaggatgttggatatcctgggagaggagctggagagagggcgaggtcttgccctgggtggcgcagtgcctccgtgcccacagtggggagtgaggggtggggagttggtgaatcttccaagtggaaagagggagagctcattctttttcccctcaataacaagtccacatggcttgaatgaattttagcttcttggcagaacagctcagggaaagctactgatggcctgtcatagggctggcatttggctcagctaacccatgtgttcaagccagtgtgaatgggcacctctctccacacacatgctcattcatcctcctaaatatccttccatccgcccatccatctatccacccatctttccttatgtccttctggggctctcacatccatccatcctcctgtccatccactaaccacttaggtccatctatcatcccactcattcattcatccaaccacacaccttttaatttattcaaccacctattcttctattcatcttcccatacaacttctcatccatcattccacacttcctttttcacatctcttcataaaaccacaaccatccaccatcctcttctccacccatccacccacatatctgtttattgatatatccactcatttcccatctgtccaagatcaacatatccacctatcattttatccattctctcatccacccatacgttcatctattatttttgcccccattatcctcctttctgtgtaaacattaattcattttctcccatctttcctacccagcagatcttaaagagaggaagagtttgtaatattcttcaggggaagccttttgagattgaaatatcatactttgaatgataactctatatctatctataatatactatggtttaatgtttggaaatcaaacgcagtatttatttgtcatgtgaactactamaagtaaatctgcatggacttcttgcctggtgagttacacagaaaatgaaagtgattatcagtggctgtggcaagatgaaaggaaccaygccaggacttctgagggaaggtaagattttgttatttatttcaagaaattgaaaagttgagagaaatgcacccagccatccccctatgcattcattcatcagacatgtaatgagtgttgtggggtatcgaggtaaataagacctggcgctatcttcagagccctcaccctctggtacggaataaaactcacaagcaggccattaccatgcaaggtgaaatatgctgcaaaatgtgtgtgtttggggtgctaccattcctagagaagggagtcacactctctcctggagaacaccaggcagtcttcacaggggaagtgatatttgaggcaggcctcaaaggaaaaggaggaggaattcttcagatgaaactacagggacaagtaagtcatccacaggcagtacagtgtagtgacgaacagcatggattcaggagctagaacacctagatccaaaccctattatggctgcttcttagttgtgtgaccttgcctaaggcaattagctcaatttgctcaagtataaaatgggcttaataatagtatctattattactattacaattctattacttcatagaattggtgaggattaaatgactcaaaagccctgcatgtattaagccgtagatttatgtctacatatgcatgcagtaagcactttaaataagtgtttgctatcattactaaaagcaaaattgtgtttgagcatagaaaagtgaaagaacatggcttgtccagagaatagagagcaatgtgagctgatctgaacatagatcagatgaaggggctgggggaagatagcagacatgaggttacaggtatggggactacaaggtgtaagctatgccagggagtttgaacttgrccctgtaggaaataaggaggcaacgtacttagttaaaattattatcattgttatgttaaaatatgcataacataaaatttaccatttcacccatttaaaagtgtttatagcagtgacgtgtagtactttaacaatattgtgcaaccactaccactgtctagtccggtataaatttttcagttgtggagattctgtttgactaaagactactcctcttgcattttcaggaagagtgtttgggactgaaaaatccttgtctggatctagtcctcagccactcagaagctggcatgccatgactcaaagagcyrcccgtctggaatgaagrcagtgacccgtaactcccacctgaagagcaggtgcttggaaaatgctgccagtccgcaggaaaaagttgttactgctgctgtctgtgaccaagaggacactttatttcttgaaacaactgggggcaaactggctcycagataaggcttcagtccctactcatgtgaggaaaccagccctggtaggttccatgcacaagaatacaggacaaggagcagcttttttcacctcatgcaacctccagggatttcagcttccttttcttggagcaagaaagtgaagtgacgtggggagtcactaggaacaatgtctgtcttactgtgtttcatggaacctggaggttccttagagacccctcagaagcagacctagtggtcagagtaaaagctgaggagtaagctgtgcctctccctccccaggmcccatcccaaccacagaagttccacttgcatcagttttatataccagactattgcatgaaattacattttgacagatgattattcttaaaaaatatataaaaaccaacaaactaggccatatcaagtcctggtcccttctccattagtgcagtaaacaattccaccaaggaaaatataggtgtgaaagtgctttgcaaactgtagaagggcatgcaaattctaggggctgtaattaggattattctccccagaagcggggattattttgtttgcttgcttcccgatagtttggtgagggactgaggtcatttgcccccataccacaaatgactcatttcaaataacagacctggtgacttactgagtcaaggtccacctttgggaattcctggatcacctctttgagctcccctctcatccactttccattctaaagacaccctgcccacaccactggtcacacaaacccttcccaaactcttagatgcttgatatctgttgtgtgttgcaccatctttctttctaagccaaaccatgggatgtgggaaactggaaaggaaacttgaattgatttgagttgacacgagattacactatttgggaagaatccagaattcaatcagcagccttggaccragaaagtccaggtctgagcattggctttcccccttatcagaggatgacttaacctctgggagtttcggtaatcccagccacaaaacaagggtaatcagacctttcccatagtttattatgagtagtcagtgaaagaagacatcaagaccatttcctggtgtgcctgcctcatggtgggactcaatgacctctaagctacctgagaacagggacatgtccttctggggtgccagcacatactcagctctcagtccctaacatatacactgtgctccataaataagcattacataaatgtatgagggactgttattttttttccctcccatcaaagcgcataggggtgtttcaggaatcacatgaactggtgggaggaaacacatagacaacttgacagtttctaaataaatgcaagcagtgacatcctatttggggtgactggttcagggagacttgagtgcaaacagagcattactcactctggcagactagggttctttgctgaaatattggggmctgatggcttctgactggtagtaataaatcctgttcctctcgagcaaagaaaagccaaatctaaaccaaatgtgagcaggagtgtgaaatggaaagctgggagatcttgggctgaatcatggaattcaaggattacaaatgcagcaggtcacagactcttttaaagggacaatatttaattatttcacgggacagcttcccagaaaaggaatgatctggcacagtaaagaaaaaatgacattccagttaaaccttaactcttaaaaaaattcatccttagttcatattcacagtgtgaattctacacatataaatgagcagtggtgaaaaaagctcttgcgaaataattattagtaaagtctaaataaaccagtagctgggaagcaatcttcatgaaaaataaataacctctaaggattagtctcaagctaaccaaatgtgattatagagctgagcctttaggattaataaggctttcaaattatggtaaataaagaaattggtgtggctgctgcaccctggaagtcccaaggggagagatgcaactggattttttagatagatccatgttagccacaaaatgggttttacgcagacctttggaggttaaaatagtatgcagataggacaattcctagacttggatgataacaaacttagaaatgtgaatttttgacgatgaaatttgaattaatggtatgtggctttatgtagcaagctaactggaaggaacacaagcaaaacagtctatattttatgcactattayttaagggaatgtaattatatttatttttaattatatttattttatgttcatgtagtaactaaaattcatatttattcctcttctctccacttcatacaaagtggttaaacatctattggaaggctttaggaatctgttttgatgaacatttaagcatgatttgttttggacatatccatggttggtatgtaaatggtaactaagagccttgtaattatctaaaaattgcttgttctctgcactcatttactatgtgactactatgtgctgagaacaatttatacattcttggttctgtcataattaatcatcaccactccttcactgccactattgccatcatcaccactaccacctccaccatcaccactgccactatcatcaccacgatcatcaccaccaccactaccattatccaccatcaccactagagttattactaccatcactacaaccaacattatcttcaacatcatagctaatagccagtactttctacatgtcaagcctaatgtcatttaattgtcacaacaatcctatgaaaagttaatttctattttacagataaggaaacaaagtcttagagaggttacaaaacttgtccaaagtcacatttttatttcacttagcaaatctttcctggctttaagagatatggggatagaaaagtttaatccctttttgattcttgatgtagcaaaaatgctaaattaatggagtcctaattcatyagtctttactaaattttattctgaatcatggaaatcagtttcttttaagaaggaagatttcctttggaagcttttgttggagtggaggaggtgaaaagagtattgctaaggtagagaatggagaatgttgactctcacagccctctgacaaattagaatcctagaataagacaactttaaatgtgtagactcggacygtggctattcaatggacaattttagatttgcataggactatgccttgattccttagagtatcattgtgagatggttgtatattctgactagaaataacaccattttctctttrcagcacctgagartttattcagtgacgataatactcacaagaccctttttggatttgtggcccamcccacaagttatagttccttctctgaatatttcatccagattgtgaagagcagcttctggcagccacagttgtactatgtgacccctacttcccatgcccaggactgattcgaccccgtagtagacacctaaagcaatcctgatcagtcagagtctttgttcctgacatttgggattagagcatggctgaaggtttaagacacaaacttggaagctgtggggcagcaatacacctccatgaggacagagaagcaggggaaataagaataaaccagaagctcacagaaacgcaggaaatacttctagagttctaacacttttcgggtttcttgttctagtccattcttgacacacttgtgcctcacagaagccaatggcaagaatgcagtcagatccttccaataaattccttttattctgtttacattagcataagctggtttccgttgcaaccaaaaagacttgatgaatataggagagcatcacaccattttacaaaagagtaaacagyggctcaagtggatggcggatgcccctaccactgggtcttgaattcaggactttgactctaaatcttaggtcttctgattctgaggtctgtgctcttttcaccagttggcctcacctataatccctccccacatcatcccattctacccaaagaatacagttctctctccttcgttgtgatagaaactagacatctctgatactttgcctacagttgtatgtcaatccaaatgagtgrcaggtcttccgagtcccatcctcccagatcttctccagagagcccctgtctgcctgaacatgcctcacagtctatttkcaaagggcaaaacctttcatctggcagatggtaacagctgcttctctttaaaacacccaaagggtagaaattctgggctctaacgtacaggcataaggctcctgccaagtcctgactgggcttagcatcaaatcctgtagaaaaggaataggtacagaacatggatgtgaggccaggccaaaacgcattttattgctggcyactgtttcccagccacagaagaatgctgctgtagaaggcatggcgtgggtgagaaagagacttgttgaactgaactttaatgggagaggatgtggggagggtgggctagggagagagaaaggaagagacgtcttgagagagcttatgaaggtgaaagaaggcaaaagacacagatgtgactccatgatgaagcaatggaaaataaaagtcttttaatcatccaatggraatttaatggacaccttctgtatgcactacatggattcgccacagaggacaagccacagatgagraggacctgccctctctcttcagagactatgatctagatcagagttggcagatcagttgccttcattagtttaagaactattttgtatgcacctctatattccaggcactactstaaattccaaraatacaacagcacaaaaagacagactggcattttattatcatcgaggaagtgggtggagggtgcaggcaattttaataaggtagactaggaaggtctgggtgaagaggtaacatttcaggcaaatttacatgaaaaaaaaagtgcaaagcaaatgtaaaggctttgagattggagtatttttagtgtgtttgaggaaccaaaaaggttaatgtggatggagcagagtgaatgagaaagcaagtagtaggaaatgagattgaagaggaaggtaaagccagctcttgtgcacccttgcaggccccagtaagaagtttggattttatgccgagtggaatggaatgactttagtgggtttcccctaattttcacctctaatcaattaataatgactgcttagttcactgtgatgagaaagattctgaggctttacagttcaatggataaaagtccattgatggattaataatatacatcatgtctgtagcatgaggcagtggtaacactgatgattaatatttgacatctctgatcatgatggaagattaaattgtatttgtcaaagtactctgagttgtgctgcagtaacaacataagcaaagtctcattggtttcacacaatcacccaggtgacttcttgccatgctaagttggctgtgggttcaggaaactctctaaaacaactgtcttccatgcagttgctcactgatcttgtgctacctctgtctcgtaacacaattgctgcagcagggaaaaagaatagtagaaggcctcatgccagtgattaaatgctttgtctcagaaataatagatgtcacttcttttcccagcccattagctagagttagtcacatgatcccacctaagtgcaagatgactggggaagggtaatccttccatttgcctaaaggtagataagaacccaatgtgagtaagcagtaaaaatctagcatataaatcraccttagaacaagtccagtaatactctaaggaagcttgtaatgcactgggtaaggagtagtaaataataaagaaattcagaggccaggtgtggtggcttatgcctgtaatctcagcactttggcaggytgaggcaggcagatcatgaggtcaggagatggagaccatcctggctaacacggtgaaaccccgtctctactaaaaatacaaaaaaaattagctgggcatggtggtgggtgcctgtagtcccagctactcrggaggctgaggtaggagaatggtgtaaacccaggaggcggagcttgcagtgagcagagatagcaccactgcactccagcctgggcaacagtgcaagactctgactcaaaaaaaaaaagagaaaaaaagaaattcagagtggtgataccaacaygtgtagctcaaaaagtctctatagagaggaagggtactcgggccagatcttgatggatgagcagcrtcctgttactcaatcctcaccatctgatgcccaataaacgccccactttccctggctcaatcccatccactattctgcaagtcactttaactgactctttagtcttattattttggatgtaagatgatatgctgttgaagagcattgtttatttgctgtggaattttgggcactgtactcaacctctttgagcttaagatccccatttaatgcttgatataattatcatgaaaattaaagtatataatgtaatcatgcatctattcaacttatcgaagagtttagaatatggcagggtctaaaaaacagtcattgttattattgactcacccttccttaaaattatattttcccttgtctttatagatacagctatagcctatctttcattctgcctttcagatkaatttatctttctgtgttttgggtccartttcagctacgaggtaaaacggcttaaacacatacacatttatcctgtggttacctaatacttgtaagggtttctggttagataggatggtgaagagggataaacaattcaggctgatagagactctccaattttcttttttttttcttttttytytttttttttttgagacggagtctragtctggctctgtcgcccaggctggagtgcagtggtacaatctcggctcwctgcaagctccgcctcccaggttcatgccattctcctgcctcagcctcctgagtagctgggactacaggcacctgacactacgccgggctaattttttgtatttttagtacagacggggtttcaccgtgttagccaggatggtctcgatctcctgacctcgtgatccgcccgcctcggcctcccaaagtgctgcaatacaggcgtgagccaccgtgcccggccaaactctgcaattttcaatacatgacttccgagttcactgaggtcacttccattcagttggtggaaggaaaaagagtatggaggagaattgtttgtgaggtttttatgggctagacctgatagtgggaccctcacttccatccacattccattggccagaacccagtcgcgttgcctcacctaactgcaaggaaagctggaaaggttatgtggtccagttgtgagtccagaggaaagagaagaacgtggagttcaggaagctgttgtctttgctacacttctctctccatcccttgctcctcctctgagtcttttcccctgtttcttcttctaatggggggttgtgcatgttgatgtcttggtctgtactcatttcttcacttatttcctaggtccactgcacctgtcacaccacaaacaatgataaaaacggagacacctgggtgagcctcactcactgcgcatgcctccatcttcgaagagctcctgttcactgtactctgaartagactgtgcaaaacattaaaactgaccaaatcaataaggtcttgttttcaacatctctatgtttatctatgaataggaaarggactgacgtgaggtgggaccattggtgattttgttctgaaataagtgaaagtttaatggaaagatacatatggcacaaaaggaagataaaattttttttcttttagaaaaaaagaaaaaaaaacacctctttttcttttctttttgagttggagtttcgctcttgttgcccaggctggagtgcaatggcgtgatcttggctcaccgcaacctccacctcctgggttcaagcgattttcctgcctcagcctcctgagtagctgagattacagacatgcaccaccacgcctggctaattttttgtatttttagtagagacagggtttctccattttggtcaggctggtctcaaactcccaacctcaggagatctgccagcctcggcttcccgaagtgctgggattacaggcatgagcaaccgcgtccggccaaaaacaacctttaattatggaaaatttcaatcataaatacatacaggtaaagagaaaattataatgaatttccacacagccattacccagcttctacaattatccactcatagcccttgttatctgtctgtacctcctacctcctccccaactgctggattattttgaaacaaattccaaacatcatatacacttatctgtaaatattcagtatgtatctctaaaagataagggcttttaaacccttatttaaccacaatactattattacattattggtaattttaaactctttctactagtggctttgtacatgtattataaaaatatgtatattacttttgaattgagcaatattattttaaaaacattaagattcagtaaacatcacmcacacacacacacacacacacacacacatgttgagtggctctgagatcacctctatggaaacacccttgtcctgaggacagttttcaacacatgctaggtggactcgatacatctgcattagaagtgaaaaggaagcctctcatgctcacactagtcctgtgggaaatgggggctggggatctggcccaatcttacacccagcccacagcacaagcatagtgagtggtcccaacaggggactctgaatgacactgacaaagaygagaaagcaggaggcaaggcaccctayggtgtccttcagagaaggtccttctggcccctcgtctgccagccagctgatgccccaaagtctaccatctgagcatttaaagtctgatcagtccctttgcctttgggtcaatgagtttagatgatctttcctccccaggatgtttgacccagggtcgtagatgtgggtgagggcatgagaactctgagcactcagaaaaaaaaacaagggaaaacccagaaacacccagctggctttagccccagttatgcctaagtctgactttctcagaagtaaccaatgtcctctgtcccagtccagatggagctataccaatggtggttgctggtaytctccaagtcattgcttgcccttgttcatggatggaaaacttcctccattctcacctmgtgttgtgggtcaggggacatccagcatgggggagtcatgtctccacagacaaaccaaccaacaacaacatttccrttgcttcgcccaatggagaagccgcccctcatccagtgaacagtgcctgctccccaaatcattgcattcaacaggtgcctcctgctttctccaggatgcagaagaatgatgacgattctaccaatttcccagatatttttaacctttctcaacctccccatcctttttgtcttcttttaatttctgtttttctcccactttttctccccttctctttttctctgtcctcctcactttctcattttgcatcctctccttattttcccttcattcctatctcttgccctagttcccctcccaccagtcaaatatatgactgttttggggagttttttggtttaatttcwctctttcttccccaccttggtcttgctgctgcctgccwcctcctcagactgggtttgtccctttttcttcccccacccacagagtgtcagctcctagtggcctgattcagaccttttatattaggttggtgcaaaagtaattgcagttt

SEQ ID NO: 9899 - DNA, 187040 bp, Homo sapiens
  misc_feature (25962)..(25962): n is a, c, g, or t
gtgctgggattacaggtgtgatcaaccgaacccggcagcttccagttttctactccaccatccctagggttgaaccctcatcctcatgctccaaaatggagcttcagtgatctcatctatgttctagggaaacaggatggaggaaggaaggaagaaggcataaaaggtatgatagctaccttttaaggaaaatttccagaaactactgtacttctgctttgatcaacatctaattgatcacaacttagccatataaccaagtggcaacaaggtaggctgggaaatgtattctttattccaggcatctatttcccagctaaaaactgagggtcctgatgaggagaaaacagataataggtaaggcaatcagaaattgtcaacatcaagacacagtccctgccctctaggcagaaaaggtaagagaatactgtgagtatataacaaaggaatctaattcacactgtgcaaagttttccagaaatgggggtgcctgaactgaatttttagggaagagtaggagtgaaagagtgaaataggcaaagagtatggatttttttttttttttgacagagttttcactcttgttgcccaggctggagtgcagtggtgcgatctcagctcactgcaacctccacctcccaagttcaagcaaagtctcctaagtagctgggactacaggcgcatgccaccacacctgactatttttttttttttgtatttttagtagagacggggtttcatcatgttggccagggtggtctcgaactcctgaccccaggtgatctgcccaccttggcctcccaaagtgctgggattacaggcatgagccaccacgcccgaccaaatggtggtaatgataatagtgagggagtttctggaaagggaaattagccagtggccagaggcttgaaaggaattactgtatactagtgtggttgtaccctacatttagaggtcaggaatgttgaaagatgaagttgaaaagataagcaagggtgaatagtttttgtgtctggtctactctgtataatcattcatacgataaaatgtttaaaaaattagttaccacttaagctcttgcttaaatgagtttataaaagtgctaatcagtgatcattaaggaaataaattgtatacatagagcatattacttttcacagtacaatcataaataggtacctgcaaaaatatgaaccaatattctctgtactccttctaaatggtcagtgttctgagcctagcaacaaaataatctaactagatgaaaacttattgtattcacytgcttataagrtgcataaagattcacctttacaccagagaaaggtatgtaaaaactgccccatgtccaatgcacttacattagagataaaaagccaaatgcataatgaatgagaaatagctaagagtctgagttacagtcaccaaaaagacaataatttaatgctacctctagcagagaaagagagcagatacgtaagtttttgtttttcatcctataagtggcattcttacctaaagcaaaagcaaatataacaaatcagaggccacagagatggtcaaagctagagtttgaggctgtgatacagatttttttgtaaagatgccgataacttcttctatacccattttcaatgtgacttttctgttcttcccattgaaaggtggatttgttttcctagttcttgaatctgtgctggctctgtgacttgttttgaccaaggaatatgatagaagtgactctgcccttcaaggctaagcatgagactgccatgtacaaacgttggtctagtctatggagggcaagatgccacataaaggggaactgaggcaccccagacaacaactagtatcaactgctagacatgaggccatcttggaccttctaccacagttcwctgcagttgtatgagtgaaaccagcagaacttcccaaccaattcacagaacatacgaaataataataattgttgttttaagccactgtgtttcagaggggtttgttaaagtgataactgatataggttcacacctatgatattttagattaaaatgcatcattgctatagtttatgactgaaaagcaatacaggtattgttacaacatcaatttcaggctttaacacaatagactgcaaaatgaactggtaacagaaagtcagggcttccattgctatactactgaagaaaccagaagcttaaagtgttagacatcctaggaaaactgtaaggtccccacaactggaagaaatatttttaaaaaataggtattagatcctcaaacaaatggaatcacttgagaatttaatatttaaattatatagatagctcaacaagaactaataacagatatatcaaagatcaacattacgatgctgtagatttatgagtagaaattccagttacctctgtaggtaagagtaataatgacacaagtcatgccccttgactctttttttttgagacagagtttcactttctgttgcccaggctggagtgcaatggtgtgatctcggctcacagcaacctccacctcccggattcaagtgattctcttgcctcagcctcctgagtagctggtattacaggcatgcaccaccacgcccggctaattttgtatgtttagtggagacggggtttctccatgttggtcaggctggtctcaaactcccgacctcaggtgatctgcctgcctcggcctcccaaagctctgggattacaggygtgaaccactgcgcctggctgccccttgactcttgaagataaagtccttgagttccgtggtgtagtggacaacctccaaaatggctgctcacgactctccmttcctggcactcactttcttgggaaatagtctcccacactaagttatagctggcctgtgcacccaataaaatatggtggaaatgatggcgtgtgacttctaaggctagtttataaaagacattgcagtttctaccttggtctctctcttggatcacttgctgctggagmagtcagccgccgtgtcttgaggacactcacacagcactatggagaggaacacataggaactgaggcctccatctatctattaggctcaacttgctagccatgagagcctgccatcttggaagcagggcctttaacttcagtcaagacttcagatgactgtatccctggctatttcttttttagatagctttattgaaagtataatttaattaccatacaattcactaatttcaagtatacaattcaatgatttctagtaattttacagaactgcccaaccatgaccacaatctaattttagaatgtttatctcatgccaaaaagaaacctcatatccattagcagtcactctcagttccaccttcagccccaggcaaccactaacctattttctgtgactgtagatttgtcttttcagaaaatttcatacaaatgatttcatacaaacgaattatgtggtcttttgtgtccagcttcttttatttagcatgtagctgacattttgattgccatctcatgaaagactctgaaccagaactttcctgctaagctactactaaattattgattcacagaaactgtgaggtaatgaatctctactgttatttttggctgataaattttggggtaatttattgcacagtaattgataactagtacacatcggtaggtgatactgctgggaaactaagtcccacatttaatggcacacattcaatgggccattaaacccaaccccaaaggtwctattaagagttgtgttgggatctcaaatcaaagcaaaaagaaaaaaaaaagagttgtggacatgataaattatatcttacaattcgattagcatattttgttaatgatacaaaactgctactttttctaatttttaaaagaaagccctttccaaaattagaagaaagaatttccaatttgtttttaggtccatgaaaaaatttgcatgaacaaggaagagatgaaattgtggacagtcaaaagtgtggtctagctgccctggtgggctaccaaggaaacttgccatattagtctggagtgagttttgactgatcagattggacaataaaaggctcagctgtaattccaggagacttaattagtcatttgcaaccttragatacagctatcaagaagccatttaaaggattcatgagggaagagaacaggtggatacaggcttcagattttgagtttgataccgagaggaagaaagaggctcacaacttcacaactgtgtgaatgggccaaaacttcatggaatgctgtaaaacaagagccaaatgtgaaatggtttaaataatgtgaattagtaacactcttggaaacctgagtacaatttgttgtttgatgatagttttgacttggtttctaatgcagtgaaggtcaaagattaagagactcatctagaatctagtagtaacaaaaaggaacccttggatatggcgcgggggaagggaggaagggggggggagggaaggggagggaggggggagagagagaaagagagagaatgccgcaggtcattaggtattatttttcattcctcctgcaactttctactgaaaagattaccaacgactgacagatctttgcctccaatcttccccacccttccctttatgcttcaaaatgctacaaagtcatcttcccaaagcagctctgattatataaatttttgctcagaaacatctgatatacccccactgcatgcagagtgaaatctgggcttcttggagcattcaagactctccataatatgttttggtaggccaagagttagaccacttggataccttgatctcttgctaagtattatttactttccctaccctataaatcatctgcctcaaacattaatctttgtaccttcaacaccccctctattttctgtactgtatttgcagcatttcttgtctatctcagcctgtcaaaattaaactcagcgtttatgtcaggttatgtctccataatgccttatccacgcccttagtcaacattcttcttcctcttctgtggtgcataaagacttttatatctcaatcacaccacctttggcgttctgcctggttttacagatagttatgtcttggtgtcccctacttccttaccctgtgatttaagcatagtatgggttaraacattygccatgaattggcctgtggcagggagctgatgatccttgttatcaaccattcaaagtttagcagatagtttggaaaatcaggcgattctgctaattcatgaaattactcatgaaaaaaagtcgaaaggagtcacccgtctctaaggcggctttttgctgtctagaataaccgtgacaaaaggtgggagcaaaataattagctttcaggggagtatggcttctctaaatagttgcaagatgcctacattgtttatgtaaaataaaatatcttatgtactgcactttcgaaaagactgaagatatctaagatatctccaggtggaaattcccggtgacgggtgtccttctgaggtcaacggcactgaccattgcacactgtattctggaatacgttcaacacagcaaaaccggctcgtggcgcgtccccggcgtccgactgctgcgtggccccgagcgacctgcaccccactcgcccccgcccccacctccgccycagtccgcagcggctacagcccgggaggctccaagggaactcccgcacgtctgcgcgcgcaatcacgggacggcgggkcggcgtggcgcgcgcaattgccctggaaaccacggcgcgcgcacrcgcaaacgcgggtgatggggggaagaaagactgagctgagagctttgccgcgggrggagggctctacctcgctcccccgcggtgggcgcgcgcgctggcccgctcccttgctgcacgctcccggctcgcgcgttccccccggtgccctcccccgcctcacaagcacccttgccctcccgcatttgtgcgccggtgcagcaggcagtgggaacatccgggcatttccgcagctgagcggcgacccgggcggcggcggcggtcgaggagctcccatggcagggacgaggcggagggaaggcgaaaggggggcgaggagttaagccagagcctccgcggggcgggtttccgagggaggcacagagggaaacggctctcgcagccsgaggagggtcaggcgcggagcttgtcgcmcctcccgcgcattctgtccagcccgggctccggagatgcatctgcatcaggtcctcaccggrgctgtcaaccctggagacaactgctactccgtgggcagcgtcggggatgtcccyttcacggtgagcggcggccgggagccctaggggaagataccaggggccagacgcgggggcagggacctcctgtccagggcgcacgcctcctcaggaggctgtgagatgttggtgggccccacccgtggcccctttgcagccttggggtttagttccccctgggacccgtgggaccgtgggtcctgcgtctggtgtaggaaatcacccgttaggggaaaggcttaggaatccaccgcactctccaccccaagcaaacgggcctgaggtgactggactagaaggctcctcctagggcggcccttcggtctgcggtggaggaaagtggtggtgcggctgaaaccccagagcgtccgtttcgcagctgctctcggcgtggaggcgaagagacttggtgttggtctcggagcgtggaggtgaagagacttggtgttggtctcggagcgtggaggcgatgctgcgccttggctccscctgcccgctgtgctagggcagcgaggagctgctggagtctgtggctttaagcctgactctgtatctcctgataatgcaggatcttaattccaacaaaaagatagaaaaattcatcctccgcgcccgaaagatttagaatggaaaggttagagtccagtggcttggagagctgtctcatttatcaggaggtcgtagtttggtaatcctcctagataatattttaatctgtaaggtagccttttttttaatatagtaaggcaatgtgaaaaatttacaacagtgcttgtttgagaaaagtgtatgtatacataacgttttagaatctccttaaaagctagatgaagtagacatgtttctcaaggagattggactcatcagtcctttttgagagtggaaatgttyaaaccaagccttggagcttcgtttactcatagatagactcccataaattgagttcttttttaaagaatgaaatttatacatggtcttccttataaggaactgtaggcagccagacctttattaaatatattttgtaaactgttcttcttgataaaactggaaattccgtaatggtatgctttttagacaaggaaaaccctttgatgtctgctttccaacagtgtttttaaaactgcggaaaataaagcttcagcaaaactgcagaatcattatgtagcagtgcattctggaacagaatttattttttgacgttttgtgatacattaaccccagaagattgctttttagccattttaattttttagtgtaatccacttggcctagctccagtttagaacgaccccttttgtcatctgtgttttatgtacatgtgacttaaaatattcatatagagctgagctttgtcttcaagtgtgtggagaatcttggtttttggggatagagagaagaaatttccctgttccccagtagtgcagataggaagttcctcagggttagaagagtgggcctctttcatcaagaaacaaagctggaatctttggttatattttcctgctagaatggtggtggtagttttctgcttccatctaaagtggagtgctgtctcacggcaggtctggtatgtagaactaaataaacgggttcagatgcagcctggaaaagcctgtgtaagaactgttagtgctgtgcaggtgtggttatgctgtaggccacttgtgaccagatgcttagagtcattttcaaatcttcttgcacytccctaattcagcgtttcacgaagtctagttgactctgcactgtctaccagatttactccttttcatatccttaaccaccaccttattttacaatcttattggtattaatataaaagctttcaaaactgtcatgtccgataacttcttcatcctccacaccgctgctaggataattttcttcaagtgtcattttactatattactcttggcttaagaatatgtaattgtttttaatagctgtgttaggaaatgtaaacttgtyaagtattctccatctttgactttatttttaattatatgtactcctcactttggcccctctgttacatactgatcttcttactctaaactgcatttttatgttgcaacaagacagtccttttgggtttccaaattcgactcaaaatttacgtggtttaggatgcctgcctgtgacactgttattttggtcttttgacaaatgtaaatacaaacccattttgcacaccatctcatttaactaccttagttttgagcgcactgatccagttttaattttgccatgaactagaaatgatctcttgggctttgtgaaaaacagattgaaaaacaaaacaaaacaaaacaaaaaacaagctgctttcaagcagkctatatataatcaactaacaaatacttaagttcctatgtttgtaaatataggaataataaatagtaataatagtaaaataaaataaagtaatataatagtaaaaataaaaagcaagctcctcttcatggagcctgtcacttgattttagagcaatcagatgaagaaactttagttctggatcagatgattaaaagggggaccagccaggacttggaatgaaggtcttgtgacttctcattgtgtgggcttttcttggtagtatttccttcttaatatcagagtgcctgctctggagagggtgtgtgggtgcgtaggtgggttagtggatggatggaaggcctcccagacatagtgtagaaggaactactgtcttgcaactaactcatgattcttagctgatgttgtgtttcatggtagcctgagaaccttttcaaaatacaatacatactttatttcagagtctaaaattgatacatctttgaagaacagaattgttctaaaaggattttgagtttatgacagtgtaataattgaaagaaatgtgtgttatatattttgctgtgcatggtgggtggcgtgattggttggctgtgaatgactacttgatgtcgtgatgtcccaatttgtgcaatattgacatggtactgcagtctgtagtggacaatctcagctgatgtctgtggttttagtggtatcacgtaagctatgatgcttttcacttgtgtttaggcagtatacagctgtttccttaaacattcgattgtgatttcgtaaatgtagctgtagatatcacattttaaaacatcaccttttgaacaattttgttcttttcagtgtaagatctaggttttcgaaatgttatcctgcaataagtcaaatctctggtagttcaaagagatgatcttctcccgtgtatgagctttattatactttattttgcctttaagacatttcttactacccttcagtgaatgttttgagggtttatgcaacagatattgtaaatttctcattatttatgttattacttttctgaaagatagtccttggctattttttaaactttactgcacatattaaaatattaattgaaataatgatcatacrtgatgattttttaaattaaaaattcatttggccttaaggcttgcagactattttgagatgtataggggcagttactattattccagtgtgacatgatttcaacacattgatcaaagtttacaaaaattagtaagtcatttgcactcttagggaatttataatatactggcagagattaaaatgatttatataattataacataaggcagatggaagagattgtagttgggaaaacaagaagaggttttatggaagaktaaggtttggaaagataagaacaacagaagcaaaggaatggcataatacgaaggataaattattgagtgactgttttctttgcaaaagttactttttaaycacaggacttcttcattaaataacagacactcttagaatgttgaaaaaatataatatgcaaacattacctgtagcttttcaggaaaacgtacctggtattctgacattcaattttttttttaaattaaaataccaacaaaaggttggaaataaatggaaaaccattcatttaaaaattagaaaataatgttgtataacctcttttatggcatttagatatgtcttaactctattgtagaataaaatttcagtcctagagttatggtaacaccaaaccttgaaaatgatcaaccagtttatacatttagcaaatgttgaacacataggtgtgctaagctttgtgggtattaaaaaaaaaaaaaaagaattacaagacatagtcttgatttcagggagtttattgaagaagtgtaggaacctggtagtctaatacgagagtaaaagacacatacctaaccacagtaggccagctgtgcaatattaccagcatttaagtgggaattcaggaagactaagagaacttttggccaggggaatcaaggggttggttagaaacatgcttctgtactggctggttattaatgtgttaacctgtgctgagaggaaagtgaaagacagaagtcaagaatttagaatggacttgttttctaagagaaattggcctttttgttcttggagtgtagcttcttgtttgtttaaayggatacatttaaaaccttgtgggcttgggcttagtgtcaaccagtaagtgaatatagggtttataagttcttatgtccctgcgtagattgttaattagccttcttgcttgtagcaagaagactcctagcaactactcagaaactctggtaaggttctgaataatgtcttccccaaaaatgggaggtcagagaccaactacttgtatggtgttgrtgaaatcacttaaacatgtttaggtctttgatctgtaaaagaagttcttaaagatattctttaagtatttagaccacgaatgaaaattatatggacttctctagagattttcaggggtcaaaagagaaaatggactagaaacataaagtggttgtgttgaagttgtaggtctggagtctttatcgtatattgcttctcacttgtatttacaagacttgatcagatctcacttgtatttacaagatttgatcagacctcacagtcggggagtctgacctcctttctggctcagtagataggccattcagagcatttatgaagtagtgggtctaggaatgagtctttgggcttacagctgaggagaagcctcttgattaggttttggtccttggcacctggcagatratagttgcctgcgactgtcatagtacagtattgggtgggagatgggaccagtgtgatggtgtttaggttctcctttcgcagctttccttttcccgtgcaatgcctttattttagtttctgttcttaggatttgggctatttaaaatattactttagaaattataatcagattatcttaacttggatcttggtaaatttttagaacaaatcagagtctcagtatttaattatctgaaagagcacaggatgttgggtgacaaccataatggcacagtagaaaaacaagtcatgcctgaccaatttaatttccttctgtgaaaccamkgcagtacttaaaatgggatataatatagaatwtmtaaaattcagatttagtcagacttywctagcttgtcagtttttttttttttttttttttttttagatggagtctcactctgtcacccaggctggagtgcagtggtgcaacctctgctcaccacaacctccrtctcctaggttcaagcgattctcctgcctcagcctcctgagtagctggaattacaggtgcgtgccaccatgccaggctaatttttgtatttttagtagagacaggatttcacgatgttggccwggctggcttgaactcttgacctcaagtgatcctcctgcctcagcctcccaaggtattgggattataggcatgagccactgcacccggccatttgtcagtaattttttaaaacaaatttggaagccaaatatttcagtagaagttttagggttttcagtcctttcgagtttgtagaatccttttgcattatgttagtgctctgaaaccctgatccatgatgtaacttggtattgagggacaagtacatcttaacaaaggtgacatgactatattcactctctcttaaagatagctcatgtaatcctggaatttgatgtaaatatgaaaccagttgcctgcacttcttatttttgtgtgtgtgggtttttgttttcttaaatttctttttttttcgtttgcctgcaagttttactctcaaatcctctcatttcatgattcctgaggcttcctttaatgctatctacccctagtcctgaacacctaaaaaatgtaatggttatcatttatctctttcagatacagaaaacagagttaggcccctctaaataatatacatggtaatttggtgggagtgattttaggggaataaataataccctcttagatggattatcattggagagatgttcctttaggtccactgtcttctaaaaactgagccttgggagtaataacatttaatttaattcayactaaataattgttgttttcttcctgtgattttaggagaaacccattggttcgtactaaatcagtagtgttttcttcttgtgatctaaggagaaactcaaaaagtcgtaagtgtgttttgcaagtaagcatagatggacacaaaaaactcataaacattctggcttagactcatttcacagatatatgtagctcatccrttagctgtagttcaaaaacaaaattccatacattttcttaggagtaatgattttggttttgtgctagcaacttcttcatatcatctctggccttgactgcatccacacttaagaggatctaatcagcaggaggtaatcatattatcatcatgtacctttcccataayaactcccatcattccttttatgtggatgaataaccaatgttttcagcaaaggccacttcctccatttaggttctaaattgggtgtgattttgtccaccaggagacatttggcagtgtctggagacatttttgattgctgtgactggaggtggggaattggtactgccaactagtgaggagaggccagagatttagataaaacgtcctacagtgcacgggatagtcctccacaatgaagagttaccaagcccaaaatgtcagtagtactgaagttgtgacaaaccctgatttgtaccttacggtttgcatctctctttcctactcaagtgcatgattctagcagtttctcccttctctcataaaaatgctttttctgctctattgaaacactgtcttcatttagccttcttagttttctcctaccatgcttaattgcttcttctcagcctgattccagatttgtatactcagctgtttctttgacatctcctccttgaaggtctaatagctatcacaaagacctcataacattttcctcttccagtcttccctaaatcaataaatagcaactccacttttctttactttccttgtaatctaccttttctcttccatttatgtcccgtatctaatgttagcaaattctaatggttataccttcaaaatgcgtccagaatctgattacttcttatctctactgctgccaccttggtgcaagacagcatcattttkttcccctggataatggcagttgaatcttaaatggtcttcctgccttttctgactctagcctatcctccttcagtttattttcaacatagtagctagaatgctcctgttaaaatacaaataaaatcttgttagccccttattccagactttcacgtggctttttttyccactcagaataaaaacctgagtgcctgcaatgccctctattgctatttctttagcacctaaaacagaaggtggtacaaaaaagtactcaataaattagtaaatggaaaggatacttagtgtaatacacacatagtaaaaacagtgatcttttcataaggctatttttttataatacttcttggtataggtcagtggcattaagtcatatttagaaaaatcaattttatacgatgaaggcagagagctttgatataatataggtgtaaagctgtgctgccctggtttactccaaggatatatattaatgtatcaggaggaattgacaggtggttctcaaattttcctcagtggtgcttttgaaagacttaagtatataatgaattagagattagcctgacaaatacctggagtgtagagattctgtactttaggagtttaatatgttgtattaatttgctggggctgccataacaaaataatacagactgggtagcttaaacaacagattttttttcctcacagttctggagtttggaagtccaagatctatgtgtcagcagatttggtttatctggaggactttctccttgtcttgtacattgcccccttcttgttatttcctcatatggcttttcctttgtgtacatrcacttgcggtgtctttttctcttcttagggacgctagtcttatagggccccacccttaagayctcatttaaccttatattacctcttgaaaggccttacctccaaacacagtcacgttggtagttagagtttcmagctatgaattttggggttacacaatatagtccacaacacrtgttaacaatcagctgagctggtcctggaattgaaaattgaggagcctagcaaagacatgattgaggtggccaccctacttggtggtaatctcagctcaaccaaaggagtactcttggatagaagcaagattctgttaaagaaattttaagaatatgctaatatgtggacaaatggaaaattcaaacatgactgtgataattttatgctggacaaattttatatagacataattacaagcacagtttggccattagaagcaaaaagcaaataaaaaccccaaagaattcagatttttttggtttaaaaaattaatataatatctgcattgtaaaaaagttataattccaacagtgttgaaatatagaaagtaaaactgaamgtttccagttcccagaagaattcgtataacttactggttatcctttattcaaaaaatattttggcrcctagacattgtgcatacaggataaactagctattgaagtgtactgttgtataagaggacttggtgtatgttgttatgttgcaggaagtcaaggaccctaaacggagggacaggctgaagctatggcagaagaacataaattgtgaagatttcatggacatttattagttccccaaattaatactttcataatttcttacacctgtctttactgcartctctgaacataaattgtgaagatttcatggacatttatcacttccccagtcaatactcttatgatttcctatgcctgtctttactttaatctcttaatcccgtcatcttcgtaagctgaggatgaatgtctcctcaggaccctgtgatgattgcattaactgcacaaattgtttaaacaatatgaaatctgggcaccttgaaaaaagaacaggataacagcaatgttcagggaacaagggagataaccttaaagtctggctgcctgtgggctgggtggaacagagccatatttctctactttcaaaagcaaataggagaaatatcgctgaattctttttctcagcaaggaacatccctgagaaagagaaggcgtccctaaggggaggcctctaaaatggctgctttggggctggctgtcttttacggtcatagatgggggatgaaataagccctggtctcccttagtgctcccaggcttattaggatgaggaaattcccacctaataaatattggtcagactggttgtctgctctcaaaccctgtctcctgataagatgttttcaatgacaatgcatgcccgaaacttcattagcaattttaatttcaacccggtcctgagatcttgccctgcctccatttgtcttgtgatattttattaccttgtgaagcatatgatctctgtracccacaccctattcgtacactccctccccttttgaaaatcactaataaaaacttgctggttttgcggcttggggggcatcacggaacctgctgacatgtgatgtctcccccggacacccagctttaaaatttctcttttgtactctttccctttatttcccagactggccgacacttagggaaaatagaaaataacctayatgaaatattgggggtgaatktccccygatattgttattagctataaattagttaaattggggatcatgtactaatgtgacgatttgattatggaataattgaactatagccattcttcctggcagtattaaatagtgctatctctatgtgrttggtatatagaaaacaaggcaatttttaaaagtagtaggattaatatttatcttgtatattaaattggtacgtgaaattaagtctgctttacaaattaaatctagtctagtatcttcattttgtgtctggaattggttcctgccagtgggttcgtggtcttcctgacttcaagaatggagccgcagaccttcgcggtcaatgttacagctcttaaagatggcatggacccaaagaaagagtggtagcaaggtttactgtgcaaagcaaaaggacaaagcttccacagcatggaaggggacccgagcgggttgccgctactggctgtggtagccagcttttattcccttacttgtcccctcctgtgttctgtttctgtgctatcagaatgcccctttttcagtcctccctgcaattggctacttttaggatcctgctgattggtgtgttttacagagcgctgattggtgcattttacaatcctcttgtaagacagaaaagttctccaagtccccattcgacccaggaagtccagctagcttcacctctcaatttcatagatgrggatactaatacttttgagaarttaaatgatttaatgaaggccacctagttagtactgtgatagaattaagactggaacacaaagctcccatttctccctcccaccccgcaagatgtaaaaagtaacatatgcccttgtagataatttgaaaaatgctgaagaaagagaaaatcatttataatggcacaatccagagataaccccacttaacattttggtaaattggactgaggcctcatggaggaagctcatattattactgatttgagaatgtttacctgtaattttctttcttgaatgatttttgggtagttattttgctaataatttattctattttgtgtagattttcaaatttatgagtataaagttgttcacagcggcctcttaatatcttcytaggtctgcagcatctctgttgcttcttttgtcattactgccattggttatttgtgcctctccctttttcttcagcaaaggtttatcaactttattaatcttttttaaagaacccactttagctttaccacttctctctgttatatacttattttctattttattaatgtttttcttaatttattatttcctttcttctatattatattaattgtgctgtttttcccctaccttattgagctaaatgcttagctcatttttgtctttctccctaatagatgaatttagaatgtacgttttcttccaagatctgcattctctgcattctacaaagctgtttttaaaaccatgcactcataagtaatttggaagtaaatttctgaatatatgagacttttaaagttacaaatatgcttactaatttctagcatagctgtattgtgtgcaagtggcatgcggtatgtacttctartctttttaagtttattgaaatttcagttggtcagtttttataagtttttttttttttttgagatggagtctcgctctgtcgcccaggctggagtgcagtggcgcgatctcggctcactgcaagctctgtctcctgggttcrtgccattctcctgccttagcctcccaagtagctgggactacaggcrccggccaccatgcccggctaattttttgtatttttattggagayggggtttcaccatgttagccaggatggtctcgatctcctgacctcatgatctgcccgcctcrgcctcccaaagttctgggattacaggcgtgagccaccgtgcctggcctttataagtgtttcatatgtgcttaaagaaaatgtgtcctcttcaattgttggacagaattttatatattttaggtcaaggttgttaatcatgttctttaaatctcctaaaactttaccgcttttctgtctgcttattcattttgctgagagatgtgttaaaatctactataaatatgcatttattcctatcttgtggttttgttaattttgttttatttatttgtgcttacaagtttaaaattattatatcttcttggtgaattgatctgttgatcattaggaagtaaccctttttgatttctaacagtgcttctgcagtgtactttctctggcattaatatagttttattagctttctttggttggcatttgtacagtcttatctttttacttcaacttttctgcatagttacgtttcagatygttcttccaaatacagtgatgcattgattaayaatgaagatgcattcaatatattgctaggcaatttcatcgtcgtgcaaacatcataaagtgtacttacacaaacctagatagtttttttktttttttttaagactgactttcactcttgttgcccaggctggagtgcaatggcgcaatctctgctcactgcaacctccgttctcccgggtttaagtgattttcctgcctcaacctcccaaatagctggaattacaggcatgtaccaccatgcctggctaatttttgtatttttagtagaggtggggtttcaccatgttggccaggctggtctcraactcctgacctcaggtgatccatcctccttggcctcccaaagtgcagggattacaggcgtgagccaccacacccggccacaaacgtagatagtatagcctagaacatatctaggctatatggtatagcctgttgctcccaggctacaaagctatatagcctgttactgtactgaataatgtacccagttgtactgcattggtatttgtgtatctaaacatatctaaatgtagaaaaggtacagtgaaaatatggcattataatcttatgggaccaccatcatagtttatgtgtggtccattgtagaccgggtccgtygtagaatgttacgtggcacatgactgtaaaacatagttggatttttaaaaatacagcctgacaatttctgtgttcactagaactttcacttcatttatacttaatgtaattactggcatgtttgtgtttaaattcacaatcttactatgtgctttttatttgttccttttgttctttgctcctttttctcctttcttgtgtcttttgaaatgaattttttcattcagttttttccctctagtcctaaractccatattctgtttctattcttttgctagttactctagaaattacaggatgcrttcttaacttatttcacttattgaagccttatgagggtttacattctttgtagacaattcaagaaccttttgtattgctttttaactcccttcctgcttataatatatccttctatggtaagcctatttttataaccctggaagacattattattttacagagtcaatgcttacttagatttacccatatgttactttgctcttcgtttcttccttcctctcttacattccatttgagatcattttccttcttcctggagaatctccattagaatttccttggtatsaatctgttagtgttgtaatgttgtcttttgtttgtctaaaaaagcctttttttttcattcttttttaaacttttagtttcaggggtacatgtgcaggtttattatacaggtaagttgtgtgttgcttggtttggtgtacagattattttgtcacccaggtaataagtatagttcccgataggtagttttttgatcctctccctcttccttccttccactcttaagtatgctgtggcatctattgttcccttctttgtgtccatgtgtactcagtgtttagcttccacttataaatgagaatatgtggtatttggttttctgtttctgccttagtttacttaggataatggcctccaactacatmcatgttcttgcaaaggacatgatctcatttttttggctgcatagtattctgtggcatatgtgtaccacattttctttatccagtctattattgatgggcatctaggttgattccctgtctttgcaattgtgaatagtgctgcagtggacatacgcatgcatgcgtcttcatggtataaygatttatattcctttggccatatacccaataatgggattgctgggttgaattgtagttctgtttttattttgtttcattcttttttttttgagactgagtcttgctctgttgcccaggctggagtgtagtggtgtgatcttggctcactgcaacctccgcctcccaggttcacgtggttctcctgcctcagcctcccaagtagctgggattacaggtgcgcaccaccacatctggctaatttttgtatttttaggagagaagggtttcaccatgttggccaggctggtcttgaactcctgacctcaagcartctgcccacctcagcctccaaaagtgctgggattacaggtgtgagcccagcctattttgtttcattcttgaaaggccgttttgctgtcttttagcaggtagacaggtaggtagagcatggcagtgttttctttcagcaccttgaggattatagtcttctggtctctactgtttctgttgagacgtaaactgctaatttactgttggttctttgaaagttatatatttttttctcttagttgcctttgagatttttttcctttgtgtttctgaagttttgctgtgtttggtctatgtatacatttaaaaaatctgcttgggagttttcaaatctgtaaattaatatctttcatcatttattgaaaaatttcagctgtttcttcaaatattgcctctgccctgattgaccttataaaacaaataaatatgtttcagactttctgactttatttctgtgactaataccttttgccatgttttctatctttttttttcttttttctttttttgagacggagtctcgctctgtcgctcaggctggagtgcaatggtgcggtctcggctcactgcaagctctgcctcccgggttcgagccattcttctgcctcagcctcccgagtagctgggactacaggcacctgccaccgtgcctggctaattttttgtatttttagtagagacggggtttcactgtgttagccaggatggtcttgatttcctgaccttgtgatccgcctgcctcggcctcccaaagtgctgggattacagacgtgagccaccgcgcccggcctttttttttttggtgggggcagagtctcactctgtcacccaggctctggagtgcagtggagcaatctcagcttactgcaagttccacctcccaggttcaagcgattctcctgcctcagcctcccgagtagctgggattacaggcatccatcaccatgcctagctaatttttaaatttttagtagggacagggtttcgccatgttggctaggctggtctcgaactctgacctcaggtgatctgcccaccttggcctccgaaagtgctgggattacaggcctgagccaccttgcccggccccatgttttctatctttttatccttttgtgcaacattctagatgtttttttctaatcaatttgcaaatcctatattcagccatgtctaatttgctgttaaagccatccgtaagttcttagttttggttgttacactggttctttcatgaggtcttttttccttgtgtgatagatattgttgactttgtgtatttgaaaaaagacttttaggaataacctaaggcccaagatggtggtatcttacccaaaagggaattttaatttaattaggtgacatgtcttggggattttactgtttagggaagacattaattcaagcscaaggcttgaaattttctaaaccatctaaatgatgcaaagacagatgcgaatctctacaagtggccgggcgccatggctcatgcctgtaatcccagcactttgggaggctgtggtgsgtggataacctgaggtcaggagttcgasaccagcctggtcaactggtgaaacsctgtctctactaaaaatacgaaattagctgggcatagcgtcgtcccagctactcgggaggctgaggcagaagaattgcwtgaacccgggaggcagaggttgcagtgagctgagatcgcgccactgcactccagcctgggcgacaagaacaaaactcccatctcacatccacacccccacacacacacatacaaaatctctataagtgtgttggtttaattctaggtctctaatgttatgtggattaatcttcaagatttcagtttaaagtgttgggtagtttattggagtcccatcttttgtcagatggagcactttcatttttgttcctctagatccaagagaccatcaaaatgcagctcagttttaccctcactcttttagattagcaaatgctgttaggacaaattggcattcagtgctgagcacagccttatgttctccttttctcttagattttggcccactaattcctcacagtattttttatttttttagctctttgagtgtttttacatctatgttcrttaagaatattaatctggggccgggcgcggtggctcacgcctgtaatcccagcactttgggaggccgaggcgggtggatcatgaggtcaggagatcgagaccatcctggctaacaaggtgaaaccccgtctctactaaaaatacaaaatattagccgggcgcggtggcgggcgcctgtagtcccagctactggggaggctgaggcgggagaatggcgtgaacccgggaagcrgagcttgcagtgagccgagattgcgccactgcagtccgcagtccggcctgggcgacagagcgagactccgtctcaaaaaaaaaaaaaaaaaaaaaaaaaaaaaaaaaaaaagaatattaatctgtatgggctgggccgggtagctcacacctataatcccagcagtttggaaggccaaagcaggcagatcacttgaagtcaggagttcgagaccagcctggccaacacggtgaaaccctgtctctactaaaaatacaaaaattagccaggcatggtggcacacgcctgtagtcccagccacttgggaggttgaggcactagaatcacttgaacccaagaggtagaggtggcagtgagctgagatgatgctactgcactctagcctgagtgacagagtgagacgctgtttaaaaaaaatacatatatttatatgtttttttcccccgttgtactgtttttgtcgagttttggtatcatgctaagatgttttttgtatatttcatgaagctttttgtgttttaaatttagatcctatgattcattttgagttaatttttgtgtaaaatatcagattagattttttttttgatatatgaacatccagttgttccaacaccatttgttgaaaagctgccctttctccattgaattgcctttgtacctttgtaaaaaatcaattggctatatttttgtgggtctatttctggaatctgtattctgttgcactgatctatgtctctatccttttgccacaataccactgtcttgattattgactttatggtaagtcttataattgagtagtgtgattctttgaactttattctctttttttacaattgttttagttattctagttcctttacctttccatttaaattttaggatcagtttgtccatagctacaaaaaaaatcctactgggaatgaacttgattgcctttcttttaaatctgtagatcaatttgtggagaagtgacatctttgagtcttccaattatgaacatatgtctatatttatttagatcttctttgatttttcatcagtgtttatgcayatagatctgatacatgttttgttagaagtatttaatttttcagacctatgttaaaatggtatctttttaaacattttattttccaattgtttccagttgttcatggctgcacagaaattctgattttgtatcctgtgaccttattagcactaggcttcttttttttttttgtaaatctcttgggattttcagtgtagatatccacactagctgcaaattagacagtttgaattcttcttttccaatgtatgtgttctttttttttttttccttattgcagtactaggttttttttttatagatgccctttataaggctgagaagattcttttttattccttgtttgctgaaagttattatcataaaggaatcttgagtattgtcaagtgctttttctgtatgcattaatatggttatatattttttctttaaattattaatgtgtggattgccgtgattgagttttgaaaattgaatcagtcttgtagtaccagtataagccccacttcgttatggtatattattgtttttatttgtggctggatttgatttgctaatattttattgagtgtgtttgcatctgtgttcattaagaatattttttattatgttttttctcctgtactgtttttgtctggttttggtatcattgtaatactagcttcatgagtttggaagtattttgtccttttctttttttttttcagacggagtctcactgtgtcacccaggctggagtgcagtggtgcaatctcagctcactgcaagctccgcctcccgggttcgcgccattctcctgcctcagcctcgtgactagctgggactactggtgcctgccaccacgcccggctaatttttttttgttttttagtagagatggggtttcgccatgttagctagtatggtgtcgatctcctgacctcgtgatctgcctgcctgggcctcccaaagtgctgggattacaggcgtgagtcactgcgcccggccgtattttgtccttttctactttctstcaggattatgtagaataggtgttatttcttttttaaatgttagtagaatttataagtgaaacaatctgggcctggagttttctttttcagaagggttttaactatacgtttaatttatttaatagttaaaggactatcctagtaatatgtttcagcttgggtgtgtttttactgtttttgrttttagaggaattggtctttttcatctgtttcatttttataggtttgcgtatagagttgtttgtggcatttcgttattatacttttaatgtgtgcagggttagtactgatacccctcttttattcttgatattggtaatttgtgtcttttctctttgcctatcttgctgaagtttttatgttatattgctcttttgatttcattcatattcactcttggttttctgttaatrtcattgatatctgcttttttattgtttcctgccttctatgtgatttggaatygttttactcttctttttctaattgattaagatggaaacctatgttattgatttggggagtgcccacacttctttaaacatttttctactagccattttaacatctttgtcagttgatttcaacatctgtgtcttgttgtctcttctcttgcaagttgagattttcttagttctttatatgagtaattttggattatgcctggacatttaaaaatattacgttatgygactctgggccttttgtaaatcctatggagaatgttgatatttttgttttagcaggaattagagctggctgggttganatggaaaggtttgaccaaccttctgtatattgtagtttccatgtaagttccattttcaaagcctttgcagtgctagctgaatatactctatcctgtgatgtgccactgagtggccagtatggaacctgggcagtggtctcaaggtctttgctctgctgtttaagcttaarattatgcttgcacagcctggggatgagcccgggagtttacaagcaagtttgttgagttgcctttccagactcctctttctgtgactttcctggtactttctggttttctggctggaaaaccagtcacttcctgtgactgtacctgtctatattcagtgccaaagtacctgtagagaaagaaaaagagcaacgtggatccactctactctcttggggtcatggcacctcagagtagaactgtggaattatttgggggctgtgatatcagaaaatagagaaaagggaaaaaaaagataaagggagaatttttcctccctttctgtgaacattaagagtctcctttcccattccttgagccaaaagtaaatggcttctcctggagctctctgtttttgctgcttggtttaggcctgacagtccaggcctaacttagttcagtaaaatgggaaactctgctagaatagtgaacttcaaactccattcttcttaccgcatttatctgctayaattcaccttattaagagtcctcaaatagctgttctgtgcwttctgtttatgttttatggctgcatcaagtgggagagacatcactgtggttactttattttacttggaactggagctatgatgtcatttttcataccatcaaaaaggacctagcaacaaatctaatgatatatgtgtaaaactcctataagcaaaattaataaactttattgagagacttaaaggagataaatactatgttcatggactggaagattcactactgtaaaaatatcaaccatttccaagcttatttatgtatctttgatgcattcccaatcaaaattttaagagaattttgtggaatttgatagaatgatgctaaaattttatggagctagatagtgccaagaatagataaggcaatattgaagagcaataaagaagacttctaccagctcaagacttataaaagttgtagtcattaagatagtgagatggcagtctgaggacaaatacaccaaaatcagcaccagaaagagacccacacatttgttgatgtttgatttatatcacaattggcatggtagagtaacaggatggttgatcttttcaatcagtggtgctgggacatcttgttatctacataggaaagaaggaagacttggtccctatctcaccccatacataaaaattaactccaagtagattagagatgtgcaagacagaacaatacatattttagaagggagaattcagaggaatacatgtagaggaaaatgtattgctaaccttgaggttgcaaaagatttcttaaawcatcaaatttttttttttttttttgagatggagtcttgctttgtcacccaggctggaatgcagtggtgcaatctcggctcactgcaagctccgcctcccaggttcacgccattctcctgcctcagcctcccgagtagctgggactacaggcgcctgccaccacgcccggctaattttttgtatttttagtagagatggggtttcaccacgttagccagggtggtctcaatatcctgaccttgtgatccgcccgcctcggtctcccaaagtgctgggattacaggcataagccaccatgcctggccaaattgttttattttcctctaatttgatctttcttgagagtgtctrtaaactctctggagagtggctgttaactgtatgtctgtcctgatggggctccagggattattgtggagctgggatatgaccatatgagatggtcatggatgtttacagtctgtctttcatgagatagttttttatcttggtagatgtcctaatgcttaaatgtcagacctatggccaggtgttcttctcacaggaaacttayactggcagatacccttgtggttcttgtcctatccgtgtccagtttatttgaccaagacagccacgctctaggagaaccctgaccaagcggagaattaggttcaggtgtgttggtcaggtgagctacagaggagatggtaaaacaaaacgcatgaaataacaagcagttttaatttcagattttagagagaagagaaagtagcacaccttgcaaggtcaacaggaagaggggtgccacctaggacacgcaagtgcaaccagtggatgggatgaaagagaaaggacctagggaactaaagcctttaytggggtccagggtgttcttaaccaagcaagtttcctatgaggagttctaatttgtaggttggagcaagcaggcatgagtcatgctgtgactaagaggtggtcactgaggcatatctgtgcagggtttggggtcattagggtgagtcaggtagattctacctagctctcctaaaaggaggtgataaccaggaggtggttgtaaaaggcaggtatcttgattgaccacattgaggacctgggaggaaatggagaactaaaaactgtgtcaagggtgactgagccctgattcttgaatgagaaagtcagacttatacttgaaacgaatgccaaggcaacctaaaattataggaattcactacacaaataaaccacaattgcagatagaaatattttggatattgtgagccaggtttctcattattgaagaagagagttacaagtgtagaaagtgggaaggcagcygggtgcaatgggtcacacctgtaatcccagcactttgggaggcygaggcgggcagatcacgaggtcaggagattgagaccatcctggctaacacagtgaaaccctgtctctactaaaaatacaaaaaattagctgggcatgttggcacgtgcctgtaatcccagctacttgggaggctgaggcagaagaatcgcttgaacgtgggaggtgaaggttgcagtgagccaagatggcaccactgcactccagcctgggtgacaaagcgagactccatctcaaaaaaagagaaagtgggaaggccagaatgaaccttgtcaatataattgcattagaggcattagtgtgacctcatagatgtgtatgtgtctatacacatatgaatatattacatgtttatatgaataatgtgtgtatgtatacatgcatatatttgtgtatatttaaacagacatagagcagtgatgtataggtatagagatatgtagatatgatasggatgtttgtattggtgtgtctttgatcctaagccctttcagtggacagttgaaaatagatrtgtgtgtgtctgtctatagatacatacataaacatacacacacatttgttttcctaactgtcagctgagaggcstagaagcagtgatacccctgtagcagtgaacacaactggcatctagatcttggtttctaaatacctttgtccactaaaaggaaccactatttcttggaggaatagctgattttaggctggagcatgaaaaatgagatgaatctggaatttcttgtgccagaaagtaaggaattgctcaaagaatggtcatagcatgtcataatgacactggagctagcttaaaggtcttccactggccaaatctgggacaatctgggtatgaaaataaatgatagtggattataaccctttgaataagataaaaatccatgaatttttactgatataaataagtacacaaataaggaacgctcttctttacagagggaaactgacaaatgatgcaacgatggaattagaaaattgccatttggcagccatcatagtartactaaaactaatggatgaaagtttagtaaggaacaggatatttacataatctcaaaatatattcccacagtatacttattaattataaaggaaaaacaacatagaggagaaacctggaagatactatctgcatttgctgtccaaagtaaacatcatcagagatggggcaaattaacagaagtgccacctgataaaaygcaataagaacattgctacatttctgtggtattcctgccccaaacccataacctaaatctaattgagaggaaacatcagagaaacctgcattttaagatattctataaaataactgatctgtgttcttcaaaastgttaatgccatgaaagacaaagaaagagtgaagaattattccagattaaaggagtctaaaaagacatagctaaacacttaatctggaattttcttttactataaaggacactattgcagcagytcaagaaatctaagstctatagataatagtattttatcagtatccattgcccgatcttgataattgtactgtggtcatataagacatttttaaggggaaacattaaagtattaaggaataaaaaggaatcatgcctgcaactttcaaatggtccagaaaaaaatatatgtatgtatayagagacaagggtaaagcagatgtaaaatattaacatttggggaatgtggtatacaggaactttttataactttgtataactgtataaatttacaactttttgtaagcctgaaattatgtcaaaataaaaaactaaaagtaaaggaagtactgtatcataaaaggagattaatgatagattggactactttaaaattaggaacttcctcaaagatagcrttaaaagtgaaatgcaagttgtggagttggagaaaagaattgcaacatctatatttgacaaaggactagtatccagaatataacaatatctacaaataagaaaatgataacaataacggatgaaatatttgaacaggtgcgtcacaagagaaaatctaaatgaccggtaaatatttgaaaaggagccatagctcattaataatcacaaaaagacagattgaaatcaggagattctattatatacctaacagatttgcacaaaattacttactctcacatgtatctggtgatggcaaggatgtccagtgatgggaattctcatgcactgctagtgacagtataaattggtacaactattttggaaaacaatttagcattaatgccaaaatttaagatacgcctaacctgtgatccatcagttcctcttttgtgtgtatattctagagaaatgcatgcacgtatgcgagatttccctacaagaatgttcatagcagcattgtatgtaataggcaaaatgtccatcaacattagagtggataaattgtggtacataccagggaatattaataagaaatgaaagtgagtgaatcacagttacatacaccaggataaacttctgacctaatgttcagagaaagagacacaaaagcatacagtatgattccatttacataaagttcagaggggaggcaaaactaaaccatattgtttaggcatgcatacagaggttgaaaaactacaaagaaaaataagggggtgatttcccaaaaagggtagtggctacttttgcttgagacggagaagtgtaatttggaagggacagataatcttttgagttgctggaaatactcttctcttcttgggtggtggttacacatgtactcactttaatttattctttgtggaggatgttttaggtacacctctgaatttaaaacattgtcttagtgggttttgtgaggttttatgagggattatgtaggtgcatgtttgtctgcttttttattattattattatactttaagttttagggtacaygtgcacaacgtgcaggttagttacatatgtatacatgtgccatgttggtgtgctgcacccatcaactygtcatttaacattaggtatatctcctaatgctatcccacccccctcctcccacctcacaacaggccccggtgtgtgatgttccccttcctgtgtccatgtgttcttattgttcagttcccacctatgagtgagaacatgcggtgtttggttttttgtctttgcgatagttagctgagaatgatggtttccagcttcatccatgttcctacaaaggacatgaactcatcattttttatggctgcatagcattccatggtgtatatgtgccacattttcttaatccagtctatcattgttggacatttgggttggttccaagtctttgctattgtgaacagtgccgcagtaaacataygtgtgcatgtgtctttatagcagcatgatttataatcctttgggtatatacccagtaatgggattgctgggtcaaatggtatttctagttcaagatccctgaggaattgccacactgacttccacaatggtcgaactagtttacagtcccaccagcagtgtaawagtgttcctatttctccacatcctctccagcacctgttgtttcctgactttttaatgatcrccattctaactggtgtgagatggtatctcattgtggttttgatctgcatttctctgatgaccagtgatgatgagcattttttcatgtgtcttttggctgcataaatgtcttcttttgagaagtgtctgttcatatccttcgcccactttttgatggggctgtttgtttttttcttgtagatttgtttgagttcattgtagattctggatattagccctttgtcagatgagtagtttgcgaaaattttctcccattctgtaggttgcctgttcactctgatggtagtttcttttgctgtgcagaagctctttagtttaattagatcccttttgtcaattttggcttttgttgccactgcttttggtgttttagacatgaagtccttgcccatgcctatgtcctgaatgttattgcctaggttttcttctagggtttttatggttttaggtctaacatttaagtctttaatccatcttgaattaatttttgtataaggtgtaaggaagggatccagtttcagctttctacctatggctagccagttttcccagcaccatttattaaataagaaatcctttccccgtttcttgcttttgtcaggtttgtcaaagatcagatggttgtagatatgtggcattatttctgagggctctgttctgttccattgrtctatatctctgttttggtaccagtaccatactgttttggttactgtagccttgtagtatagtttgaagtcaggtggcgtgatgcctccagctttgttcttttggcttaggattgacttggcaatgcaggctctgttttggttccatatgaactttaaagtagttttttccaattctgtgaagaaagtcattggtagcttgatggatggcattgaatctataaattaccttgggcagtatggccattttcacgatattgattcttcctacccatgarcatggaatgttcttccatttatttgtatcctcttttatttcattgagcagtggtttgtagttctccttgaagaggtccttcatgtcctttgtaagatgaattcctagatattttattctctttgaagcaattgtgagtgggagttcactcatgatttggctctctgtttgtctgttattggtatataagaatgcttgtgatttttgcacattgattttgtatcctgagactttgctgaagttgcctatcagcttaaggagattttgggctgagatgatggggttttctggatatacaatcatgtcatctgcaaacagggacaatttgacttcctcttttcctaattgaataccctttatttccttctcctgcctgattgccctggccagaacttccaacactatattgaataggagtggtgagagaggrcatccctgtcctgtgccagttttcaaagggaatgcttccagtttttgcccattcactatgatattggctgtgatatgacagaccgtcatagatagctcttattattttgacatacaacccatcaatacctaatttattgagagtttttagcatgaaggttgttgaattttgtcaaaggccttttctgcgtctcttgagataatcatacggtttttgtctttggttctgtttatatgctggattacatttattgatttgcgtatgttgaaccagccttgcatcccagggatgaagcccacttgatcrtggtggataagcttcttgatgtgctgctggatttggtttgccagtattttattgaggatttttgcatcratgttcatcagggatattggtctaaaattctctttttttgttgtgtctctgccaggctttggtatcaggatgatgctggcctcataaaatgagttagggaggattccctctttttcttttgattggaatagtttcagraggaatggtaccagctcctccttgtacctctggtagaatttggctgtgaatccatctggtcctggatttttttggttggtaagctattaattattgcctcaatttcagagcctgttattggtctgttcagagattcaacttcttcctggtttagtctttggagggtgtatgtgtcgaggaatttatccatttcttctagattttctagtttatttgtgtagaggtgtttatagtattctctgatggtagtttgtatttctgtgggatcagtggtgatatcccctttatcattttttgttgcatctatttgattcttctcttttcttctttattagtcttgctagtggtctatcaattttgttgatcttttcaaaaaaccagcttctggattcattgatttttttgaagggttttttgtgtctctrtttccttcagttctgctctgatcttagttatttcttgccttctgctagcttttgactgtgtttgctcttgcttctctagttcttttaattgtgatgttagggtgtcagttttagatctttcctgctttctcttgtgggcatttagtgctataaatttccctctacacactgctttgaatgtgtcccagarattctggtatgtcatgtctttgttctcattggtttcaaagaacatctttatttctgccttcatttcgttatttacccagtagtcattcaggagcaggttgttgagtttccatgtagttgagcggttttgagtgagtttcttaatcctgagttctagtttgattgcactgtggtctgagagacagtttgttataatttctgttcttttccatttgctgaggagtgctttacttccaactatgtggtcaattttggaataagtgcggtgttgtgctgagaagaatgtatattctgttgatttggggtggagagttctgtagatgtctattaggtctgcttggtgcagagctgagttgaattcctggatatccttgttaaccttctgtctcgttgatctgtctaatgttgacagtggggtgttaaagtctcccattattattgtgtgggagtctaagtctctttctaggtctctaaagacttgctttatgaatctgggtgttcctgtattaggtgcatatatatttaggatagttagctcttcttgttgaattcagccctttaccattatgtaatggccttctttgtctcttttgatctttgttggtttaaagtctgttttatcagagactaggattgcaacccctgcctttttttgttttctatttgcttggtagatcttcctccatccctttgttttgagcgtatgtgtgtctctgcacgtgagatgggtttcctgaatacagcacactgatgggtcttgactctttatccaatttgccagtctgtgtcttttaattggagcatttagcccatttacatttaaggttaatattgtcaggtgtgaatttgatcctgtcattatgatgttagctggttattttgctcattagttgatgcaatgtcttcttagcctcgatggtctttacaatttggcatgtttttacagtggctggtactggttgttcctttccatgtttagtgcttccttcaggagctcttttagggcaggcctggcagtgacaaaatctctcagcatttgcttgtctataaaggattttatttctccttcacttatgaagcttagtttggctggatatgaaattctgggtgaaaattcttttctttaagaatgttgaatattggcccccactctcttctggctcttgtagagtttatgccgagagatcagctgttagtctgatgggcttccatttgtgggtggacctttctytctggctgcgcttaacattttttccttcatttcaactttggttaatcagacaattatgtgtcttggagttgctcttgtcaaggagtatctttgtggcgttctctgtatttcctgaatttgaatgttggcctgccttgctggattggggaagttctcctggataatatcctgtagagtgttttccaacttggttccattgtccctgtcactttcaggtacaccaatgagacgtagatttggtcttttcacatagtcccatatttcttggaggctttgttcgtttctttttattcttttttctcttaacttctcttcttgcttcatttcattcatttcatcttccatcactgataccctttcttccagttgatcgaatcagcgactgaggcttgtgcattcgtcatgtagttcctgtgccttggtttttagctccatcaggtcctttaaggacttctctgcattggttattctagttagccattcgtctattttttttttcaaggtttttaacttctttgccatgggttcgracgttctcctttagctcggagtagtttgatcgtctgaagccttcttctctcagctcgtcaaagtcattctccgtccagctttgttccgttgctgatgaggagctgctttccttyggaggaggagaggcgctctgatttttagagtttccagtttttctgctctgttttttccccatctttgtggttttatctacctttggtctttgatgatggtgacgtacagatggggttttggtgtggatgtcctttctgtttgctagttttccttctaagagtcaggaccctcagctgcaggtctgttggagtttgctggaggtccactccagaccctgtttgcctgggtatcagcagctgaggctgcagaacagcggatattggtgaacagcggatcgttcctctggaagttttgtctcagaggagtacccggccatgtgcggtgtcagtctgcccctactggggggtgcctcccagttaggctactcgggggtcagggacccacttgaggaggcagtctgtccgttctcagatgtccagctgagtgctgggagaaccactgctctcttcaaggctgtcagacggacatttaagtctgcagagggttctgctgccttttgtttagctgtgccctgcccccacaggtggagtctacagaggcaggcaggcctccttgaactgaggtgggctccacccagttsgagcttcccaccgctttgtttacctactcaaggctgggcaatggtgggcgcccctcccccagccgcactgccaccttgcagtttgatctcagactgctgtgctagcaatgagcgaggctytgtgggcgtaggaccctccgagccaggcgcgggatataatctcctggtgtgctgtttgctaagaccattgcaaaagcacagtattagggtgggagtgacccgattttccaggtgccgtctgtcaccgctttctttgactaggaaagggaattccctgaccccttgygcttcctgggtgaggcgatgcctcgccctgcttcggttcacgttcggtgcactgcatccactgtcctgcatccactttccgacactccccagtgagatgaacccggtacctcagttggaaatgcagaaatcacccatcttctgcgtcgctcactctgggagctgtagactggagctgttcctattcggccatcttggctccaccccccttgtctgctatttttaatgagaatctcaagcctttacaaattaaaaaaatacaaacaaaaacttactgtccacttctctctctctcctcctrtcctagcaaaatataagcacatgtggcaggatcctgtgtgtattttctaccacattatgccctgtgtgcctggtctagagtaactgctcaacagacatttgttgacttaatgcttagcagttatcgtattatgaatagttgttgaataaagagttaaaatggaagttgggtgcagtggcatgcctgtagtttcagctacttgggaggctgaggtgggaggatcacctgagcctaggagtttgagtccaactaacatattgagaccccatctcttaaaaaaaaaaaattaaaatggaactagtcaaggcagattaccttagtaatgggaaatttattgtaaggatatagaaaagagaatagtagacaaatcttccaagagtcttgtaacacaagttgtagtacagctgagcctsagttatcagggactcatttctgtggactgcttactctttctagtgggctatgtggtctcttacagtgtctgttcctctttttgtgttgggtctattaaaactggcttacatgagaatcacagtgacttccctggcctctgtgtacataaagccattttggctttagtgcctgttaatacctgctacatttcttgattttactagttgaatatctaggaagtagaatctgacccagttcactcttttaagccagaccacatcatagcttrctggctagcctatggcttttggtattaaattcttggtctttggaatcaagtgtcaacgccagatccagtcagttttatactgttgatcacgtggtytgccagggctgctctttcagaaggactgtagatggggcacttttctctagaaaggcctgtgaataagatgaacaatacatttgacatgataaagcataatttttctattatgtgttgtttagattgtttgcttttttattgctttacataatggtgcaataaacatcttaatactaattgtgatctttgtttrcatgtctggatgttttcttagggtcgagtcctaaaaagagatttactgaatcaaagtactctatttaattctctttatagtctcttaattcataatatcraattattttccagaaaagttgtatggtttgatgctgtaccatactctagctcattgctttttctatactttattaaaggctgaaaaaaagtacatttagctatctaatgctcaaaagccttgcaatcacatattctgggttccaagcaatcacagataactttagtaactgctatcactgtatgcatcctgttttgctctctttcctcccagaattctcattgtactccttaccctaatttcatggccaaatccacattttctttgaagccctgctctgtatatccctaatctttgtaccagttttgcttctagtcagggcaagaggcaaatgtactgaagtaagagcaaggtttattttaagatacacaataaaccatcaaggaagagcaattggacttcagagtaattggaaatagaaagctggtagtatcaactgctttgttttagggattttatgcattgttttcttacaggtctttcttgtctttgggcatctgatctatttgcttctgaaacttgtgagttcctcttcaagttgcacatgattcttaatagttgccttatttctgaatatgcatgacttttcagctccactctttctggtaactctgggtcttttggtttaaatttcccggagtagactttgattggcttagctcatcttttccagctggttattagccaccgtcatttccagatggttattagtcattattctggaccatcctctaattctgccatctgtgaggaggggaaacatcacaaagtaaagaacatactgtgcctgcttacctacggctctatgtaaaatagtgcacactggattatttaatcttttggagactttttgaagcaaatttgtgtacagccacagaaatacagtgtaaaaaaggggtctcaaatgatctagctgaaatctttcatttggctgctgaaggaaacatctataggaagattgtgatatacccattgttacagtgttagctcctctagattctcaggaatatgctctttccatcatactgaaggtgttggaagtttaattacagtttaatagtwtaatcacaatttaatagtttaatcatactatttgagcaaagtytttgggacactgttacgactatttccctcaaaatatcaacatttagattaaatggttttccagaaatttccaatagttacaaaaataatttgaagttgtcataaatattaatttatgttggtatatatgacataatatacaattaactttaaaactttcaaatgtaaaatgtattaagaacaaattgagaaayagtattgtggctgggtgtggcagctcacacctgtaatcccagcactttaggaggttgaggcctgtaatcccagcgctcctggccagatcacttgagcccaggagttcgagactagcctggacaacatggtgaaatactatctctaccaaaaaatacaaaaaattaacagggtgtggtgcttgcacctgtggtcctagctatttgggaggctgaagtgggaggattgcttgagtctgggaggtggcagttgaagagagctgagattgtgccactgcactccagcctaggggacagggtgagacctcatctcaaaaaaaaaaaaaacccctaaacaatattgggtcatcaccatcagagtgaacaggcgacctacagaatgggaaaaaaattctgcaacctactcagctgacaaagcactaatatccagaatctacaattaactcaaacaaatttacaagaaaaaaacaaacaaccccatcaaaaagtgggcaaaggatatgaacagacacttctcaaaagaagacatttatgcagccaaaaaacaymtgaaaaaatgctcatcatcactggccatcagagaaatgcaaatcaaaaccacaatgagataccatctcacaccagttagaatggcgatcattaaaaagtcaggaaacaacaggtgctggagaggwtgtggagaaataggaacacttttacactgctggtgggactgtaaactggttcaaccattgtggaagtcagtgtggcgattcctcagggatctagagctagaaataccatctgacccagccatcccattactggstatatacccaaaggtttataaatcatgctgctataaagacacatgcacacgtatgtttactgcggcactattcacaatagcaaagacttggaaccaacccaaatatccaacaatgatagactggattaagaaaatgtggcacatatacaccatggaatgctatgcagccataaaaaatgatgagttcatgtcctttgtagggacatggatgaagctggaaaccatcattctcagcaaactgtctcaaggacaaaaaaccaaacactgcatattctcactcgtaggtgggaattgaacaatgacaacacatggacacaggaaggagaacatcacayaccgggacctgttgtggggtggggggacgggggagggatagcattaggagatatacctaatgctaaatgatgagttaatgggtgcagcacaccaacatggcacatgtatacatatgtaacaaacctgcacgttgtgcacatgtaccctaaaacttaaagtataataaaaaaagttatttttatttctttagaagtagctattttaaaaagtagtattttacttcattatttgttatgaagcaaattgttacatactccaagcttttgagaataaatttgaggctaaaaggtgactgtaggtttttgtatatgttggccaggccatgggactgatttttacagtattgatttttttttttttttagagatttttgacaatgaatactttgaatggtttattcttagcactgacatataaatagttattaaaagcactgacatataaaatataagatataagatttttgatttccacttccggatctaccttttattgagaatgcaggcaagctggagatagagttggttttataatggttaattagagcaaataattaattattgcatattttgcttttcaaggtctcattttcctttcagatattactaccaccagtgaaaaaaacacgtttttcttctttatcagaggtatataaatagacttagtttggaccacaagtttgtttctctttagcttagtacttagaagtttgttatagctccatctattagtaaattatcaaaattggctagtttttttttagtaacattaaattactctttttaaagtctaaatttaaaattttacttttataaagaaagttctttctttcaggccagttgctgttttggagtagttaggaagaaatttgaaatcatcttgccttttaccacttactcataaacgcttagaacgttttcttaagttttcttctgttgtttttttcttcccatagatttttgtttttacatatttgtagtcaagctttgtcttatgtttccctcgacatagcacccacagctttgcgtttttctactgctcttgcataaattttgttaattttgcattttctgatatgagttgtttctaagaggaacagtccctttgattaccacacaagcagtcgttattaggttatttccaacatttccgtactcatcattgacttaggttaaacttttttgctgtaagctttcttcatactgtctagttcctttttcatgtatttattttgcttattcagcactctcgagtggactttgggcagttagaataactgaatcatgtcagtaaagtgtgttctcaatcatgtggacaaaagaacttattcaaatgctaccccttccctgcttttcttactgtagtgtggacttacatctcaatggtaggagttttatgtatcttggagttggcggtgccttgtggtggrtgggagttaataatggtaagggtttgtttgtaggtgtgaaaaactgcagaaagacaaatggaccaataatatgaatagtcagtttacagagaaagaaatataaatggctgataaatatgtgaaaagatgcttatcttctaataaaaatacaaattagaacagggagatgtcaggttttgttggaatggaaagattaaaacatttgataatgattggggttagtgagtaagtggagaaataggtacttttatacagcttggggctataatctttttggaagacaatttgcagttgcaattaattttaatcactgatccagcataytatatcttagaatttatcctgtagggattcttggacacatacgcatatatcatctatacatacatgttcatcgaagcattgtttgaaatagtaaaagactggaaacaaccaaaattaattatggcaaagccacaacatgaaatactaatactgtgcagctattaagaagaatgaatataaacagagccaaagacaaaaaccacatgattatctcaatagatgcagaaaaagccwttgacaaaattcaacaacccttcatgctaaaaactctcaataaattaggtattgatgggacgtatttcaaaataataagagctatctatgacaaacccacagccaatatcatactgaatgggcaaaaactggaagcattccctttgaaaactggcacawgacagggatgccctctctcaccgctcctattcaacatagtgttggaagttctggccagggcaatcaggcaggagaaggaaataaagggtattcarttaggaaaagaggaagtcaaattgtccctgtttgcagacgacatgattgtttatctagaaaaccccatcgtctcagcccaaaatctccttaagctgataagcaacttcagcaaagtctcaggatacaaaatcaatgtacaaaaatcacaagcattcttatacaccaacaacagacaaacagagagccaaatcatgggtgaactcccattcacaattgcttcaaagagaataaaatacctaggaatccaacttacaagggatgtgaaggacctcttcaaggagaactacaaaccactgctcaaggaaataaaagaggacacaaacaaatggaagaacattccatgctcatgggtaggaagaatcaatatcgtgaaaatggccatactgcccaaggtaatttacagattcaatgccatccccatcaagctaccaatgactttcttcacagaattggaaaaaactactttaaagttcatatggaaccaaaaaagagcccgcattgccaagtcaatcctaagccaaaagaacaaagctggaggcatcacactacctgacttcaaactatactacaaggctacagtaaccaaaacagcatggtactggtaccaaaacagagatatagatcaatggaacagaacagagccctcagaaataatgccgcatatctacaactatctgatctttgacaaacctgagaaaaacaagcaatggggaaaggattccctatttaataaatggtgctgggaaaactggctagccatatgtagaaagctgaaactggatcccttccttacaccttatacaaaaatcaattcaagatggattaaagatttaaacgttagacctaaaaccataaaaaccctagaagaaaacctaggcattaccattcaggacataggtatgggcaaggacttcatgtccaaaacaccaaaagcaatggcaacaaaagccaaaattgacaaatgggatctaattaaactaaagagcttctgcacagcaaaagaaactaccatcagagtgaacaggcaacctacaacgtgggagaaaattttcacaacctactcatctgacaaagggctaatatccagaatctacaatgaactcaaacaaatttacaagaaaataacaaacaaccccatcaaaaagtgggcgaaggacatgaacagacacttctcaaaagaagacatttatgcagccaaaaaacacatgaaaaaatgctcaccatcactggccatcagagaaatgcaaatcaaaaccacaatgagataccatctcacaccagttagaatggcaatcattaaaaagtcaggaaacaacaggtgctggagaggatgtggagaaataggaacacttttacactgttggtgggactgtaaactagttcaaccattgtggaagtcagtgtggcrattcctcagggatctagaactagaaataccatttgacccagccatcccattactgggtatatacccaaaggactataaatcatgctgctataaagacacatgcacacgtatgtttatcgcggcactattcacaatagcaaagacttggaaccaacccaaatgtccaacaatgatagactggattaagaaaatgtggcacatatacaccatggaatactatgcagccataaaaaatgatgagttcatatcctttgtagggacatggatgaaattggaaaccaacattctcagtaaactatcgcaagaacaaaaaaccaaacaccgcatattctcactcataggtgggaattgaacaatgagatcacatggacacaggaaggggaatatcacactctggggactgtggtggggtcgggggaggggggagggatagcattgggagatatacctaatgctagatgacacattagtgggtgcagcgcaccagcatggcacatgtatacatatgtaactaacctgcacaatgtgcacatgtaccctaaaacttagagtataataaaaaaaaaaaaaaaaagaaaaaaaaaaaaaagaagaatgaagtaatttcctctgtgctgatgtagaaagttcttcaagatacattgttaactaagtggaaaataagtggcagaattgtgtatagcatgatcccatttatgttaaaagaagatatataaaagatatacttttatatattgaacatttcaggaagggttcataggtaattattaagtaattgcttcctgggaatgaggaggggaggggtaagaagggtgaaaaggatgagaaggtgacttcattttcttatttaattttaaaatttaatatatgtgtgatttcctctatgaaaaagaaaatcttgttactgaaaacattaatattaaacattttatgtgccttatttaccttgtacatgatttcaatgtatatgtgacttgtgaaatttcttgcttaatcaggaacgtattaaggaaacctatttgtcctttttagaaattaataattctgagagtatcataaagagctagggttttaattaggtgactaaaatggagagaaggaatgggtgttttcctgggaaatctttgttaatctgtgttttgtcctcttggttgtaagatttttcatatgtcaacactggcctcttaagactttctataagatctcttggtacagccaagtaaccatcaaagcccagacaaccctgccttcctgttagtttttttgtttatgagcaaagatcacagcagaagtgaagaatttaaatgcaattaataaagagcaaaaaatttgagcaacagaaaacgaaackatagaaaaatgtcattagtaaagtggaaaaaacagtaaagagggctgagtttgaattatagtcatgtatttaccttgtgacataggaatttgattaaatcctgtgaaattcctttttcaaaaatattaargtgggattaataaccaacttctaggattgtggcagtcttgaaagaaagattaggaatatagaatgaaaatagtataatacttgtcacccagtaggtttttaataaatggtacctccttcttgtaattatttttctaactcttaataaaatgtaccttcttcagtagaaaagtagacatatttacattgatcaaaactcactcccagggagcggtgggagtttaatagtaacactcttgatatagtattcttggtaagattatagtactttgttaaacctctcaacatgcttartacaccttgatttatcaggttttgtttcttttttttggtctttgaagtttagacacttatcagtagttgtcaatgatctcaaactttgaccctgtaacttccgggatgttaaaacatccaactattctatagtaaatgctaatgtaattaatctattgtatgctatagtttcataggaaatgtggtcatgtttgtttaagctttttaaaagttttccttttgttactctccacttcaatttatctgagacataaaggaaatttgagaaattagaacagtgtttgtgggattagagtattagttttcttttctgaaaataatgtagttaagacaattatatataaaactaaagttagagaagactgaatgagtgtgttatgcctcttcacactgcattttaaaagacctctcaacatgcctaatactcccttatcagtgctttttttgtctcttaaatttagacgcatctgtcagtggttgtcagtgatctcaaaatttgcattgttcattaggacattaaaccctctagagcagcggtctccaacctttttggtaccaaggaccggttttgtggaagacagtttttctacagcgaggggtgaaggagagggatggttttgggatgattcaagcacattatgtttatcattagattctcataaagagcatrcagcctacatccctagcatgtgcagtttacaatagggcttgmgttcctatgagaatctaatgccaccgctgatctggcaggatgtggagctcaggcagtattgctcactcactcactgctcacctcctgctgtgaggcccagttcctaacaggccatggactggtagtaggaattggggacccctgctctaaagaaagcagcaatatctttattgtggtaatagtaccacagcaaagaaaagaaacacattcgcacaactttaaatacaatttttmggagttcagagacctactgaggccatctatgacttatgtctattagacttcaggttgaaaacttttagtttcaatgttcaaagcagagaatacttttctctttcctaataggatggatttggtctataagaataggattataacaagtgagggttaatatttttaaagttttttttggatgtaacagcttatgctacagaattatctctgagctgtgaattactaatatcagctaatcattctttatcatcagagaaacagtttagtccttttataaaacaaatcctcccacatgaatggaaggaaagcaatttttctaagactcttcctcttttcttgggccttctctgtgtgtaggggctgagccatatccttgatttcaagataaagtgttttataggtcagtactgttagaagagcagtacactcgtatattgtgctctggcacaggtcagctctacaaagaatccaaggagggataatccggtcaagggattccatttctccagaaaaggcttgcagtccttttccttgcctccctataataatcctgtggcctatctcccacatgtgaagaggttagtttactaactttactaacttagcttagtcagaagtatttcatttatctaacacaaaggagcccacatccatactctctggggtcaatttagtatttgcttgtagtcttaacgaacaccctgttttcctcctgcactataaattcttcctctggtaaaactagattctgaaaaagaatggaacaaaatcacttttgatctctctaaaattgagagaatgggaatcttttgagtaaattatagatyttgtataaactgttggtctttacagaatgcttattctgtgctccatgatrtggtaaattaattgggattacaaaaatgaacacactccttctagcaccaacaggatcttcatggaatagaggtagggcaatgcaatggaaagagcaggaactttactgtgaagcaaatgaatcctcattcagtgaactagggcaaattacttaccctttctgggcctcagcttctctgtcttcaaaagcaggcctgtgaagataatgataatttttgtaaagaccctagcaaaacagcttgatcatagtaggtattcagtaaatggtgaattataaggaaggctttggtagattctcttctagtagatcttctacatttattgatactgttagctggaaaatcagtcaraatctctccctcttttcttaagcttatgaggataggttggccaaattattagcaacaaggcagtgtcagtgtttcaactccaagttctttgactaagtttctaggtacttagacttctggagccagacattcggttaggaagactttaataatttatttactatacagctatttattgacagctgcttatgtgctaggtgttgggaccacaatggtaaacaaggacaaggtaaggtccttgctctgatgaaccattcagtatagtgggaaccagacagacattaaacatgccttaaaaccattraaatctcatgggccctcaattacagaatgcatgtgattcagtactgactgattatatgagtccctttttcttccacccttggattatttatgcattagactctttagaaaatgcccctgtgcactttttcaagctgttagtgtgcaatagtttaagagattccattctagcagtaatcatgrttattatataaaatggtaggcattgcgtaactctggttcaacaggaaactagcaccagacataagttgttccattttgatgggaattactagtttggtagggggtttgagaccattctaaaccagtggtctttaaactttccatttttttccttttcttgagacagggtctcacttagtcacccaggctggagtgcagtggtgcaatcatagctcacttcagccttgacttcccgggcttaagtgattctcccacctcagcttcccgagtagctgggactgcagtcgtgtgacaccacgctcaactaatttttggatgttctgtagagatgaagtctcactgtgtttcccaggctattctcgaactcctaggctcaagtgatcttcctgccttggccttccaaagtgttgggattacaggcatgagccactgtacccagcctcttaacttttagtagctgtgtagtattccagtgtaattcagtaatttatttaactactcctcactgatgagtggtatgattatatttagtttttgctactataaatactgaggctctgaatgtcctacatatattttggcaaacttttgtatatatacttatagggtaaaatagggaatatttgatcaaaaggtatattgtacttaagattttgatagatattgccaaattattttatccatgtagattttaatttagtctggtgtgggastgagcagtctgtgtttctaacaggtttcctaggtgattttgatgcatccaatttgaactattgcyggatcagaaaaatggagtatagtacacattctctggaaaacatcaggcaattatggttatctagggaagagtaaaaagccttttcagtgactgagccgtaagagtgaatttatcttaagtagcactagttgctagggatggcacatctttagagaaacaaagtgtactaatatttatctggaatattttatgtctttttgatatataatgtagggaaaagaatgtaagaattgtaaggacctgagtttgaacactttgcatttagtaacwgtaatcttgggcaaattaatgcacttgaatttttctttatacagtgatagtatctaccctccaggtttgttgcaaagataaagagagagtgatccaacacttgttgagtacttcttctgtcttctactattttatgactgtctctgtcatggcagtttgtcatttagttgtaattagtaatttacctagtcatctccccattagagtaactgggaccatgtcttgcactttagtgttctcagtccctagcccagacttgagacttggtgcactgttctgtttcttaaatgactgtgtaaattttccattttaattttcacaagtatcctaagagacaagtattatttgcttcattttaccatgaggaaatgcttagggaacttaaataactttcttaagatagcacagcatggcataaccaaaactgaaaactgtgtgtgtgatttcaaactagataaagtctgctttttccatgaatccactttgctgagataatgatataaggcacgttggaaattttgaaattgttcctcaagagtaagatgatttttgttattttaatactatactttaaaaattagcatggtgatccaaacatttcttctgcatatactcaatattccccttcagtttggctttcctgaattcatggtataaccaagtctgccttgtctataagaatgtaagtgatcatttcctcctgtgagtgattttctccatatttttcttgcttgaaattctgtctttgcttttcttttggtgaacttyttgatttttataaacacatgggttgaagatgttttatatagtggttatggcaggattttggtaacattggaagttttagtagaattaatgtcttcctgtstggtctttatcttcatttccctctttcattagcagccttatatggatcccttcagggcatgggtcactgattcagatgtcatcacatgtcagccctggctattggatatctctattttgtaggtcgtaaccacactgcttaagggtgtggaaacagtgcggaaaaataccatttcataagttttatgtttatcttgcttttaatggagcttttcttttgagaattgggttgttaggttgttttgaatatttaatcataagtagtttggaagaaaaagaaatatgtcccaactctctgacccttaggtcataaaattcacaaagttgcaaaacaggaatagcatacagcaagaagtgttgcaataggaagaaatgtgtggttttactcattagagttggacatgggaattttcccaacaatttaattctgtgttgtagtctattttcaagatcatatagtggtatttgcccaatattctatataaattcrttcattttctattttatttgacttttttacctttggtaaaacaactttgggttggtttcctttctccctcaggcctgatgatgttggggatggatggtggatgttggaggcaggctgcgttgtggattcatttgagtcttgatgcatttaagtttagccattgccttagtgcatgtaattctgcctttgttgttcatgtttatttaactagctctttaaggcatgtggaattgtgttggaaaatgcatgcctgatttctatcttgatatttcttaagcctggtttgaaccctgggaacacagttacagtcttcartggcttagtatttttagatggagcttttatactttagggtttactgagatgaactttggagagaaagtctaaacagaatgacttatgacctgcaggaacagtggctgttytaagaactggaagaacccttttcctattagtaacagttgttgaatgataatgcatggagtgtcatcagtttattttttaatgtgacttttaatgttcttatttagaaattgatattatattaactattttgtaaaatgtcccaaggtatactttataatggcaataaaatytaagataaaatagtatgtaataagatttcaaaagttacatatcttatgtattgtaaaacttttttttttttttttttttaggcatayggatcaggctgtgatattgttattttggcaaatgactttgaatgtgtacagatcattcctggkgctaagcatggaaacatccargtcagctgtgtggagtgttctaaccaacaaggaagagtaagggatttaatttctttactgaatgtcatttaaaaatgtgtttaataatctcaraatcttcttatccttttatgcaaagcttgcgtataatttcttatgtattgcttgggtgattattagcagaagttgcaaagtgataggtttatacaaattgtaaagtgccattaaactgataatttgataattgttctacagctgtatgtatactgtcttcaaagatctgtaggccttacaatcctgtgcatactgatattctgccagttaatacttctagcagccattaagccagtaaggggaagtaaacttttttcttctctacctagcaccccttatatcactcatactataacatcaaagttttattaagaaactctgcaagttgttaatatctaatatcatgcttgtcatataggaagtgctttgtaaagtctgttaacataatgaaagattttttgttgagtgaagagtcttatggttcattcaggctttaaaacagaggttttattttgaaatagttaaaatttcatcatatgtacctctcccccaattttcaaacataatgtacatcaaattttggtggcatgtcaagtaaatataggatgtttgctgtatactccagcaattcagtaaggccagtattatgtagccgagttgaatgtctctacgagaatagagwaataaggtttttacctgtaatcattgtaacagtttaaacaatcttagtgttctagaaattgttatttattgggtaacaaatttgatcaagagtatgttaaatcagaatattcatggtgataaatagtaatcatacaaatttatactgaatgataaattatggttactttatcataccatttatcctgccctatcctactgcccatatcaagccttaatatttgtgtaaatgtaccagtacttgacagttcagtgatacatttgacctagtattgaaacacgatttcctggtgtttcctggtacttgtttcttgcttttctaatttttccccccaggtactccccaccctcaagcattgcttacacttagtttagaaaacatgsggagtgtcagatttctctytttaattttttgttgctcttctctctaggccaagcaaggtagcttaagcctgcctaaagttgtatgatagttgtcagaggtgaattttagtaaataactcaagtgctggtgataatcgcaatgaacacacattctctggaagtaaaactttttaaaaaagtatataagacattggtattcataccatgggaaacagagcaacttgtgtttctacttttcttgagatggtttaatgtaaataaggcaaaattataatatctttattgtctttattgacatcttcgtttagtccttttatcccccagtccttgtggtgataactttcacattggtgaccttgtattagtctgttataatcattcattcattgattgacatgttgaatggaatyattcacaacactttttgcgtaagtgtcatttgaagtagctttctgttgtggattatgatttttcttggaaagaatgttagatgttggataagagttaaaatcactttttggtataacagtgccttaaaatcacaggggatatttttggcaggccttaaaagaatatatacctaattgagttttaaaggttaaccagggtgcagaggtgtcagaaaggacggtttttggtctattccctgtagttaattccatcttaccaagaggagagtgaacttagaaatagccttcaagaaattattggaaaacaggctgtggtagtttctgggaacagagggatttatgtcttttcttaccaggtatgtgacctggaacaaaatcctcctggtccctaaatttcttgcttcagtcctctggagatgtcttcatcagctctttcccccaggtgcagtttatggctccctgacttctccttagcctgttttttgtattccttcctctagatggtgtcccaattggtattttctgtttgatggtataattaggccattttatttgaaatatttttaagacctgttattagttgatgcttttctcatagattttatattattttcactggattataaagtttctgacaaagatgcatgcttttgaaatgtattttttaatagttattttatattaaaaataaaattcttatgaaaaatatgattttttcccatatgtrtatatatattttttattatactttaagttctggggcacacgtgcagaacgtgtaggtttgttacataggtatacacgtgccatggtggtttgctgcacccatcaacccatcatctacattaggtatttctcctaatgctatccctcccctagccccccgaccccctgacaggcctcrgtgtgtgatgttycccccagtgtccatgtgttctcgttgttcaactcccactgatgagtgaggacatattgtttggttttctgtttgtgtgttagtttgcagagaataatggtttccagcttcttccatgtccctgcaaaggacmtgaactcatccttttttatggctgtgtagtattccatggtgtatatgtgccacattttctttatccagtctatcattgatgggcatttgggttggttctaagtctttgctgttgtgaacagtgctacaataaacatacatgtgcatgtgtctttawagtagaatgatttataatcctttgggtatatacccagtaatgggattggtgggtcaaatggtatttctggttctagatccttgaggaattcccacactgtcttacacaaatggttgaactaatttacactcccaccaacagtgtaaaagcrttcctatttctccacatcctctccagcatctgttgtttcctggctttttaatgatcaccattctaactgatgtgagatggtatctcattgkggttttgatttgcatttctctaatgaccagtgatgacgaacattttttttcatatgtttgttgcttatcagcttaaggagattttgggctgagacaatggggttttctaaatatacaatcatgtcatctgcaaacagagataatttgacttcctctcttcctaattgaataccctttatttctttctcttgcctgattgccctggccagaacttccagtactgtgttgaataggagtgttgagagagggcatccttgtcttgtrcyggtttgcaaagggaatgcttccagtttttgcccatttagtatgatattggctgtgggtttgtcataaatagctcttattattttgagatacgttccatcattacctagtttattgagagtttttagcatgaagggctgttgaattttgtcaaaggccttttctgcatctattgagataatcatgtggtttttgtcatcggttctctttatgtgatggattacatttattgatttgtgtatgttgaaccagcttcttatcccagggatgaagccgatttgatggtgatggacaagctttttgatgtgctgctggatttggtttgccagtattttattgaggatttttgcattgatgttcatcagccatattggtgtaaaattttcttttttggttgtgtctctgccaggctttggtatcaggatgatgctggcctcataaaatgagttagggaggattccctctttttttattgtttggaatagtttcagaaggaatggtaccagctcctttttgtacctctggtagaattcrgctgtgaatccatctggtcctggactttttttggttggtaggctattaattaytgcctcaatttcagaacytsttattggtctattcagggattyaacttyttcctggtttagtmttkggagggtgtatgtgtccaggaatttatccatttcttctagattttctagtttatgtgtgtagaggtgtttattgtattctctgatggtagtttgtrtttctgtgggatcattggtgatatcccctttatcattttctattgtgtctatttgattcttctctttttttctttattagtctggctagtggtctatgtattttgttaatcttttcaaaaaaccagttcctggattcattgattttttgaagagtttttcatgtttccatctccttcagttctgctctgatcttagttatttcttgccttctgctagcttttgaatatgtttgctcttgcttctctagttcttttaattgtgatgttagggtgtcaattttagatctttcctgctttctcttgtgggcatttagtgctataaatttccctctacacactgctttgaatgtgtcccagagattctggtatgttgtgtctttgttctcattggtttcagagaacatcttttatttctgccttcattttgttatttacccagtagtcattcaggagcaggttgttcagtttgcacgtagttgtgaggttttgagtgaatttcttaattctgagttctaatatgattgcgctgtggtctgagagactatttgttatgatttccattcttttgcatttgctgaggagtgttttacttccaattatgtggtcaattttagaataagtgtgatgtggtgctgagaagaatgtatactctgttgatttggtgtggtgagttctgtagatgtctattatgtctgcttggtgcagagctgagttcaagccctggtatccttgttwattttctgtcttgtygatgtgtctattattgacagtggagtgttaaagtctcccactrttactgtgtgggagtctaagtctctttgtaggtctttaagaacttgctttatgaatctgggtgctcctgtattaggtgcatatatatttaggatagttagctcttctcgttgaattgatccctttaccattatgtaatggccttctttgtctcttttgatctttgttgatttaaagtctgttttatcagagactatgattgcaacccctgcttttttttgctttccattttcttggtaaatcttcctctatccctttattttcagcctgtatgtgtgtctgcatgtgagatgggtctcctgaatacagcacactgatgggtcttgactctttatccagtttgccagtctgtgtcttttaattggggcatttagcctgtttacatttaaggttaatattgtgatgtgtgaatttaatcctgtcattatgrtgctagctggttatttcgcctgttaattgatgcagtttcttcatagcattgatggtctttacaatttggtatgtttttgcagtggctggtaccagttgttcctttccatgtttagtgcttccttcactaaggaaggaaggcctggtggtgacaaaatctctcagcatttgcttgtctgtaaaggattttatttctcctttgcctaagaagcttagtttggctggatatgaaattctgggttgaaaattctctttaagaatgttgaatattggcccccactgtcttctggcttatagggtttcttccaagagatctgctgttagtctgatgggcttccctttgtgggtaacccgacctttctctctggctgcccttaacattttttccttcatttcaaccttggttaatctgatgattatgtgtcttggggttgctcttctcgaggaatatctttgtggtgttctctgtatttcctgaatttgaattttggcctgtctttctaggttggggaaactctcctggataatatcctgaagagtgttttccaacttggttccattctccccgtcactttcaggtataccaatcaaacatagattttgtcttttcacatagtcccatatttcttgaaggatttgttcatttgtttcactcttttttctctaatcttgtcctcttgctttatttcattgagtttatctttagtctctgatatcttttcttctgcttgatcagttcggctattgataacttgtgtatgtttcatgaagttctcgtgctgtgtttgtccgctccatcaggtcatttatgttcctctctaagctgattattctcattagcaatttgtctaaccttttttcaaggttcttagcttccttgcactgggttagaacatgcttctttagcttggaggagtttgttattacccaccttctgaagcctacttctgtcagtttgtcaaagtcattctccatccagttttgttcccttgctggcgaggagttgtgatcatttggaggagaagaggtgttctggttttgggaattttcagccattttgcactggtttctccccatcttcatggatttatctaccttttttctttaatgttggtgatgttgatagtattcctttatgtttgttagttttctttctaacagtcaggcccctctgctgcaggtctgctagagtttgctggaggtccactccagaccctgtttgcctgggtatcaccagcggaggctgcggaacaacaaagattgctgcctgttcctacctctgggagctttgtcccagaagggcacccgccagatgccgggcagagctctcctgtatgtggtgtctgtaggcccctactgtgaggtgtctccagtctgggtacrcgggggggtcagggacccacttgaggaggcagtctgtcctgtatcagagctcgaatgctgtgctgggagaaytgctgctctctttagagctgtcaggcagggacgtttaagtctgctgaagctgtgcctgcagccgccccttcccccacgtgctctgtctcggggagctgtggtgggctccacccagttcaaacttcccagcagctttgtttacactgtgagggtaaaaccatctactcargcctcagcaatggcggatgcacctcctcccaccaagctygagtgtcccagstcaacctcagatgctgtgatagcagtgagaatttcaagccagtggatcttagcttgctgggctccgtgggggtgggacccgctgaaccagacactggagaaaatttcctgttctgctggttgtgaagaccatgggaaaagtgcagtatctgggctagagtgtactgttcttcccggtaccgtctctcacagcttcccttggctagcaaagggaaattccctgaccccttgtgcttcccatgtgaggtgacgccccaccctgcttcagctcaacctctgcgggctgtacccactgtccagccagtcccagtgagatgaacctggtacctcagttggaaatgcaggaatcacctgccttctgtgtccatctcgttgggagctgtagaccagagctgttcctattcagccatcttggcagctgtccatccaaatatgatttctttgaataggtcaaccttgtatatgatatgtaaaataaagcctgctgaattttttgataacaggggagagactcttaactccagtacacttccaggtatatttatggaaggaaataaaccatgaatactgtattgagattatatgtaattagtttatacattattatgaaaaggaagatatctttattttacccttttctagatattaatgctgtatttattcttttttagattgcagcttcatatggtaatgctgtttgtatatttgagcccttgggcataaattctcataaaagaaattgtgtaagtattaaccaataatagaatacttttagaatctagttaactttagaatccaattgatgttaataaaaagctccttaggagctagtgctgaaaatagactagagtatcagtgaaaaattggtctagtgctttatgttaggatccttacattcactacggatacatccctagtgcttttagaaacccaagtctctagaatattgcaaattgacatttactgtgttaactgagatctaccctagtttgaactactgttatttcttgtctggattactaatatctatctgatatctggtttcctgctgccttcagccccagtgtctgttctcaacagaggagatcatgacatttctctgcttaaaactttgtaatggttccatatttctctctcttttttcttttgttttgagacagggtcgcactgtatcccctgggctggagtgcagtggcatgatcactgctcactgcagcctcaacctgtcaaatggtcctcccacctcaacctcccaagtagttgcgactataggcatgtaccaccatggccagctaatttttaaatttttcgtagagatggagtttccctgtgttgctcaggctggtcttgaactctggggctaagtgatcctcccacttcagcctcccaaattgctggaattatgggcatgagccaccatgcccagctgctccatatttctttcagataaaaagccaaaagccttttgtagactacaacttcccttctactcagtagcacagttactatgtctcagagctcacctcgtaagttcttgtcctctctggttctactctggccacattggcatttttactgtttctcagttaaccttccctctttgagcctttgtgttgtttgttttctttgtcaggaatgttwttcctccagctatctccaaggatagctcccatagatcctttaggtctttgctcactaataccttgtcaatgaggtttaccttgaccaccctttaaaaaattgtacccccacttatcttgctatttaaaaatttttttacagcatttatttatttattgtttactatgtaaaatgttatctaaaggtacataagggtaggaagcttttttcactgatgagtccccagtacttagaacagtatctggaacagccaggtgtggtggctcacacctgtartcccaacactttgggaggctgaggcgggtggaacacgaggtcaggggtttgagatcagcctggccaacatggtgaaaccccgtgtctactaaaaataaaaaaattatccaggtgtggtggcacgtgcctatagtccctgctgctaggaaggctgaggcaggagaatcgcttgaacccaggaggtggaggttgcagtratcctggactgcaccattgcactccagcttgggagtcagagcaagactccatctcaaaaaaaaaaaaaaaaaagtatctggaacatagtaggtattcctaaatgttggttgaatgaagaagttaggagtttaaaaagctcacttaccagctcagctaagtggttaagcataccacattgtgaaccattcagattcatactgggtgctatattatatttgtcttacttaatgttcaaaacatctaatgtggttagaattaagccctttaaaacatcctgcatgcattacatttttaccatcactcagaaataatcaaaattgcaaatgctaaatctgaatgctgagtatatatttacaaataatttttaaagtatatttttaagtgaaatgccttaaaacaaatggttttggtattttttcattaaatatatgtatttgaatatatctttttacattcccccaaaacagtataaattaaaatattaatctttccctataatagtattgtgaaatggatatcaaattttggactacttaagagtcacctagagcacatactaaacatttaggtttccaggtctcattccccaaatttcttcaaggtagttgctccacagattgcactctgaggaacactaaaggaaagaatattagggatgtctataattttaggaattatttaattactacactaaaatagatttgttgaacagtatttagtgttatgctgttgtgattgttgtttggtcagcagtggtagggtttaaaaatagcattttctctgattataaaatatcaaataatttttggataatgaagtgcagggtttgcagatgcacacacacacacacacacacacacacacacacacacacacacacaccccmcacacacattttttttagatatagagtcttgctctgtgacccaggctggaatacagtggtgtgatcatcatagctcactataacctcaaactcatgggctaaagtgatccttctgcctcagcctccaaagtagctgggtctacaggtgtgagctcccatgcccagctaatttttaaagtttttatagagatgggggtcttgcaatgttgcccaggctggtttcaaattcctggccttaagcaatcctcctgtcatggcctcccaaactgttgggatgcagctatgttttaaaattctgccttgaggtagtcaggaaaccttgtatacattttaaaattgttaaatattcttaaaatattataacacaaaatggcattaccgtttaaacagtattatttgccaagccgttaacatatagcttgcctaaggtaacatagctttgcaaagcttttcacaaatgtcctctcacaaaaggacattttatatttatgtactacaaagaaatatgtaaacatttaacatctttatgccagccattacaaacgctgaagataacaaaattatgacacagtttctgcccttgaagagttgcaatttagtgggaggagagtcagatgtatagaccaatactaattccatgtgatcagtgttataatggcagaatgtaaaagtggtattggtgctgccaggatgtcagagaaggcttcatagcagagatgatgagttagctaatcttagtggaaggataggggtttgcagatggagacgtgaggaataggatatcctaaatataagaaggtatttataggcatgagaaaaagcgtgagagaacctgctttgtttgggcatggcaaggagctcaatatggtataataaatagtagtggaaccaatgaaagttacgttaaaaacagtatatgaaaataatagtgaaatattttcatctttgttccagatcttaaagtcttaagttgaagaaaatgataaaatggtagtgttttgggatattatttgaaaaacatctttttcttttttcttatttctttttgtctacgtatttcagcaactcaagtgccagtggcttaaaactgggcagttttttttgagttctgtgacatacaacttagcatgggatcctcaaggtatttagcaattgtatttaaaattatttaaattaaatatttgttttaaatgtatgataataatrtgatatagtctcccataataagaaaatgatcaatgtattatattttctttttgttgatgaatataatttttccttcttggtatacagtgctttgtgcaatgcttaatttactattctgttttttcccctgcctttgtgtgttttatttcaagaagcagttatgatttgtttcctagttaatgtgtactgccctttactcttgttgtatttgctaagaaacaccattggaaataaaacagagaccaaaaaaacttcacctcattttatcatttgtatcaggaaattactatctttaattttgaaaaattaggaatttctaatgataatagctgttgtccctttttatattcacaattaataaggattctttttatatttcatgtgtaaaaccacattttattaatttgtagttatgccttatatctcgaggacattttatgtggtatatatcagagttttggggactttgttattctattaatacatttgttgttagtttttttgacttgcttgataataatagctctttgccagtaagctttactttgttgttctcaaatcttccttaagaatctttgttgtccagaagattcttttttcttataagggactttaaaaaaatatataccaagtgtttttcgttggcgatattgcttacttttcacataatattaatagtttacagatctaaacagaagcccatgtgcatttatttccctatataatatttgcatattcatcataacattctttaattttcagataatagattgttgacagcaactgattctattcagttgtgggctcctccaggagatgatattctgsaagaggaggaagaaattgataatacagttcctcctgttttaaatgattggaagtgtgtctggcagtgcaagttagtgtctatttctattgttatattcattaattaaaagcaagtgcttcctaaaatatgtttcctttcacaaagatctttattttttgatggtaccattgcatttagatgcctagaaagtagatttttttctaaccaaaacccatataatagcattctttaatttgtgctatagttaatcatttaaaaaaaggatgaaagtattttcatagttatagccccaggacaggagttgacagggttgatacataggaawtactcattaatagattgaggtaaggatggagagggggaagatgtgaaagttgccagccactctttcaagtggaagatgtactattaacagtcatatagattatgtgacgaagactagtcagggatgatgatargctcagcttttaacatgttatatttaggatgttggtgggacatgtaggtggagatatactgtattcatgttacttacattcttcttttcccaaagtgaatgttggattagttttaataaatttacatttttatggaggtgaaatattttatttatatttttagggaagcaaaaacagtcttattctgaggattctgactttgatgttacaaaaatctcatcttgaccatttttatrtacagtacaccagattttaaaagggctaattgcctaactctctcttttttagaacctcagtatctgtacatttgatggaatggtctcctgatggtgaatattttgctactgctggaaaggtaaaggatcaaacaaaaacatacgaaataaacaaataaaagaatttaaaatgttccttatttatttttattttcagttttctcatctgtaaaactgggataatcctccttggcaaagctggcctgaagaataaaagtggtgtttgtaaaagacctggtattttgctcacaggttgtaggcgcttgggaaataatggctattcttattactcttatttgaccttggcttatttgcgtttttaaaaactaagttttgtgtttaaaaatagcatatgtacataacttaaaaagtaaaataatactggattcacaatgaaaagatgtactgcttgcctcattattccaacgctaattcctgtgtccaggaggcaattatttgtcaagttgaatattttgctatttccttccatgtccttcaataacttgcaggtgctcccatttcttgattctgcccagccccctgagttatatatattattttttgccttcccactgtagaagctgaggctttagcttgataaaggtgaggggttgatatccccaacatcatcttcacatctaatatatacacatattcatttcacttgctcctatcttcctgatgtaggtatctcatgattttgggtaaatcagaagttattgtttatgttattaagattgtacagattattcttaatagtaattactttggagatagtaattgctttgttttatggtttgcttttttttctatatacctaattcatccttagaactgctttgactcttttctcagtataatcccacataggaggtattctgggaacatgagttctctttgctctcattcagcttaattgctctaccagtctaaaatagcrgagctaccattttcggattttcttttaccaactttgggaaattctctttgcctctctcctttgttaaattttctgtttcttagcatcatttatcttccttttttcttgttttgatggagatatcccccaataggttcctgaagaaaggtgaatgggaaaaaacattttttcaggccttacgtgtctgaaagatttttttcttatgcttgattttctcgggcatagaattgggttgaaaaatcactgaccttcgatattatatctcaataaactttttaattgatatatatatgggatacatgtgatattttgatacatgcgtaatgtgtaatgatggtcaaattagagtatttaggatatccatcacctcaaatgtttatctctttttgtgttggtaacatttcaaatcttctagttaattgaaatgtacaatatattattgttaaccattgccaccctactgtactattgaacactagaacttattccatctatctaactgtgtatttgtaccaattaaccaatttctcttcatctccttttttagctcccacrtaagattgagaaaataacggtactttttctttstgtgcttgtcttatttcatgtaacataatgacttctagttccatttatgttactacaagttataggattttgtcctttgtacagccaaatagtattccactgtgtatatttaccacatttcatttatcccttcatttactgatgggcatgtaggttgattctatatctaggctattgtgaatagtgttgcagtaaacatgggagtgtagctatccctttgatacactgatttccttttttttggataaatacccattagtgggattgatgaactgtatggtagttctagttttgtttttttgagaaaactccrtactgttttccataaccactggcacctgagcaagctgcctgtaggcccaaggactggtcctcctggacctgtgactactggcgtcttgtatgctgcctgggagcccaagggcctgcatgcctggcctgcctctgccaccacgggtgcctcagaactggcctgtctggtgtccctgtctgcagcaaagcctcactacagcctctgctaccaaccacagcctaagccaatgagtaactcacagccaccactgacactgactacacctgaagaaattgtatgaagactactctcctgcactcacccagaatcaaagccaaagcacactatccaactaacgctacgacatttgggggacctgttaaatctgaaactcatgtctttcaattctgagagattatattatttctttcgtgttatttctttctctctctgaatcttttcttattcagatatggatacttttacactaattctctattttactatcttccccctttactgttgtccacttattcatctttttcttttaatttctgggggacttttcagatgtaacttcaaagtaatttttttctgctattaaatttttaatttttaagaggttttaaaattctctgattttttttaaattacaaaatatttcataaattaaaaaagtatatataaaacatgttatataagatataataaagaataaacaaatacacatgtaccctactcctcaacttgagacaaagaacataaaacaaatgggtcctttatctttctccatgcatctccttcctcccctcccaccccaggcaaccagaatcctgattttcatgtttattattttatttaaaaaagtttcactcatctaaattcccaaataaggtaatatttagttttccacagttytgaacttaacagagtttgtgtttttcttttttttcttttcttttttttttttttgagactgagtctcaatccgtcacccgggctagcgtgcaatggcacagtcacggctcattgcagcgttgacctcctgggcttaggcagtcctcctgcctcagctgggaatacaggtgtgtaccatcacatctggctagtttttttttttttttttttttttttttggkagaaataaggtttcattatgttgcccaggctggtctcttttccctttatttatgatgccctaaattaaaaaaatttttcttcaaacatgaacagaaaggtactgaactcctatgtacccatcacttagtttcagcagttatcactcagccaatcttgtttcatctgtactactcctcccccagttggattatttaggcttgtgtcactgatgtcattcgtctgtaaatatttcagtatctacttttgaagtataaagattttacaaaaatatccacaatatatagtgagttaattgtagtttgaatcttgtttaggaaaatttcttactgtgatgctataaaagtattcttttttattttctcctaaaatcttaaaattttaatctcttataattaagtccctaatccaaatgaaagttgtctcaataacatttactgaatagttcattctttttccattgatctgccataccatttctgacatgtattaaataatgctgcagcagatgtcttgtacatgtctgttaggctcttgtgtggatttctcttgggtatatacataggaatagaattgctgggttatatgttatatgtatctttaatttcagtagataataccaatctgttttccaaagttgatatactaatttacactctcatagtatacaatagttcctgttgctcctagccagtgctgatrtggtctgacttttaaacttttgtaaatttggtagatgtcaagtaccacctccgtgtagttttttttgctttttgtttttttagagacagagtcttactctgtcacccaggctggagtacatcggccgatcatagctcactgtaaccttgaactcctgggctcaagcgatcctcctgcctcagcctcctaagtagctgggactacaggcatgcaccaccatggctggctaagttttatctatttttttttggtagagttgttatctccttatgttgcccaagctggttttgaactcctgacctcaagtgatcctcctgttttggactccctaagtgttgagattacaggcgtgagccactgtgcctggcctccttgtagttttaaagtgcatttccctgattattaatgaggctaaataccttttcatttatttattgggtatttggatgactgatttaaaagaaagtaactgggcaagttccttgcctgtttttaaaatagtttttggtcttttgttgatttgtaggagttctttattatgggtatgagctttttgtcagttacatgttttgcaaagatcttctcccactccattagttgctcattcattctcttaatggtatcttttgatgagagatatttgattttaatgtcaaatatatcagtgtttttctgagtcctatttaataagtttttcatactgtgagattctgagggttttcctatgttacataatcttctaggccagagttgctttaagtttttttgtgctgtgtattcctttgcaaatctagtgaagcctataataactttcctcgtagtatgatgtttttaaatgcataaaataaaatacgtagcattacaaaagaaattattgaaatacagcttcaagatattaaaaaatacgtttgtgatagagacattatgtacttttaaattaatgcattcggtaacaaaaattgcacttaaaatatgggcagttttaattgtgtttagctattgtatgtggaattaaaatttcagtatctcactttctaaggtgagggtaggctttccaagaacaacaaaattcactgaaggctttttgggttgatctctagttgtagaaacgttaaattttactgttttattgctcagcagttagttggcacagaggtagttgcttaacggttgcatgaacaatatagacaggaagactgcaatcatgtgcggtttagtagtagttccaataactaacaatttcaaagtagaaatgagtgtaaaaaatactttgaaatatgcagtaactgtcatgtgatatgaaaacatctttgattctgttagagacaaaatcatatgtactgccartactactttgtttttttcaattagcatttatgaaaatagagaagtaattgtttttccccattaaggttcatgatgcctttgggtcttagttttcttggtttcttcagaagcagaccctgagataaggattcaagtgtaagtaattaatatggggaatgatcacacgaaatatactggattggaaggagggaagtgaaggcacttaataacctttattaagtgtattaagaagcttgaatctctgggtcctctgggaacccgtgttcctcacttgcatcgtgttccttacacatgttctttacacacatcatttgaaggcaggtgagggccaggcatcagttctcagcactcataaccagctcctagaaracctcagacaaaaagatgtagatgcttgcagttgaaactggcacaccaaaatgctaaggcatgatgggatacaaatgatgtgtcaaaagtatcttttatatcttgaagtctatccacaggacctttgggtcagaggacctcaggccaagagcctctggtctagaatatggacattttatgttttatctttcacattcaggtctaaaatctatgtgaaataatgtttagatgtgatttgaagaaggtcaagttttattttttccttatggatatctggttgtcttgaacaatttattggaaaaaatcttccctttcttcattgttctgcattaccacttttgtcataaaatcaaatgtccatatttctgtaggtctgtttctaggctcttttctctagttcattggtctttccttgtatgagtgtcacctgacttaattgctatagctttaaattaagtcttgatatctggtagggcaagtcctcccctcttgtttttcttttttaagatcgtcttatctattcttggccctttgcatttctatataaattttagaataaatgataatttttacaaagcaaacagaaaacctcttatgattctgattggtattacattgactgtgtaggtcagtttggggagaattgacatctttactataattagtcttcccgtttatgaacatgatgtatccatttattttagacctttttttcctcagtaatgttttataattttatctgtgaagatcccaaatatcttttgggattaattcctagatatttgatgtttttgatactgttataaatggaatcatcatgtaaatttttaaaaaataattgttactggtatatagaaatgcagtttttgtatattggctttatgcccagcacccttactaaactcattaattctaataattcatctgtagatcattttggattttatatgtacacaattatataatctatgaataatgaaagctgtagttcatcttttgtaactctcccatttttcatatttttccttttttttttaactgcagtgtctaggacctctagcagagtgctgaataaacgtggtgacaacaggtctatctttttcttgttcccagtctcaaagggatacccttcactgtgtcatcataaatataatgtttactgttgatgtttgtggtagatacttttttttcagataaagaaactttccttctatttgttgtttgctagattgtttttctaaaccacaaacgatatagaattttaggaagcattttttctgcatctaatgagacaatttttatcttttttttttggagacagaatctcgctctgtcacccaggctggagtccagtggcacaatctcagctcactgcaatctcagcttcccaggttcaagtatttctcccrtttcagcttcccaagtagctgggactacaggcacccatcaccatgcyggttaatttttgtatttttggtagagatgaagtttcaccattttgtccaggctggtctcgaactcctgacctcagatgatccacctgcctcggcctcccatactgctgggattacaggcatgagccactgtgcccggccatctttttaattttttaataagatgaaatacatggactgattttgtaaaccttgtattcctggaacaatcccaacttcattataatgtgttatccttgctggatttgatctgctgatctttttttttttttttttcttttttttttttgagacagtgtctcgctctgtcacccagggtggagtgcagtggcgcgatctcggctcactgcaagctctgcctcctgggttcacgccattctcctgcctcagcctcccaagtagctgggactacaggcgcccgccaccacgcccagctaattttttgtatttttagtagagacggggtttcaccgtgttagccaggatggtctcgatctcctgacctcgtgatccacctgccttggcctcccaaagtgctgggattacaggcgtgagccaccgcgcccggcctgatctgctgatcttttgtttaagatttatgtgttagagtgagattcggccaataattttcccgttttcataatgtccttgacagatttttatgttgatgttatgctggccttataaatgggttggaaagctctcttttgtgaagagtttatgtaagattgatatagttttattcttaagtatttgctggtgaagccatctggatcaggaattttctttgtaggattcagttttttaaattattcagattttctttttcttttgtatgtcagttttggtaagttgtatttacctatgatttttcagttttatttagattttcaaatttattagcacaaaattgtgtaaaacaccttatcttttaatatctataatacatgtatagtgatttcttcttcagttttgatattatttatgccttccctctttcttcattcatctcaccaagagtttatcaattttgtaggtctttttactgccctaaaagtcttctgtactctgcctgtttttaactctggctacccctgcttagttgttactgttatcttttctacttttaaatgttggagtgcccagggctcttctagtcttaagatttctgatgccatttaaatgccatttttgtatgctgatgacattcaactttgtattttttgcctgtacctcttccctgatctctacttccctaacccctcaatctactccctgatggctcacctttagaatatatccacaatctgcttacttctttaccacctccactcttataatctggttgaagccaccattatttatcacttgtattattgtattaaakttttaattggtttcccaatttttgctgcacttctgtacaatctatgttcaaaccagcaggtggagtgatttaaaaaattgtttttttgagacagagtctctcactgtygcctaggctggagtgctgtggcgcaatcttggctcactgcaacctctgcctcctgggttcaagcaattcttgtgcctcagcctcccaagtgactgggattacaagcgtgtgccaccacacctggctaatttttgtatttttagtagagacggagtttcgtcatgatggccaggctggtctcgaactcctggcctcaagtgatctgcccaccttggtctcccaaagtgctgggattatgggtgtgagccactgttcctggcctggagtgatctttttaaaatgttgtcagatcttgtcactcttcttttgtacaaaaccgtcaaaagcttttccatttcatttaccaaaagaccaagtcttcgtgatggtttagcatgctccatgcttaccaggactctcgtcactgcttcaacctcatcttctgctaactctcacccctgcacactscactccatctaatttgcctcattgtttttaaactagattttaaaaataaaacactgaaattttgataagccagttcaataatctacaaataataaaacagtatttctggatagaaatgtagagacacgtgaagaattttctgtaatgtcttgagaagcgtgggtatctcatgaagggtacacttgtcagaatcactggaaaaacagtttgagaaataatataattcatgtctttttttcctttttaattttattttacgtaattcatgtcttgatctctaaaacaggcagtcacctttaaaactttggatctttaaaaacaaataccccattactcctaaaatttgactgaaaaaactcacagatttgtcttttttttgttactcatatttcttaggattaccacgttaataagtgattaataaagccagtcattcctttgacttaacaaatccataataggtgaacctatggatgatttaatataggaccagttcagcatgtcagagagctgctggagagtcatactggaatccagctttatgatattcccagttaatcattgctgatgtcagcttggatattgtacacactgtgcatcatttggagcatgttttcctattgcctccttttaaatatcgttaatggcactatgatcatggataggtattgtatacacttaagttttccttgactcatgtacagttaacccttgaacaacatggcagttaggtgatccaaccccctgcacagtcaaaaatccctgtctaacttttgagtctccagaaacttaattactaatagtctactattgactggaagcttttccaataaaataaacaataaattaacacattttgtatgttataggtattgtatactctactctttttttttttttaaaccctgcatgtggcatccaatatgtgctatactcttttaaggaagagaagaaaaatgttactaagaaaaccttaaggaagagaaaataaattaaccgttcattaagtggatgtagatggtcataaggtcttcatcctcatcattttcacatttagtaggtgagagaggaggaagaagaggaggggttggtcttgctgtcttgggtggcagaggcagaagaaaattcacgtgtaagtggacctgtgcagttcaaacccatgttattgaagggtcaactgtactttaacatatatattgtttgatttttttttatcatataacggggcaaagaaaatgcattttagaattctagcaatctgcacttgtgagacacatgagaatcttttatagttgtattcatatcataatagactttatatacgtaaaattgatagtgcattttggacaaaaagttgatttgaaattatatctgaaattaacaaccttcattcacatgtttagcagatattcttttgaacaccaccatataccctgaactgttgtgtgtgctggcagtcttatgatgaagatgatagacaaggcttttgttcttataggacttaatttctggtgaggaaagacagaaaaaaatatcaagtattaacaagtgctgtccagaaaattaagacaggatgatatagtagtgtgattgggtgtctgttagagtgagtgatctatagagaaagctttgctgaggagataacctttaaactgagaattgaatactacgaaggagacaactgtgaagttcaggggaaagagtgtttttggccragggaacaaacaccaagtgcaaatgctctgaaataggaattagcagggcttgttaaagagcaacagaaagctggagtgtagtggttagaccaaagtttgagatgcatctgagttaacatatcagataggataagacagtcaggagttctctggcaatttgaattctttagccaaaggcggtgtttaaagttatgggtctggatgaaattaactagggagaacgtgtgtattagagaagagaatgggactcaggatcaaatcccaggatcctcaaacattaagaaatgatagagagaggggagatacctacaaaggatgctgggaaggagtaaccactgaaataaaacgaaaaccaggagaatgtgacattagagaagccaagaaaaaaggttcaaggagggaatgtcagttaattttgtcaaaagacctagaacacatgggagaacagttaaacatctgtagatagtacaggcctaactgtgcgtaaattaaagcaaagaaacttttgtggaatcataaagttttaatgatcttagtgatcacagaagcagctaaggtttttgaagtccatgtctctgccctccactgccactacctgtgtcagcatcttcggggctgcagacctttacagtagtctcttaagtgatgtcctgcaaacatcctctgattggtctgcccacaggagccagccacctgaacatgccgttctccttttcaccaccttttaatgactcctattgctcctaaaatgaagattatgatctttaccatggcctgtgaggctctgctgtatgatctggcccttccgtgcctctccagcttcattcccaccttaatgcctaygacactgatgtcctttcaaggccttgaatatgccaagctctttcctgcttccacgtctttttatgtgctgttccctctgtctagggaatacctacaatacccagacttccttattctttacctggtcgtcttttatgtatccttcaactctcagtttaaataccacttgcttaagaaatcctctgatctcccaggcaaggtcaagtctccttattaaatactttcctggtgccctctgcttctttcttatagtgcttatcacaattgtaattaaaacaataatttatatccttacttaatgttgccttcctttctaaagaataagctctgtgggattaggaaatgtattttattatttctgtctcttcctctgcctcagctatatccccagccattcacatagtggcttctttcaataaatacttgttgtttgagtaaatcttgtaaatgttccatagttgtacaggcagttaatggcacatcatcattatctattagtacgttgaggactgattttgtttttaagcctgagaatggttggaaagcccttgagtttgcttagagtgaaatgtggctctttaataaatctgtatctggacataatcaaatgtataataattggttcttatgaaacatagtaaaatatatgtaattagattgaattaagaatagtagcttgatacaaactacaggatgcctacccttccctgaaagagacatatgaactgttaaaatttccacaaaaattttattttctagattattgagtattattttcattgtgttagtcacgtctccctaagctgcttatatccagttatcctaagagttaagtgtttcataattcttatggaaagataatgcttttctggtaaggatcctatggaggttaagcaaatgtgtcttggattgaaaaagctattttctcacatttttgagaatataccacatctgattaagattatcctgataaaaagaacagaaagtaactttggaatgttgggcagtttttttttttttggtacaatctgttctgcttctgttaataaagccaaatttgaattgataaaacagatggtcactgtggatctcccactagaaggcattttccaccgcctctgctacacatgacagggttttatttcaggtgttgtgagactcaaattcaattacttccaggatttttaatattacggtccattgagcactttggctggtaagatctattttttataaatgtggtaaattaaatttttcttaggcttaagagtattttaaatttctatctgaacttaaaataaagccttacttactaaagagccttttctacccaacgtgacatacctgattaaatctttagtttaagaattggttttctctggttcgcttactaggagatgtttgctgaaattctattcgtttatgttcataaagtttgtattggaacattttaaaaaataacacttggttattttgtaaaatttgcaagtaatttaaagtatcctgttttcttcaaaaaatggaatttatcttttctttttttgagttctcatgcagcatggtgaatatagttagtgatagaatagtgtatattttaaaattgctaagagtaaatttcaagtcttctcaccataaaaaacattaagtatttgaggtgatggatatgttacctagcttgatgtaattatcatgttatattcgtgaattataacatcacttcatactatgtaaatgtatacaattataagttgtcaatttataattaaaaaggcagcattttctttgagagaagattatgcctttgagtgaaaaactgggttttgcaagggctaggatgagaagatttcttgaggggaagggttgtcccttctatgctgattttgctgagggttttaattataaagggatgctggattttgtcaagtgctttttctgcatctgttgagatgatcatttgattttgtttttaattctgtttatatggtgtatcatatgtattgacttgtgaatattaaaccatccctacaactctagtatgaaacttacttgatcatggtagacaatctttttgatatgctgttggattcagttagctagtattttgttatggatttttgcatctatattcatcagggatattggtctgtggtttcctttttttgtcatgtcctttcctggagtttctgcacagtaaatgaaacagtcagcagagtaaacagacagtccacagagtgggagaaaatcttcatgatctatacatctgacaaaggactaatatccagaatctataaggaactcaaacaaattagcaagaaaaaaccaaacaatcccatcaaaaaatggactgaggacatcaatagacaattctccaaggaggatatacaaatggctgacaagcatatgaaaaaatgctcaacgtcactaatgatcagggaaatgcaaaccaaaaccacaatgcgataccaccttactcctgcaagaatgsccataatcaaaaaaccaaaaaataatagatgttggtggggatgtggtataaagggaacacttttacactgatgttgggaatgtaaactagtacaaccactatggaaaactctggaaattccttaaagaacaacagtagaactaccatttgatccagctatccacttctgggtatctatccagagaaaaagaagtcattatatgaaaaagatacttgcacatgcatgtttatagcagcacaatttgcagttgcaaaaatatagaaccagcccaaatgcccatcagtcaatgagtggataaagaaattgtggtatatatatatwcacaccatggaatgctattcagccataaaaaggaatgaaatgacattcgcagcaacctggatggaattggagaccattattctaagtgaagtaactcaggaatggaaaaccaaacatcgtatgttctcactcataagtgggagctaagctatgaagatgcagaggcataagaatgatacaatggactttggggactagggaggaagggtgggaggagagtgagggataaaagactacaaattgggtacagtgtatactgcttgggcgatgggtgcaccaaaatcccacaaatcaccactgaagaacttattcatgtaaccaaacactacctgttcccccaaaacctatggagattaaataaataaataacacaaaaacactaaacaaaagtgaacttaaaaaaaaaagctaggaatttccctcatgcactcaggtaactgcaactcccccttttgatatgttgtactttcattttcattcatattttcaacatattttaaaatttcccctgtaatttagaagtttttagttttcaaatatttgggaattttctagataactttctgttactagttacttaattttgttgtggttttacagttttagacaataacagatgaaatagggactgcttcatttgagggggagattggtgggaatgggagaagggctagagtatcacctgctcctggggctctttgtatttccattgtgacttttgaggggctctcgggtacctgtagaatttctttgttacgtagtctgaaaccactgcatagartgtgctgtaaatttgattatgtgaaaatgatgctatgctgaagaagatacttggaggaaagcaactagtacattgttaagtggctgtctaagggcaaacacttaaaagatttgctgtataattaaaatatccaaaaaaagagacattaatggaaatttttgtttcattatgcagcacaaattgagaatgagtaccaagatgaaaaaaacagaattgtttgtctagtccaaatgaaaatatttgggtcaatgcatacttttcaggaatacataattgcagaattcctcagaggttatatttttgcataagcgataacatttattatttccctttaatgcagtttttattattggttataaagcactataaaagatagtttctgttaaaatacagttgtttagcctttaactaaattgttaggactaagtaaaatgattaagtcagtgcctattgttatacttgtaaatattttaagtgggcattgaggtggttcctgacagctacctccatgcattctttatcatcacttagagtagggatcggagaactgtggcccaagagctaagaatgttttttacctttttaaagggatgtaagaraaaaagaagaatctgtgtcatagacctgtgtagcccacaaagcctaacttatttaccatctggccctttgcagaaaaatttgctgactcttgatatagagcaagaaacaattcatgttcgtgaggtgaagggtgaagggcttcactgttaaagaccacttcaaaaaggaaaggataacaatgactgaaaagatagcatggatctttctaattctttcttaactaacttattcaaggggctagcatcagaatcttttttctgtactgaccaatttatgtctaaatgggagaatttggcatcagtctgcatttgaaaaacaatatcacacagaaaagattgataatgaatagactgttcatttatttttcaagaatagttttctttaaagtaatgtaattttgagataagttttgtattatgtataagtcacatattagtttttagatgtaacttaatttttaaaacttcttcaaaccacttaaattttgaattgtgtatgtacaaattaattttatattgacctatgtatttttcaggatgattgtcttttgaaagtgtggtatcctatgactggttggaagtcttcaattatacctcaggatcatcatgaagtaaaaaggagacagtcctctactcaattttcttttgtttacttggcacatccccgagctgtgacaggtttttcgtggcgcaaaactagcaagtatatgcccaggttagatgaatgaatcatgtagctttagtttgcatccttaaatgtttataaaaataatgaaaataaagtccttttatttacatggtggcaattaatagcataggctctggcatcaagctgcctgaaatcaaatcctactattagcttcatgagtttttgactaaatttcttaagctgtctatgcctcagtttttctctgtagagtgagggtagtaatagtacctacctcagagagttactgtgaaactaaaatgtagtttgtgggtgggaagtgcttagtacaggcctttgcacatactttgtgtccagccaatgaaattgttggtagtagctgtggtactagcagatcctagcaagaaaatgtttgcaaataacaggaaagcacacattgaagggaaatagatcagtattatgtcaattatgtatatggtgttaaagcatataatgtactctgaaaaaagtggccaggttgtgttttttttgttgttgtttttttaaatctgagagctgtcaacagaagcttctcaaaggattttttattatacattttttcctcatcattgtggcacctcttaaaggtatttagaagattaaataaactgcaaaaaagcttatacaaatgattcctttattatatacaggtctaagaaagctgttgggcactcagaagcttgcttagaaatctagtttgttcttgagggagggttrttttacctactaaatatatctgaggattgtttatgcctgataggaaatatagcacacattgtagagatgctcagtaaatgataatgtgggaaatttatatactttttgaatctaaatatattctgcttaagtcatctgcatctatttgcagaatacttttgacttagattctgtgtgagcatttttttaaagggagaatgatttttttgttcctttgtaacaaacaggtaagttactttagctgctccatgccatgccgtttttgcttattttaacttaatggaaatggatttatagtttgaaattatattctccttacagttttatgatgaagataattatttgtttgtaactgtttgggttataggaaggaggatgtaaagtgatgaaactactgccataagccagatagtttaattacatttaatgatcttttattatggtcattctctaatttgcaatgattaggttttcttttgctgtttagtttgtatgttttgtttaggagatactaataatcctctagagcctgaatgtataatctggcagtaatttctrtttcttttttcaaaacaatttcccggttcttatgatgttcacagtgatgctatatatgatttcaagctctttgattgattccttttttccatagtgttttgcactaatgttatctttatgcatgaagaaccaaaatattaattagttaatgggattgatattcacattaacctttatttatttctctttgttgttaggggttctgtctgtaatgtgttgttaacttcatgtcatgatggtgtgtgccggctctgggcagaaactttattaccagaagactgtcttttgggtgagcagatttgtgagactaccacttccagcattgccagcagcctttctcatgctggaagacacaaagacagaatacagcatgctcttgaggtattatattatttaaaatggtaaatgaattttgaagataatgtgagcctggtggaaattcatgaactaacatgcagatggcacacatggtacatgtaatgagtgaaattaatagcaataaactctcatttatgcttgtaagactactcatttattccactaagaagccaaatgcagaaattaatgatctcagacatgttttataggtaaataytattaaaagttttttaaaaattgatattttatgctcaagttctagataatattattttaattcttttgttttgcatgtcacatgtgaaaatctatgggactaagtattagtaaaatatgtaaagatccttgaaattagttgtaattaaaaatattttgcttttgtttcataaagattaaaatcttattgttctagttaaaaatgactattttgttccttaagaataaagatgtttattaagatattagacacaaatgaactgctttggagtttccatgattgaagattttgaaaatgaaataatttttataatttttaaatacagtatgaaataaaagtgctttataagaaattacgttataacacatarcacaaatgattgtgtcccatatgattaggtaatacaatgagatatatgcattattttraattgtcagaaatttattatagtaaacttagattactatttttcttgtggctgttttttattattcaaatactgtatgcttattctagaattggattaagaaaaggagaagaaatacggaatttataattcaactattctagtcctgtgaatatgtgtatttttctttatacgattgagatcatattatgcagtaatactttataagttttttatacttaatttgtttacagtctacattattgactatacttttacattatatatttacattgacagtttaaaggttgcatagtcaaagtggctttgccattttaccaagcagaaatattatacaactttgacaagttaaggatgtggtccttaaaagttttatgtgaagtaggcctcctcaggtattgtctgtattgggccattcttgcactgctatgaagaaacgtctgaaactgggtgatttataatgaaaagaggtttaattggctcatggtcctataggaagcatggcaccagaatctggttggcttctagggaggccacagggatcttttacccatggcagaaggtgaagcaggagccggcacatcacatggtggaagcaggaacaagagagagttgcggggaggtgccacacatttttaaatgaccaaatcttatgagaactcactcgctattgcaaaggcaataccaacaccaagccatgcgggatccgcctcatgacccaaacagctcccaccaggctctacctccaacattggggattacaattcaacatgagatttaggcagggtcaagtatctaaactatatcactgtctgtgattgggcgctatttttacatttttttcaatatttaaaatgtaagtgaaattaaaagcagatgtcaaaacagttaaagttatcttttattttgatattgatatttagtaggacaaagtacttaatttttaagtagatatttgtgatcacttacttatacttatgtaacgtgttttatcttcaaattatatatgagcctttggaaactaagggcttttagacatctttgtatcctccatggtacctgatatattgcttttcaagtgtttgttaaattgaattattgccatgtaaaatagaacagaaatataagtaaatatgtaaccagtgatttgacaagtttttactgtcttttattaatattattaattaatatgttaagatagtttttaaaagaaaaaacgtaattgtctgacttacgagccacttggctttctgacatcctatcctttcctatggaactccttactgttagttctatataattgtatatattcttaagttatatgttttgtttctaggagaaaatagccagtattagatcagtcttgtcagtctaatttaaaatgatggttaatgtcaaagatccagtgaaaataatttgataggcagttttgaccaggggttctctaatgtcaatcttaaccctattatcaaagcaatgagcaaccccgtagtgggagaccagaggtgggggacacaccattgacctgatactgttttccatatgcaaaatgagaagggctgtagaaattgagaggatgtgccagttatgttactttaatgaagaaagaattgataacattttatactttatttaattgaatgtggggaacaaaggaaagtaataaaaaattattatgaaacatggtcttcggagtgggttaagttacagaataaggaattactgtgaggtggggccgtgatatggagaaaaaagataatgccaagaatgacatggccccatgactaaaatagtccacatgatcacgcatgctaatgaagaattttaatcatatagatttatctctatttaaacatatccaaattgcaaattgtttaaaacaatttaaacaaattaaagatcaacattttaatgaggtctttccttgtctactcctatctaagtaggttccccttgttattctgtattttcataccctgttttgttctttgtaatagatatcatgaatttgattgtttagctggctgtttaattctaagtgagaggcagtattggggaggcaatattcttcctggtaggaagactcaggaattttttttttttactcttatgactagaaaattctgtctcagtactaggatatcctgaaaaaaaaatctttggacctcctaatattaacgggaatctttattcatgttttatagataccatgaataagtatttttgcacactgctttttgccttgaactaaaagtttacaagaactgtagagaatacatccaaaatagttctactgtaatttaaaaagtttcctttaaaatgatcaggtttttatggagaaaaaaatcttaaacctcttaataattaagagtactttggttggcatttattagaggttccagagttggactcagcaactatttttctattttagacaatacaccatttgaaaaatttaaggaaaggacagaggaggtcatctgttcttgtaactcatgctgaattaatgcccgaccagacagcaatgcatgaagttcaaagacacatttcccaccatgcaaatgcactctgtcattttcatattgcagcaagcatcaaccctgccacaggtaaaggataaagttttatttcccataaatatgttgaagtcaggtaaataaatagaaaagtggaactactttcataacctgttttttattatttcatgttgcctttaaaatacttaattggagtagagatataatataaagtaccattttttgaattgggcctatgtgattgggactatgtgattctcagggtattaacttcagtaactatttctgagcatctttgtctagactataacaagcattcctagtaaattagagctgtgattgaacctggtatcacaagtggtggcagcctggtaaattagtgtaatttctctcacttcacagtttaaatcttcccaactcttctttataacctcctctaaatatatttttacaaagttttccttatatctcagcatatcttgttttctacccttgtagactttcttgtcctatactaaggaaaacacttttccttctaacctgaatattttcttttccctttttcccctatgtgactgagaagtattttgaggcaggttctgtgttggcaaatgcatatttgagagcttctatttaaaggcaatatgttttccttctacatggaaatgtaggagaaaggctataaattttatattacattgctcatagaactatataaagttttatataaagttatagttgtatgttattgaactggaggtctgttgcttcagagtgaaggggcttttatttttaaatgtttctgtatgtaaatacagtatttagtaaatagaattctaaaagggtgatctgcagtggtaactctagatatgtgctgttttatagagtagccactggccccgtattagctatttgagcacttgaaatgtggctggtccaaattgagatatgctgtaaaatacacactgaatttctaagacttagtataaaaaataatgaaaaatatttcataaataattttatttcatattgattacttgttgaaatactattttatatatgttgagtcaaataaagtatattattaaaattactattacctgtttcattttaccttttgtaacgtggctattgaaatatctaaaattacttaacatgtcttgcatttttggtctgcattatatttctgttgggcagtgctttgccatctgattaaatgttgttttgcttatwttatcctttcttatctaatatcttaattgtattctaagaatgtctttataatttgttttcaaaatgtggttttagatttttatgaatttttaacctttttaaaagaaccgtttcttgaattactgtgataaaaattcaacttcaaaacaaaatgcaattcgtgatagtctgcactaaattcaatacatattagaaaccttggctttttaactgtgtacactatcctaattagatggaataggatcacagaggatgagcattctgtcacatcatttgagcctaaggactggatatgttcttgtagccattgggccttggtcttccccatcttctttactaaccttcactaattttatccatgctcatcctaacttacctacatattattttaaaaacaattttgttaaaaatgtttaacatcatgcatttttagttactgcatgtaaatataacatttaggttgaccaaatagattactaaatgcaaataattttatattgttaggacttgtcctcttcacttttttttcaaaaaattttttgaaactacaagaaagttgaaagaatagtayagcaaatatccatataccacttaccgagatttaccacatattaacatcttgtcatttattcttttgttctcctcctctgcctgtatagatatgtctttgctgcctcttcccttatttttgacggaaccatttgaaagtaaagttgttgattacaataccctaaatataccctaattatcctaaatattttccattacctaaatatttaagaatgtatcttttagtaaaaagrgaatttgcctccatagctgtaatactgttattgcatgtgaggaacatagataaaataatatcatgtaatataccattcatayacaaatatagattcctttcttaaatgcagattattttctttaaattcctccaatctagaacagtccctttctcaattgtcaaaaaaaaatctgttagtctcaaaaagttgtctctcagttttctttcaaaatgtctcacagtctgaatatttgttaataagatttaggtttaacattctgagcaagattactacataggcacataggtgatgtagtgttttataggattgctaattcacaaatcctattttatatgatttatttcatttttatcacaaaaccagaatagtcatccaggaactggaaagaaagaacaaattagagcatttaacattcatatttattgtaatagaacattaccagaatgtccatgcattttatctttagattttcacttctttttgcaaaggacaatttttccttctgttgaatgaattatttataatatggattgaaattaaggagattaagtttttgatttataccattttttgggcggaggaggacagggtcttgctgtgtcacccaggctagagtgcagccttgacctctccggctcaggcaatcctaccacctcagcctcctgagtagctgggaccacaggtgtgtgccactacacctggctaatttttgtagtttttgtagagtcagtgtctcgctgtgtttcccaggctggtcccaaactcctaagttcaagcgatcctcccgccttggccttcagaagtgctaggattacagacatgagccaccacacctggccaatttatactctcttacatgaactcatcaatttcataaatttcagttacctcaaatggagaaattatcttatacttagaattttgcctgccttcttgtgtttttttcttgattttatttcccaacagctatttagtaaagtttcaaacactgagaaaagttggaagaatagtacagttaatacttttatattcttcactttgattcaacagttgttaacattttgccacagttgctttatatgtggcaaatgtctctgtgtgtatgtgtatgaaatgttttcttttctctttctttctttcttcctttttttttttggaaacggagtcttgctctgtcacacaggctggagtgcagtggagtgatctcagctcattgcaacctctacctcccgggttcaagcaattctcctgcttaagcctcccaagtagatgggactacaggcacaccccgccacactgggctaattttttgtattttagtagagatggggcttcaccgtgttgcccaggctggtctcgatctcctgagctcaggcaatccacccgcctctccctcccaaaatgctaggattacaggcatgagtcaccgcacatggtcgaaatgttttcttagtcttttcaaagtaagttacacctatcatggtgtatcacccttacattagcaagtatctcctaaaattctctcacataatcataatatcatcatacctaagaaaatgataagtaattccataatatctaatatccagttcatatttaaacttctctagttatctcttttatagctgcttttctgctttaatttttcatcccctgtccccaaactggaattcactgaaggttgatgcattcgtgtattttgtttttaagttaatagtttaatttcatatgtctatcattaattcttaagatttacatttaccattaaattcagttaaagtttttacaaatgctgctaaaattatgttgacttgtttagcaccttttctttatatagattagtcattgtaagcacttgtcatgtttttaaagaaataaaaaaaattatattgaaatctcttttatttccacagatattccaaatgtcttggttggcactgcatttaatgttgatgatggaaatgggggctttgtagttcattggttaaacaacaaggaatttcattttacatcatctacagaagtatttatgcatcaattacgaaaactttctgataagcaggtagatcatgaaaatgatgatgcagatagagaagatgaggaacattcacaggaggatagagaacggggtttacatatgaaattagaccatggttagtatcctgtgttcagattttacttactccaaagttaacagctttctgtggtaccacttttagttttgaattcttccttcccgctcttcctcctttttacttttctatttgttacacaagtatttactgaccatctgccttggatcaggtactctgctagcccctgcaaacatcatctaactctatatgttctttggaagccatatccttttctggggaacaggttttgctaaatggtagtaataatgatagggtgaatgaagttttaatttatctaaaagtagtaactgtagtaacattcaattcagacaaaagtttcctttgtttttttttctgactgtaaattggaaaagagatttagtttttaaagatagtatgccatttatttatagtctagtatgtaaatgaattrtttaatgcttgtattgataaatatattttctggttcagatttatccctggatagagaatctgaggcaggtacaggatcatcagaacatgaagatggagaaagagaaggaagtcctagaacttactcacgacttagtgtaccaatgccactgcctacggttctgcttgatcggaagattgaaaygctgctaactgaatggaataagaatcctgatatgctttttacaatacaccctgtagatggtacctttctagtgtggcatgtgaagtatttggatgaatataatcctggaatatttagacaagttcaggtatattttattgatgaaatagttattacatttcttaaaatagtaaaaagaaataaatgctttgtagagttagcatgtttttagaattactgaaaattttggttttgataagcatctgagtaaagaatacttctttctttcagaagggatcagtgaccataagcttagcaaacttgattagttagaagataatgaatttggccttgaaatgcagtactgaatatttaaatatatgtgttgatttttgagggaattaataatattttgaataagattaagaaactaccctgaaaatgtgaatcaggatgagctcctccttgtggccaatttgatgagctaaacgaagctgcctttgtcatctctctcaactttattgctatttwgatctgtggctgtggtcattttgttgtacaagcaaagcacttgaactttttttcttcagccttctcttaggccatgaatagagatatggtattacctaaatagagcaaggggactggaccataaagaggttgaaaatgacattttttgataagaagctgagatttggtattttgagaatagaagtcttttttttgagaggaggtaaactatttgcactgaatcatataattatgtttttcaggtttctttttcttctcggattcctgttgcatttccctctggtgatgcaagctctcttagtaaaaatatcatgatgtatgcctgtataaatgcgacaaaagattctcaccacacgctgttacaccaggaggggatgtctgtaggcagtcctcacggatcacagccacactctagatcccacagtacacatatgaacatcttagctcccacagtaatgatgatctctaaacacatagatggttctttaaatcagtgggcagtcacttttgctgataagtctgcctttaccactgttctaactgtatctcacaaatttagatattgcggtcatcgatttcacctcaatgacctggcatgtcattcagttttaccactgttattgacatcctctcatcataatgctctattgactcctgaattagattgtcagtgggactcagacaataaattaagtagattaatggaccctgtaaaacatataaaaggttcctcgaaacaacctcttagaaatgcagcaactcgtacatttcatgacccaaatgcaatctacagtgaacttattctgtggcgtgtagacccaataggacctttgtcatacactggaggagtatcagaattggctcgaattaactctttacatacctcagcgttctctaatgtggcttggcttccaactctcattcccagttactgtctaggtaagtgttcattgtaattgtgaaattaacacaagcttttaaactattatttgttatatacgaaatggtttatatttgttgtcattaagatttttaataagtattcagttttcattaaggtgatttttaataaatattcagaatacaggcatgagactgatttttagaacttccagaagtttttaacsttttctctcataatccattttttaattaaactttttgttaataattttgtatctacttattgtgcctgtttaattatgattctagaccatggttaagcctaaaaaaaatgtgaatacttgtttcttatcctttagccaataagaaaaatacactacatgtttagaacccagaggccttgttttcctttctcaggcacatactgcaattctgcaagtgcttgctttgttgcttctgatggcaaaaatctgagactctatcaagctgtagtggatgcaaggaaattattagatgaattgtcagacccagaatcttcagtaagtatttaataatctttattaatttatctaaggagataaagaattctcttttgactttgtctaggacctgtgtttgttagttgctgtttagggagtaagtatatgttctgggctgcatatgacatatatatgacacatttattttttcctaagctgtgttccaaggtacatgaatcaaaattttagtgtacataccacacattaatacattttacatgaaaagaaataaaaaggatttttttctaaaatattatttgtttgtaacatattttactctctagtttggttctgttagtcttactttgcttaaaagaagttttaaggcatctttaccaagctgtatgtttaggttggaaaattggaactttttcaagcttgattcaccattttaaaaaattctctggttagaatttgttatcagtgggtggcagcatctcattctgatagttctgtatctgagctggaagtcatatatgttagtatctagagttgaacagtagattttccatttacctataaaaacractattctaataaaaatgtttccagtattgaaaaccaatgactatttttgagcatctactatgttctcctagatgtagagggaatacaaaatataagtttcagacctacctttaaggagcttttaatttagctgaagagagagcttattaataaaaagttaagtagcagtttaagacataagaagaggagtctaagggtggtatgtaattaattgccaaaaggatggccctagaagtgtttcattattcagaggagagagagagatcagattaaggtaggcatagaattctttattaaggacaatatttgggttcattcttgatgagtggataagatttagaaagataaattctttgtctttgcctgagtgagaaaattgcctggaagtaagtatagatacaggaaagtacatgtgtaaagcttgttccagaaacagtgagaaaaccatttggattggagcttaaggtttgacatagagaaagtctagaaaaatagaatcatagaactagaattggaagatattttaaaggtcacctggtctcaccagccatctgatgctttattcccctctgcttcattcctgccaatttgtcatctggccatcgatgagggagactcaactctaaatgcagctcattctatccttgaatagctcacacaatcatattgaaacgctatttgttttgtgtacattctacttgctagtgctagttctacttagaataaatctaatatttcttgcgtatgagagtacctcaagatattaaaagacagctttcttgtaacctgtgaaccttactacctcaggccaaayctgctccccctgtgcctatcaagtttctttatctgttttacatttgaccctggttactcttctgagcagttttcagtttgtctgtactctgagccttgtaggatgactaaaacatagcaatattgtgacctctctcattagatacatttatgttttgacagtcactccacattcttcgtatgtaattgactcatcatgagctgactgtcaatatcccgaagtctttccccctccctgcyctctgctaaaccttgtcttctccattctgtatttgtacatttggatttggggtccaaatgtagacctatttttcctattacatttcatcttgctaagcacaactaaacagtccaatctctcagtatctttttgaatctggattatgttatttaatrtatttgtttttgctttatgactatgtcaccagcctgtttgaagagtgttatacctgcaccatctgagtcagttattaatatgataaataggcaggtctgaagaaagagcctagcagtatacatttgaaatctttctccattttcattttttggaatgttttccagcttgtttcaaggatttctgtgagacagcttgccatatactttgctgaaataaaatacagtctttctatcttctgcagtcaacgaagaaagtcaaagttacatgaggtgatttgttttaatatatgataggtgtaatgtgcacaccttgacatcacttggtgaccaaaacattgtactaggtagacattaagctccttggtctgccctgcagaagtatgttcttttcctttttgaaaatgggaatttttgcctgtttttagttttttgctattgatgtcattctccatgatttgggggattttgtgttttcttatggttctatttgttctccattatactcagtgttttgtttttggtggttcctcaaggttttataatatgcatctttaacctctcatagtctaccttcaaataataatatagtactcaaaatataatgtagccaggcacggtgactcacacctgtaatccaagcactttgggaatgagatgggaagattgcttgaccccatgagttcaagaccagcctgggcaacatagtgagacccccccatctctaaatatatacagtaaacaactttcaatagtgtccccaatctccctctcctgtggtcttcagcatgcatgtcctatgaatgttttgttaggtttatacataagtatttcatttattctactgactgtaaagggtgctgtctttttaatgttggtgtccatgtagttatggccagaatatacaaatacaattgaatatacaaatacaattgaattttgtatgtttatcttatatcctgtaacattgctgaatgcatatattaggtgtaggagtgtttttggtagatttcttggacttttccatgtagataatcatctcattataaatgggaacaattttatctcttcctttctaatctgtatggcttttrtttttcttattttgttgcagtgactaaaacttccaactccatgttgaataagaagtgagattggatgttcttgccttcttcccatttttggaggaaaagcattcagtctttgatcattacatataatgttagttgcaggtttaaaaaatttttttaaaatttttgtgggtacatagtagatgtatatatttgtggggtacatgaaatgttttgatataggcatgcaattcttagtaatcaaataatggaaaatggggtatctatcaccgcatacatttatcctttgtgttacaaatgatctaattacactcttctagttatttttaaatgagcaattaaattattgactatagtcaccctgttgtgctatcaaatactaggtcttattaattctaactatttttttgtacacattaaccatccctacctccctgccaatcccttacgacccctcctagcctctggtaatcayccttctactctatctctatgggtccagttgttttgatttttagctcccataaataagtgaggacatgcaacgcttgtatttctgtgcctggcttatttcacttaaaataacgacctccagttccatccttgttgctgcaaaatgacggaatctcatttttttttttggccaagtagtactctgtcgtatgtaagtaccacattttttttttcttcatccattcatctgttgatggatacttaggttgcctccaaatcttggttgttttgaacagagctgcaacaaacatgggagtgcagatacctcttcagtataccaattttcgttcttttgggtatgtgcccagcagtggaattgctggattgtatggtaggtctattttagctttgtgagcaacctccatactgttctctatcatggttgtactaatttacattcccaccaatagcatatgagggttcccttttctccacatctatgccaacatttgttattgcctgtcttttggatataagccattttaactggggtgagatgatatcttattgtagttttgatttgcatttctctgatgatctgtgatattgggcaccttttcatatgtctgtttgccatttgtatgtcttcttttaagaaatatctgttcaaatgttttgcccattttttgatcagattactagattttttcctgtagagttgtttgagcttcttatatattctggttattaatcccgtttcagatgagtagtttgaagatattttctctcattctgtgggttgtctcttcaccttgctgattgtatcctatgctttttaacttgatgtgatcccatttgtgcatttttgctttggtttcctgtccttgtcatatattactcaggaaatgtttgctgagaccaatgtcctggaaagtttccccaatgttatcttgtagtagtttcatagtttgaggtcttagatttaaatctttaatccattttgatttgatttttgtatgcagttaatgataggggtctggttttattcttctgcatatggatatccagttttcctggcaccatttattgaagagactgtcttttctccattgtatattcttggcacctttgtcaaaaatgagttcactgtaggtgtgtggatttgtgtctgggttctcttttctgttccattgttctctgtgtgtgtttttatgccagtaccatgctgttttgattactgtaactctgcagtattatttgaagtcagataatatgatttttccagttttgttctttttgcttaggatagctttggctattctgggtcttttgtggttccatatgaattttaaatctttaaaaaatttctataaagaatgtcagtggtgtttttatagggattgcattgaatctgtagattgcttggggtagtgtggacattttaacaatatcagttcttccaatccatgagcatggaatatctttccattttttttgtcctcttcaatttctttcatcagtgttttacagttttcattatagagatctttcacttctttcatgaattcctaggttcttaatattatgtatggctattgtaaatgagattactttttgtttgcttgtttgtttttgagacggagtctctgtcacccaggctggagtgcagtggtgtgatctcagctcactgcaaccgctgcctcccaggttcaagtgattcttctgcctcagcctccagagtagctgggactacaggcatgtgccaccatgcccggctaattttttttttttttttttagtagagatggggtttcattgtgttagccaggatggtctcgatctcctgacctcgtgatctgctcgcctcagcctcccaaagtgctgggattacaggggtgagccactgtgcccagctgagattactttttcaaaatttctttttcagattttttgctgttggcctatagaaatgctactggtatttgtatgttgattgatatcctggaactttactgaatttatcaattctaatggtttttggtggagtctttaggtgtttccagatgtaagatcatgctttctgccaacaaggataatttgacttcttcctttccaatttggatgccttttatatctttcttttgtctgattgcctgagctggcactttccgtactacgttgaataacagtggtgaaagtgagcatccttattgtgttctagatcttagaggaaaggctttcagtttttccccattcggcatgatactagggtatagaaggtatgttccttctatacccactttttttagagttttcatcatgaagggctgttgaattttatcatgcttttttagcattaattgatgcwaaaaaatttttgtccttcattctgttgtccttcattctgttgatgaaatgtatcacattgattgatttgtatgtgttgaaccatccttgtgtccctgttatgataaatgatcttttaatcattttaatcatattgttgaatttacttggtagtgttttgtttaggatttttgcatcaatattcatcagagttattgacctgtagtgttctttttttgatgtgtctttgtttggttttggtgtcaaggtaatacggcctcatagaatgagtttgaaagtattccttccttctctatttttcagaataattttagtgggattggtattcgttcctttttatatgtttggcagcattcagcagcaaaaccaytgggtcctgggcttttctttacttagagactatttattatggctttgatcttgttacttgttttactgatctattcaggttttggacttcttttgtggtttagtcttgataggttgtatgtgtctaagaatttgtccatttcttgtagattttgcaatttattggcatatagttgatcatagtagccactgttgatcctttcaatttctttggcatcagttgtagtatcccttttttcatctctgattttatttatttgggtcttytctttctttttcttagtctgggaaaaaacttgtcaattttgttttatcttttcaaaaaattaactttttgttttattaatstttgtatgattttctttgtttcaatttaatttatgctctgatctttattatttcttttcctttaccaattttgggtttggtatgctcttgcttttctagttctttaagagtcatcgttaggttgtttatttgaagtcttccttgttttttgatgtaggcacttacagctataaacttccctcttttagtactgcttttgcagtatcccatagattttggtatgtcatgttttcattatcatttgtttcaagaaatttttcaattttctttttaatttcttcattgactcacttgtcattcaggagcatattgtttaatttccatatgttcgtatagtttccaaaattccttgttattgatttctagttttattccaatgtggtcagagaagatgcttgatattatttcatttcttaaaatgttttaagacttgttttgtgacctaacgtatggtctstcctcgagaatgatccatgtgctgaggaaaagaatgtatattctgtagctgttggatgaaatgttctgtaaatatctattgtttttgatagtacagattaagtctgatgtttctttgttgattttctgtctrgaagatatgtccaattctgagtgatgtcgaagtctcaagctatgattttattggggtctatctctttctgtaactctaatatttgcttgatatatctgggtgccccagtgttgggtgcatatacatttaaaattgttatattctcktgctgaattgaccccttcagcattatatagtgaccttctttgtctcttcttacagtttttgtcttgaaaactattttgtctgatacatagtatcagaaaataatgatactgatatcagtatatctgtctgatataagtatagctattcctgctcttttttggtttccattggcatggaatatcttttcccacctctttattttcagcctgtgtgtgtctttatgtgtgaagtgtgttttttgcaggccacagattattgaattttgtttacccattcagccactatatgtcttttgattggagaatttagtccatttagtccaagtaattagtaagtaaggacttactcctgccattttgttatttgtttctggttgttttgtggtcttccttctttatttccttcctgtgtttcttttagtgaagttgacttttgctggtggtgtgatttagttttttgctttttatttttggtgtattcactgtatgttttctaatttgaggttaccatgaagcttgcaaatattaccttacaacccattattttaagctaattatgacttaacactgtttgcataaataaacaagcaaaaagaaaactaataaaggctctactccttaactttgtcctgctacaactttttgttgttactatttgtatctttttgtaccatctgtatcttgaaaagttgtaattattatttttgattgattcatcatttagtctttctacttaagatcaatttacacaccacagttacagtgtaatattctgtgtttttctgtgtacttactattaccagtgagttttgtaccttcagatgacttcttttttttttttttggaggcagaatctcgctctttcacccagggtggagtgcagtggcaccatctcggctcactgcaacctctgcctcctgggtgcaagcaattatcctgcctcagcctcccgagtagctcactcgcacactgccacgcccagctaattttttgtattttagtagagacagggtttcaccgtgttgcccaggctgttcttgaactcctgaactcaggcaatctgccctcctcggcctcccaaagtgctaggattacaggcatgagccaccacgcctggcccagatgacttcttattgctcattaatgtcctcttttttctgatttaagaactcctgtaacatttcttgtatgacacgtctggtgttgatgaaatccctcagtttttgtctgtctgaaaaagtttttagttatccttcatgtttgaaggatatttttactagatacactcttctagggtaaatttttttttcttttcagcacttcaaatatgtcatgcctttctcctggcctataaggtttccactgaaattctgccgccagacgtattggagctccactgtatgttatttgtttcttttctcttgatgctgttgggatcctttctttatccttgacttttgggagtttgattattaaatgcctcgaggtagtcttctttgagttaagtctgcttggcgttctatagccttcttgtactcggatattgatgtctttctgtagtcttgggaatttccctgttactatccctttgaataaactttccacccctacctctttctttacctcctctttaaggtcagtgactcttagatttgcccttttgaggttattttctggatcctgtagatgtgcttcgttgttttttattcatttttcttttgtctcctctgtgtgttttcaaactcataaattatttcttctgcttcatcaattctgctattaaaagactctgatgcatttttcagtatgctagttgcattgtttagctccagaatttctgcttgattgtttttaattatttaaatttcttgttaaatttatctgatagaattctgaatttgttgtctgtgttatcttgaatttctttgagtttcctcaaaacagctattttgaattctctgtctggaggtcacatatctctgtttctccaggattggtctctggtaccttatttggttgatttggtgaggtcatgttttcctgaattgtcttgatagttgtagatgttctttggtgcatggacattgaggagttaggtatttgttgtaatcttcacagtctgagcttacttgtatctgtccttgggaaggctttccagatatttagaaggacttgggttttgtgatctaagctgtatctgctttggggggaccccaagcccattaatgctgtggttcttgcagactcttcgaggtactgccttgatggtcttggacaagatctggaagaattctctggattaccaggcagagactcttgttctcttcttttactttattcctaacaaactcccattctctctctccctctctctctccccccacccaccccccttctttctctctctctcccaccccctctctctccctctctctccttccccctccctctctctttctctctctcttttctgagccatctagagatgggagtggagtgtcacaagcacccctgtggccatcacctctaggactgtgctgggtcacacctgaagccagcacagcactggttcttgcccaaagcctgctgtaaccactccccagctaccacctatgttctctcaaagccctggggctcctgcagtctgcaggtagcaaagtcagccgggcctgtgtccttccctttagggtgacaagttccctcatacactgggctggtctagaagtaccatctgggaggtagggagcagagtcaataatcttagaaatctacctggtgttctattgtactgtggccgagctggtactcaaaccacaagacacagtccctccyacccttctctctcctttccaaaggcagacgagcttcaccctgtggccaccaggacttcaggcctacagggagtacttccagactactaccaatgttttcttaaggatcaggagctctttggttagcttgttgtaaatgctgcctagtctgagactcaccatttcagggcattgggctcccttctggcccacagaagatccagaaatgctgtaagagccaggtcctagaactggggactccaagagcctgcttggtgctctactcccttgtggccaagctggtacctaagatgcaagataaagttccctttacttttgcctctgcttctctccaattttaatatatgtgctgtcgaagcgagcacattgcccctccttttctctagcaggagtcttgccctgtagctaccatagctgggaatgtgccgagtctcacctcaagccagccagtctcagggtctcatccaagacccctggcacagtacctggatattgctgctggttattcagggcccagaggctcttcagttagcaggtgatgaatcctgccaggggtctttcccctcatggcagtggattcctttctggcccagggtgtgtctacaaatgtcgtgtgggaaatagggcctggaaagggagcctcatgactctgactggtgtcttatcctgctgtagctgagctggtatccaagatgcaaaacaaaatcctccccactcttctgtcgcctctcttmaagcagaaggaaggagtctcctttggagccgtgagytgtacagcctggggttagggaagggatgatgccagcacttttttagccatccygcctggtgtctcagtaggttgcatgcctccccagcccactgtctttggcccagttcagccctaggactcatctaggagttgcagaccttgtggcctagattgcctttcaagtttatttaaggccccagagaacctgagccttgtggtggcaaggcttttggggaatcaagctcagacagataggatcagcgattcccctmtgggtagggctccctccatgggtgagcgtcagctgagtttggtctggtttttctttctgctatataacaaggcagcactgacttcagtgctcacagttgcttgctcttcctttccccagtgcacagaaactctctcagcaccacgctgctgctgccagggtgtgggagaagagtggtgttggtgattcaagtgtgtgtttcctacctcttcagtgcttctttcagtgataatgaagtyaaaactgggtactgtgaatgcttacctgatttttggttcttatgaaggtgctttttttcgtatagtggttaaattggtgttcttgcttgggggacgattgggggagccctctattctgccatcttcctctattcctacctccagctgttgggttatttgtagatactctttatcaagttgaggaatcaagaaaattaacaaacctagaggagaacttcctcatatgttttgatttcctttgagaatttctcttcgaccctcgattacttagaagtgtaagatttagcttccaagcgtcctgttactgatttctagtttgattccgtcatggtagaaaaatgtaccgtatgatttcagtcctttttagtttgttgaagtttgtttcatggcccaggacctggtctattttagtacatgttccactcactaagcacttaaaagaatgtgtattttgttgttattgggtagagtgttctatgaatgttaattaatcctgttttgattgatggtgttgttgagttcttctgtatctttactgattttctccctaatcattctatcaagtcttgagagcgaggtattgcagtctccaactatattgtgaatttgtctgtttctccttttacttctataagtttttgcttcacatagttttcagcactgttctttggtgtatatacatttagttcaaattcaaggtgttggcaaggccatgctctttctgatattcaaggggaggatccttccttgcctcttcctagattgctcctggcagtccttggtgttctttggcttgtagctgcatcactgtcttctcatggccttcgtccatctgagtgtctctgcgtatcctttttttgtaaggacagaagtcattagattttgcacctactgtaatccagtgtgacctttttttaaactagttatgtctgcaagaccctacgttcaaacaaggttacattccgagatgctgggtggacatgaattttgggaggacactatttaacccactactctgatcaactttsttttctcatcagttatatttgtagttgcatagtcaggaactttcaaagtctcttgagcctccagacttccttgagccattttgactttgagacccccatgctataaggcattctgggattttttaacctttctaaaatatagactatagagtcttgctcttattttcagtcttaaactcttaagatgacatgactactttctgtcacatttccattatttctgctcatcgttttgattttcttaatacaatagcagttctcctacttacttcttctactaattgtgaggcaaaatgtagcaagaatttgtcacatgctctcctattccttaaatgagatttttagtagatgacaagtaaaggctagctttttaaaaattttgtaacagatacttgaaagctataaatattgttctgtaggtagaggggtagatttaggaagcacaggaagggaaataaagtgattaacttgcagggtagagtagaattggtaggtactggaagcatggagatagcagggagtctgttgaggccaactaagcatgtgggaaaacaaacctgatctaaagtgggatttcatagtctaggaaaggagaagagcagagcttagtagctgcttgaatatggatatgaaaacagaggattccaagtgtgatagttgttccagtagctatggcaagatagttttgaggtatttacaatgagttaaatttgggacatgttgaatgtgaggtgaccttggttttagattcctaagtttggcttgtttgtttatttatttattttatgtttttatttttttgagacagagtcttgctctatcagcccaggctggagtgcagtggcatgatatcagctcactgcaaccgctgcctcctaggttcaagtgattcttgtgcctcagcctcctgagtagctgggactacaggcgtctgccaccatgcccagctaatttttgtatttttagtagctaggggtttcaccatattggccaggctggtcttgaactgctgacctcaagtgagccagccgcctcggcctcccaagtgctgggattacaggcgtgcaccactgcgcccagcccctaagtttggtttagattggagatactcctaatgttccacattaggtaccagtgcacatttgggatttattattacaaagacagtacttgaagtcattagatctctaaaggcattagtaatagttaatgttcataaatatgactgtcagtcatcaagaagagatttatgtttagcaggctatttatgaagacagggattaagttttttttattccatttaaagtatcaaagatacagttgttttggtgcctaaaaaataagcttttgaatatctagattggtgagatgctagattggtgagatccattcattcaggtatttagtgagtacttactaaggtattctacaaataaataaaggagaagtcatgatgaaagatagggtggtatagtgtgtgctgctattagtaaaaacaagcttttaaagtaggaatgatctaaagtgtaatttgttttcactcagtaacttatttactcaatctttaatttttattgaggactcactgtgcataaccttatagtacatggaagaataaatgtgcatattgtaccaggtgctaagagtgttaaaatgaatagaagtagtccctactttcaaggatcttgtatctatagagtcatataaatatgtacatatagtatgtaataagtggtaaattagaagaaaaggctgatttcaggatgtgaaattcatttaattggcctccacttaagccagctcattggattcattgatgctgtccattccttctataaaatataggatggatgctcatagggaatagtataccaggctttgttgattccacaagttgacttgtaaccttaacaataataacagctgggaaagttatttaacctgaaaaaaatgctgctactactactactactacyactaccactactactactactactactactactactactactactactactactagcaaacttttatctagtgattattgtatgtcaggctgtcttctaaatgttttatatatattaactcacttaaccttcctggtaaccttaagaaaaatgtaatattactatccatactttagaggtaaggacactgaagcatagagaaacttaattacttgtcccagtttagtcagctagcaatggtaggaccaggatttgaacccaagcagcctagctctagagaccaaactcttacaactacggctgtcactcaagagccagctgtgtttattttcaaccttgtatatgtcaagttgtacatattagtgtcattcttaacttaattaaatattatataaattgatgaaatgtgagtataaaaaacgtgaatgtttttataaaaataagtgctttggaagcaattttgctaaaaatcactaattaggcatggtcaaaacaactgtaaaagattcaggaggaaatggtttaagaaaaactgcactcgaattgctttgtaggtgtctttatgtttttactcccatttatgtatttatgtatttatttatttatttattttgagtctgaatcttgctctgtcatccaggctggagtgcagtggcgygatctcagctcactgcaacctctgcctcccaggttcaaacgatactcctgcttcagcttcctgaatagctgggattacaggtgcgcactgccacgcccaactaatttttgtatttttagtagatacagggtttcaccatgttggccaggctggtctcaaacttttgacctcaggtgatccacccagctcggccccccaaagtgctgggattagaggtgtgagccaccgtgtcagcctattcccatttaaagaactgaaaaatacagccagggccttacaggggtggcatacgcaagaaagacctgtaattcccattagcaagcccatactccagggtcttactcaacaccaaaatatcagttatttgtatacgtttatgtttaaaataaaacaaaatgtttaaagtatacatattattttaaaaatgattctctgggttaactgaccttgctgagtgatttgtcctctctctgtccaatgctgtcagttaagatggcttttcttatagttagaagcaacatttaatccagattgtgatggttaggaaagaatttctggtggagatagatatctgagataagacttactgaatgggtaagacatgaaagtgaaggaggaaaaggatatttcaggtagagataacagcaactaacaatgcacagaggtagaagaatgtgcatagtaaactgtaagtagtttattacagccatagcatagaatgtgaatggctgttggaaatagctgagactggataggaagttagaggttagattgtgaaaaaatttgtattgctttctttatgattttgctctgctttctcaaagtctgttctcaacataggagttagaatgatgcccttaaaacgtagttcagggctgggtgcggtgaaccctgtaatcctagcattttgggaggccgaggcaggtggatcacgtgaggtcaggagttcaagaccagcctggccaacatggtgaaaccctgtctctactaaaaatacaaaaattagccaggtgtggtggcgtgcacctgtagtcccagctactcgggaggctaagacaggagaatcacttgaactcgggaggcgcaggttgcaatgagccaagaccatgccattgcatttcagcctgggcagcaagagtgaaactccatctcaaaaaaaaaaaaaaaaaaaaaamcaagagactttgtcaaaaccagagaagcaaagaaggagattttgaaaatattattaatgtgtttgtttccattaaagccagaaaaataaaactataattagtccaatttctggtataaataaatttaaacttaaagtaatatgtgagttttaatgcacctacttttcaattttttagcattttttaactactttgatgttctggaaaaatgttaactacagccaggtgtggtggtttatgcctgtaatcccagtgctttgggaggctgaggtgggaggattgcttgaggccaagagtttgagactagcctgagcaacatagtgagaccctgtctctacaaaaaaattaaaaaatttgtcaggcatggttgcatgcacctgtaatcctagttacttgggaggctgagataggaggaccacttgagcccaggagttggaggccaatagagcaagaccctgaaaaaagaaaagaagaatgttaaccattaaaaaaaaatatacatcaaaacacatatgtgcagttttgatgcacattaatggtatcagtgtggctcattaagatactcttgggttctatatttaaatgtttgatattttgctcattatggattgtttacattaattttgattttaaaatattgcattaaaatattatttttcttgattattgaatttttgagcactcttttaaattttgcaccctgggcgaatgctttacttcattctaatttccagtagtatcttccactataaaatgagttccttggttggaggtgatgttgagtgagattctgtagaattctggaattctgtagtgtagtgttcagaaagtctgttaattatagtgctggcagagagttgtgggcagggaaagcaaatccttagctggaatacataactattcttgtgaggggatctcaaccttggctgcacattggaagcacctcaatctctgtgggtgggacctaagcatcattgattgttaaagctctccaggtgattcagtgtgcagccaagattgagaaccagtgatctacagcagtccttcttaaactttaatatacgcatgaatcctatggaagtctcattaaaatacagatgtcttagtttcagggagtaagtatgcattcataaaaagcttcccatcactgctggtccattgactacactttgagtagcaaagctttgttgtgtgctacaaaaatttcactgttttcacctcaccaactataggccacagttgagtccagatttcaatgaacaaacccagcagactgttaacaccatttctttttttttcctttttggacggagtctcgccctgtcacccaggctggagtgcagtggtgcaatctcggctcactgcaacctccgcctcccaggttcaggtgattttcctgcctcagcctcctgaatagctgagattacaggcaccctccatcactccccactaatttttatatttttagtagagacggggtttcaccatgttggccaggctggtctcttaactcctaacctcaggagatccacctgccttggcctgtcaaagtgctggaattacaggtgtgagccaccaccctggccctgttaacaccatttctaaatgtctgagctaacactttaaatcatgaatcttgggtgaacatacccatatcagtaaattyagccctacctaactacatatttttttcttttgatctaataaccctagaatcaattttcttacatgctctctggaatcctactgatacaaataagaaagtttctacaactccagtgtatatgcttgtacttatatctccctaccttgtacttatatctctaggcgaagctagcctctaacccctcttattggcctttttgaggtagtgaaaagtggtaaaggtgggtgctgaggagaatgggcatttctttctgaggcaaccgtttcagatgaagttactgaaaggtttttatgcaagagaaagctggttggaacatgggtgaggaggactgttctttttagcagaaagttttgggattttggggttccaaagttaggcttcatttgtttgttcatacatccttatcccaaggcacaagagtcccacttcttctcaacccttgcccttaccttcggtctggcagggttgtacttttaaatggcattgcacatctgcagaccactcaggcattgggccagatcttcagccatgtctgtcttgggctttaaggttgcaaaaatgaagaagatatgataccttgaagttatatgctatttttgtaaacattatagttttctctctgcttaactttagacttaacatgagaatgagtatggaaagttgaagtatttctttgaatgtattacattccattgccaatcagtgaatatttagagggggccttaaatgtccaagatgctgtatcatattgacattagattataatttgttggccattaacattttgtgttttttatttacagaaacttattggagaagtgtttaatattgtgagccaacagtctactgctcgacctggctgcattattgaactcgacgcaataaccaaccaagtaaaaacatgcttgtgaattggtgatattcgtatactttatcccatggtgttttatatgtatatgatatatgtcattctcagaataattttcttgtttgttattaaatgcagacaacttatgttgattcccatagtgaaaatctactaatgatttagggattatttttctccttgggaaaccaagaactgtatgttctcatttataagtgggcgctaagctatgagtatgcaaaggcatgcagagcaatataatggactttagagactcagaagagggagggtggaaatggaactagagatttgaaaaaccacatgttaggtacagtgtacactacttgggtgatgggtgcactaaaatctcagaattcactactagttcatccatgtaacaaaaaaaccacttgtaccccaaaagctatttaagtaaaattttttaaaaaaggaattattcttctccagttgaattgtatttgtagcaaaggaaatttgattcatttagagaaaccatgaccttgatcttgaaatgctgagagaaaatacagtgcagctgcatagaagggtcgggttgtggtttctcattttatattattactcttttcaactcaatagagggtaacctcagtttcagagtgtttgccttgttaggccccatgttgggtacttttgtgaggtcctttaaaatgcagatgaaagtcagatycaagtggacatatactttttaatcacaggtcctttgtgtagtattcctccccagctactacctaggaaagaaggagaacccttctccctagagggagatgtaaaacccattttagccctcaggatatttgtttctttaggactatgtttatggtctaagggatagaactaacatttattccaaatgtgaaaaggattagtttggtaargaagctaccaatagttttaaacaaggaaatgaagaaagagccaactatagttgaaagcaagtatagagttacatcataaattttctttagtgtcttgcactttctattggggaaaatgtactcatttctgctaatatagataaaatacatcatctcttgatagcagaactggggctgccagacccatattgctaatacctcctgggaaatgcttaactttttaatccccagtgccccacctttcttcagattcagcctgtgatttcttttttctactcaataggaatgtagaagagtgggttggcttccttcctatagataacttaatttttaatggattggatgttaaattcatcccctactttagcctcctttgcactcattaccatgggatattaacacagtctgctctcacaaagcagtttttttacttcatatttsctcaacactttttcccctgctccttgtgcctatttttaacacaggggctggtaaactgtaagcaataatgaatgacaaagtttaaaattctttctaggtttgttcccaatgtgttgtatgatttctatatctgtgaagacatcacccttctctttactttcatctattgtttgtcccttggggaaatgacctcctagacaatgaatgtgaagagatttttaatgtttctacctagagaaacacaaaataccctataactttcataaaattgtatggcccaacctaatattataatccttttatttctttctattatgtaaagaggcaggttttcctttattctataagattatagactcctcatccaatgccaagataatcatagctgcttccttttcttgaaatctctgggggagccatctgattgattgtcttaatacacttccaaaataagcttttktttggatctagcctttccttgaacttcagttcctgttaaggttctaagtagccattcgtgatagtcttaaaacatggtcatggagcatagcagttgacagtgatgtttcatccatccttcgaggggttctagttacttatgtgtaagtttagttctctagagatgtatcatcctgctggctgttataggatccctcataattcccactagacagagctattgggatacttcgaggagctttctgggttttgttttgttttttggttctccagtggaattgaaaaaattacaagttgtgtagtagtctagtgtgtcttacatagtgcagccctccctagtcagttgtgaatctgatgctttcaggctcaaagtggtgaaggttgcttaactgttctttaaatttggaatttgggttttttagcatctttttttttttttttttcctgagaagcaaacctgttgatttgtttgtactagagctcttctattctgctattggctgtgacatttttgaaagtaatttttctctgaccaggatagttttaatgattctcttctgttgcttttttctttctaattagtagtggtaaagaatagaaattgttagatatatttcttctgcattagcattggggaggtgacagatgggagatgggagacagggaatttcaaagataaaacctcttcatttttttttgtatttgtagtgtggctcaaatacacagttgcttcatgtgtttcaagaagacttcattataggatataaaccacataaggaagatatggagaaaaaggaaacagaaatattttttcagccatcacaaggtactttaaaaaaatagtctgcatttgtttaccttcatgctaaaaaatgatctctaagttttcactgagtatggatcttcaaaagttaccactctcataatttttgacagattcaccagttagttctgtcaaaattgcttgcttgtagatgaagagggctgtgggtgaaaattactttttgcaagacaattcattggtgacatcaacttttactaagaaatggtatctgtgaaccttaatttgttttaaaaagtaagtttcttcaactctataattaaattattttgattggtagttccatttggtatcttaaggaaaacagttaattttattacaggttttaaaaaattaccagtaaattgcttcagaccaatgatgaatataagatataaggtatcatgttgtgtgggacactagaaacctcatggaaatagtgaatgcaaggtaccatctcacagttttcccctttgaagtgtggtattttttcctttttgtgaaagtaagtagtttaaccctttcaaaaacaaacaatatgacgtttagtttaaactttataacttagcttaaaatgttcccttcagacgttaaacttttatttaagttttttaaattggcaaataaaattgtgtgtatatatataacttcataattataaaaccaacatgttctatttgaaaagccatgtctttaagaattaagtgtctatggcgaatatttagtttacaaagggttttcagataattaatctcatgtggttacaaattgtgaatatccagatggacatatttaattttcttagtgtagtcttcatcacgaaattatgtatagcatctaaggaaactgtttctatgtaatttgtgcagacaatttccttcgctttagtgaaaatcagattgaggtcctgtattctaagaagcttagctcaaacatcttttcactcgtcagactagtaacttgtttttctttcgtatatctttcttcatacacaaaacttttcttatttgtgttattcaattatgttaagttttatttcactatcattataacagcagtactgctttaccaatttaaaatttacttttctgtagtatcttacctttgcctgggttaatctttttaatatggtttccaacaaatgtagctgccatttatcacattatttctaacaggaaagatatgccagcttaccagaattcaatgcttatataaagttggtacttttctttataatattttaattgacttgcattaaaaattttctttatttctcgcttttgatatttgttatgccactgctaaatcaggccaaaagatttcctcagtgctttcttggttttcctttagtttttgtgtgaaatttctctttcttcctgattttatagctgtgttcttaaaggacttgtgtaggtttctcctcttctctgcctctgctttattttgtactaagttttaatttaaagttaattacccttttagttaagaaaaatgccaaaaatagacaaaattatagtgcataattaaatgaacctccatattcccataatgtaggttaaagattttatcacacttgctttgtctacacaatttttcttttccttttccccccgaattttttttttttttttccgagacagagtttgctttgctgcccaggctggagtgcagtggcgtcatctcagcttactgtaacctccacctcccaggttcaagcaattctcctgcctcagcctcccgagtagctgggattacagctactcggctgtaagcccacctggctaatttttttgtattattactagagtcagagttttaccccattggccaggttggtcttgaactcctgacctcaagtgatcagctcaccttgactcccaaagtgctgggattacaggcgtgagccactacgcctggcccccctgaaatattttaaagcaaatccacctacagtgttgtttcacttccatatgcgtttctaaaaataacttccttacatatttgctgttatcaaattgataataaaattcctcagaatcgtgcaataactactccatatttcttccagttgtctaaaaaatgttgagctttttgtttgtttatgtgtttttgtttgaatctatatccaaacaaagtttacatattgtgttttcattgtctatttaaagagtattttaatctaaagtgataccttatatacaccctcattatgccactgacttgttttagagcaagtttatttttattattattttttattatactttaatttctggaatacatgtgcagaacatgcaggtttgttacatacgtatacatgtgccatggtggtttgctgcacctatcaacccatcatctacattaggtatttctcctaatgctatccctctcttagccccccaccccccaacaggccctggtgtgtgatgttcccttccctgtgtctgtgtgttctcattgttcaactcccacttatgagtgagaacatgcagtgtttggtttttctgttcctgtgttagtttgctgaaaatgatggtttccagcttcatccatgtccctgcaaaggacatgaactcatccttttttatggctgcatagtattccatggtgtatatgtgctacattttctttatccagtctatcattgatgggcatttgggttggttccaagtctttgctattgtgaacagtgccgcgataaacatacatgtgcatgtgtctttatggtagaatgatttataatcctttgggtatatacccagtaatgggattgctgggtcaaatggtatttctggttctagatccttcaggaattgccacactgtcttccacaatggwtgaactaatttatactcccaccaacagtgtaaaagccttyctgtttctccacatcctctccagcatctgttgtttcytgactttttaatgattgccatcctaactggcatgagatggtatctcattgtggttttgatttgcgtttctctaatgaccagtgatgatgagcattttttcatatgtttgttggccacataaatgtgttcttttgagaagtgtctgttcatatcctttgcccactttttgatggggttatttttttcttgtaaatttgtttaagttccttatagattctggatattagccctttgtcagatggatagattgcaaaaattttctcccattctgtaggttgcctgtttattctggtgatagtttcttttgctgtgcagaagctctttagtttaattagaacccacttgtcaattttggctttcgttgccattgtttttggtgttttagtcatgaaggctttgcccatgcctgcgtcctgaatggtattgcctaggttttcttctagggtttttatgattttaggtcttacgtttcagtcttcagtccctcttgagttaatttttgtatgaagtgtaagaaaggggtccagtttcagttttctgcatgtggcaagccaattttcctagcaccatttgttaaatagggaatcctttccccattgcttgtttttgtcaggtttgtcaaagatcagatggttgtaggtgtgtggtgttatttctgaggactctgttctgttccattgttctatgtatctgttttggtaccagtaccatgctgtttttgttactgtagccttgtagtatagtttgaagtcaggtagcgtgatgcctcaagctttattctttttgcttaggtttgtcttggctacgagggctcttttttggttccatatgaaatttaaagtgtttttttctaattctgtgaggaaagtcaatggtagcttgatggggatagcattgaatctataaattactttgggcagtatggcgattttcacaatattgattttttcctgtccatgagcatggaatgtttttccatttgtttatgtcctctcatttccttgagcagtggtttgcagttctccttgaagagggtcttgtaagttgtattcctaggtattttattctcattgtagcaattgtgaatgggagttcactcatgatttggctctctgtctgttattggtgtataggaatgcttgtgattgttgcacattgattttgtatcctgagactttgctgaagttgcttattagcttaaggagattttgggctgagacgattgggttttctaaatatacagtcatgtcatctgcaaagagagacaatttgacttcctctcttcctatttgaataccctttattgctttctcttgcctgattgccctggccagaactttcagtaccatgttgaataggagtggtgagagagggcatccttgtcttgtgctgcttttcaaagggaatacttccagcttttgcccattcagcatgatattggctgtgggtttgtcataaatagctcttattatcttgagataagtttcattaatacgtagtttattgagagtttttagcatgaggggctgttgaattttatcaaaggccttttctgtatctattgagataatcatgtggtttttgtcattggttctgtttacgtgatggagtacatttattgatttgtgtacgttgaaccagcctctcatcccagggatgaagccgacttgatcgtggtggataagctttttgatgtgctgctggattcggtttgccagtattttattgaggtttttcgcatygatgttcatcagggatattggcctgaaattttctttttttgttgtgtctctgccacgttttggtatcaggatgatgctggcctcataaaatgagttagggaggagtccctctttttctattgattggaatagtttcagaaggaatggtaccagctcctctttgtacctctggtagaatttggctgtgaatctgtctggtcctgggcttttttggttgataggatattaattactgcctcaatttcagaacttgttattggtctattcagggatttgactttttcctggtttagtctttggagggtgtatgtgtccaggaatttatccatttcttctagattttctagtttatttgtgtagaggtgtttatagtattctctgatggtagtgtttatttctgtgggatcagtgatgatagcccctttatcattttttattgtgtctgtttgattcttttctttttttctttattagtttggcaagtagtctatctattttgttaatcttttcaaaaaaccagctcctggattcactgatttttggaagggttttttgtatctctgtctccttcagttctagagcaagtttttttttttaaagaagtttctctgactacttacttgtgatgttgtttaaactttttcttgtctactgtattgcctgtacagtggaagttagctctacagacttgattrgatctgggttcaacattctgggtgatgccatgtacttcatatgtatcataccagaaaaaaaaatttggatatctcacttttagtcatattaagattcggaagattcagttggtggtggtgtcattatagtttgacagcagtctttatctcatggcttcttccattgaatattattgatcttaaaccagttatttcattagggattgaaaaattatgattttccaattttatcagttctcatttatttattagctggaaagcatctgtaaagaaaagcatttctttatcaactagggctattggattactttgaaaaacagttctttttggaaaggttaagtgcttagttatttccatttaattgacagtttcagaatgaggagtctgcgcgctggttatctctagctgctrctgttgaatttattgttgttgttggatttctttgtcttttaagtatcaatatgaactcattttaagaaaactctttaatgaactataatatacatacagagaagtactcatataactcaatggatttttaggtatgtaggatatttcartcagttgcagtcattttttaaatgcttacatagtgctatattaggctagtaagtagcatttgaagtaggtcctgtgtccttttgacataacctcattattgtaatagtttactttctttcaggagcaagattttcctgggtttatcttgtagctgtcctttgcaagaatggaatcatccttccaaactgtttcttttttaaaaattattattatactttaagttctgcgatagatgtgcagaacatgcaggtttgttacataggtttacacgtgccatggtggtttgctgcacccatcaacctgtcatctatgttaggtctttctcctaattctttccccttcctagmcccctacccccaaacaggccctgatgtgttatgttcccctccctgtgtctatgtgttctcattgttcaactcccacttatgagtgagaacatgcggtgccagactgtttcttctaatgaaaatggttagaggccacaattttaactctagcagcgctcattaccaatatgttgtcattatgagttttaatgattaaggaaagcttttattatcctgcattagatctcattttcagwtatgaagaatctaattttcagcagggaaaattatatatacaagtaatgtctttttttaaaaaatgcatgaaatttctacaaaattttttctttaccctaccactgctccttcccccacaacttaagttttttttttttttaatgctgttttcatgcaagaaaagcaggatgaatgtttattttattatttctttttaattgccagttttctaaataaggcgtaagtgccccagttactccaggggcatcctgtgaggctggcttgagcttttgtgtgctcagcaccccgcttccttcccttctatcctcctcccattcttctgctgctgctttctttcctttgctttcttttttatgtacccttttttggtatttgtgtgaactcatagtttgtaataggataaatacgttttaacaaattgtattcagttttattctttgatgctcaaaatgtcccctctttgactagtaggtatcctttcatgttagcttttgtgtacttttgacgtaatttcattagtccttgatagctatctaactttcggtacaaaaattatataaaactcctccttaaagtctttcttgccttttcttcccaacttccatgcatatcaagaggtggtggtagcttttaaaaagtgtttttttaaccccataaaaacatactaatttaaatatccttttcctttgaataataggataccgcccaccaccattttcagaaaagttctttctagtagtaattgagaaggacagcaataataactctattctgcatatgtggcaccttcatcttaaatctgtacaagcatgtttaggtaagtaattatagttttatmcagagatgatacatamcaaatttattttatagaatatgctttactttggttaattctgtaaaatgaagttccattaaactgtaaattgagttgctgaattatgtctcttctaaacttttaattacaaggtcataaatcattaatgaaactggttaattctaaaaaccagcctaagggcacattagacatattgaaaaaaaataaaagctttgtttatttttttcagtgaatatttattgagtgtacattatgactgttctagatgtccatagaactaatattgtacttttttgttaatacacattcccatccaatacactgcacatcatcagctttatcatcattaaaataagcagaattggctgggcgcggtggctcacgcctgtaatcccagcactctgggaggccgaggtgggcggatcacgaggtcaggagatcgagaccatcctggctaacatggtgaaaccctgtctctactaaaaatacaaaarattagccgggcgtggtggcgggcgcctgtagtcccagctactcaggaggctgaggcaggagaatggcgtgaacccgggaggcagaggttgcagtgagctgagattgcaccactgcactccagcctgggcgacagagcaagactccatctcaaaaaaaaaaaaaaaaaaaaagcagaattgctgtttgatgaaatatgattgagtgcctgagacttataagcagaactgtttttgtagagcattaagaaatacaggctgggcatgggcatggtggctcatgcgtataatcccagcactttgggaggctagggcaggacgattgcttgagcacaggaattcgagatcagcctgggcaatagagtgagacttcatctctacaaaaaaataaaaaattaattaagtgtggtggcatgtacctatacttgggaggctgagatgggaggattgcttgagccctggagtcagaggctgcaatgagccgagactgcaccaccgcactccagcctaagtgacaaagtgagacccttgtcaatttttccatttcaaaaaaagaaatgcaattatgattaaaaaattacttcagccattcttttgctgtacacatttagattaatctctaaactaattgggaaatctgtagtatgaagcaaagaaattgatcacagattttttaaaaacaaacttttcctttttgagagataattgttaaaatgaagaactgcatggatagccatatcacattgaatctgctttaaactgttaactcaaaatatttgagttgtaagattttattatgtcttgtaattaattgattttatacaactttttatataacatttaatacagtgaaagaataatttgtacttttttgttcacatgtattatacattatcacaattgtagcagttctaactgggccatgaattggcattagaaaagccaaattatgtgacagaacctttaccttcacctagttgagcctaatcttcttgaggcaccaggaatttaaaaattctttcaaagcctttggagttaattctttgcattatatgttgtttgatagaaatgcaagagaagggatctgaaaccagttcatcaggaagagattcacccagcagagaatgtagtaatttctagagttgggcacagaaatgggagtggctctgaagagatttatagrggtagtaacaggtccttgtgggaggacaggaaccatgtgattttgtttgtccccactgcttatgaagcgtgtgtctcactaaagccagggctagagttgagttgcttgcctaccctgtttgtgacagcagtaggtcacagacaatgagattacagtagaggcaaataatgtactctttttagctgtgatagaaagcatctatctttttgttctaatctttgctgcagatttaacagtgtatcctgccattcacatttaacgcttgaatttactgcagtagtgaatatcctgttagaggataaatgattggtttaaattttgttagagaaggaaacatgttgagtaccttctgggtgccaggcactgagattggtgctttatatatrtgaatagatattatccccagtttactaatggagtaagggtatgtaacttgaccaagtcccattatatggtttgtcacagaactaagtttcaaaatcaggccttgttgactctaaagtctttgctttttttcctgctcttattttctttcttagcatgagatatatgttagaaaatagtatgatttacaggaagagaaatgatgtagtttaaccttagtttgctggtgagaaagtagccagagatggtggtgaagtgcctggccaaaggaaacacatctcattagtgataaagccaggagtgggactctgtcttctgactacggatccaagtttgtagtcttatttcattttacaaaaaaatgtgaaaatatttcttacttagtggcctgccattataagatagattgacatgtttaacagaaacaaaagaggattattatttattgratattctggtgctctttgagatgtacaaggcaataacaacacatcatccctgcctttagtgaatttgtagtccaatggggagagacagataaataaataaatatagagtatctcttatatgtcacggaagaacagataactgaatcagagatttacactcactggaagttctttggaagatcaagtcaatatggcttacaaaggctgtcaactaatactatcttaaattttcttagaacttttggtttttgtgtttattcttgaaatcattctctgatttgagtacttgataggaggctactagtctaatgtcttctttgcccctagctaattacatggcctcaggaaaatcactaagctctctgagtttaaatttcttaatctaaaagtgaggcagtatattgttatttcctaaagtttggttcatgatccatctatttcaaaaacacctgggctgctttactgggatctaccccatatcatctaaatcagtgtctctgtggttaggcctgggaatttgcatgttaacaaattcctcaagcttttaatgtgttttaaaggttgtaagcactggactgtataaggggtttcttttagcttttacatgttgtgattcttccctgtcagtcttgcatgatggagttggtgctaagaaagagtaaaattgtaaaaaaaaaaatttaagcttatcagggtaactaagcaaaagtttgaaaattgaccttgtctgcaaagtaatttttttaaaaaaatttattgatgcataataattatacgtatttatggcgtacatgtgatatttttatacatgcatagaatatgtaatgatcatatcatggtatttaggatattcattaccttgaaatttattgtttcttcggattgggaacatttcagatcttctcttctagctcttttgaaatatacattgttgttaactgtagtcattctactgtgctatcaaacaatagaacttatttcttctaccttcatgtttgtacctattaaagagtctcttcacccaccccacaacccttcccattctctggtatctattatgctattatctacctctatgagatccactttcttagctctcacatatgagtgagagaacaggtgatatttgtatttctgtgcctggcttatttcacttaacatactgacctgcaatttccaactgtgttgctgcaaatgacaggatttcattcttgtttatagctgaatagtattccattgtgtatatatatgacattttctttatccatttattcattgatggatacttaggttgattttatgtcttggctgttgtgaatagtgctacaataaatgtgggagtgcagttatccctttgatatactgatttcctttcctttgggtaaacacctagtagtgagattgctgagtcatatggtcattctgttttaaaaagagctctcttttctctatatcctcacctccaaaatacttttaagaagctatgtttcttaaataataacaaagtaatattctagctcctatttatagtaatgatatacatacattttgtaattttataatttatttttaaagctaaagcttcagaaggggcttcctctgagagtctactttcagtccctggacagaagaaygtagattcttctccagaaacctctcctagtgtgagccccatgccacattcttcatcaattgccaatcttcaaactgccagtaaacttattctgagttctagactggtgtatagccaaccccttgatctcccagaatcagttgaagtaataagagcaacgccttcagcaggtaaggtcactttaagactgggcagtggtagctcagagtgataaaatatatgaactctttagtggataaaatagatgaactcttctgaaatatgttctatgttgacattaaaataaagattgattttctattaatgatatgtctagatggttagaaacatgtctttattagaaataatttcctggctgggtgcggtggctcacttctgtaatcccagcactttgggaggctgaggtgggtggatcacttgaggtcagtagttcgagaccaccctggctaacatggcgaaaccatgtctgtactaaaaatacacaaattagttgggcgtggtggcacgtgcctgtaatcccagctacttgggaagctgaggcaggggaattgcttgaactcgagaggtggaggcggcagtgagctgacatcacactactgcattccagcctgggcgggcgacacagtgagactccatacacacacacacacacacacacacacacacacaaacccacaaaatttcctgtgataaatgtaatcagcttgacagaaaatagtgtaaattttttttttttttttttttagacggagtctcactctgtcgcccaggctggaatgcagtggtgctatcttggctcacttcaagctccacctcccgggttcacacccattctcctgcctcagcctcctgaatagttgggactacaggcatccaccaccatgcccagctaattttttttgtatttttagtagagacggggtttcaccgtgttagccaggatggtctcgatctcctgacctcgtgatccacccacctcagcctcccaaagtgctgggattacaggtgtgagccaccacgcccggccaaaataatgaaatttttttttttttttttgagatggagtttcgctctgtcacccaggctggagygcagtggtgctatcttggctcactgcaagcttcgcctcccaggttcatgccattctcctgccttagcctcccgagtagctgggactacaggcgcccaccaccatgcctggctaattttttgtatttttagtagagacggggtttcactgtgttagtcaggatggtctcgatctcctgaccttgtgatccgcccactcggcctcccaaagtgctgggattacaggcgtgagccaccgcgcccagccaatagtgaaaatattttaatgtgaggtgtcttgcctacactttggaatataatgatagtaaaattttgaagaacaaatacattcatttgtaaaccactgaggctttttttaaaatttaagacttcattcacattgtggtaatcacgtctcacctttattaagaatgtttgaacaacagttggcagatactctgaggaaaaatgtaggataaaagactatagtttgggtggtctggaatgatactgactttagcaaggtagatattttgagggcaagtctggcagctgtgtttaaagtgatctacttgcagaattttaattggggagtttctagaatagtgtttttgggaaaccaaaattggaggttcggggccgctaaaattactggtgaatgatattcagtataggtgttttcttattcatccgtaagacaggtttgcattcacagttggaaagatcatattgagaagagtgtactcttgggcttttgtggctggtgcagatctaggccagtttgttaatctttcaaaatatttgaaaggtttgggttatactcaaataagtttattggagttcgtgataataaattatattttacagacgccttataaaatgtcttatttgacaatagtaatctaggggaaacagtaactgatcccaattgtttagatggaataggctcagatgattaagtagctttcccactgttaatgaaattattgatgggttgaaactcaaatccagatcttctgacctcagatctttaatctctatatccccttgtcttacagttgacaacagatgtgcattgttagtctttggcagtcaggaatagataagagggttctggttcagtgctaagagaggatgaattaaacttggtaaaatgggtaagatctattgrtctgttttgcggtctgaaacaaaatttggtgtaccacctggggtctgrattatttgagrgaaggttaggggcatttgaaaggcaaattgtaaagctcagttaagtattcatgatgaaaatgattaaatatatagtatgaaattctaaggaggcatgttgtgaaggtaaatataaataatagaaacacattaagggctgacttgtttcagtgcttttgagttttattttaattaaatggttgcctcatttaaacttaattacctaaaaacaaattaagtgattattattgcataccttgatttcactgatgggctcttcaagacctttatagatatgttggccaatggacatttagtgggatactagttaagaggaagactgcagagatattctgaagaagctcatagtgactttaaattgatcacattccagaatttgattactaccatattattttgtggctttattattattacaactaactatttgctttttcttttttaaggccatctgagttcttcttcaatttatccagtgtgccttgcaccttatttagtggttacaacttgttctgacaataaagtacgcttctggaaatgttgtatggaagccaacccagagtgtaataaaagtgatgagaaagaaatttatcattggaagagatggcctttgatgaatgatgaaggagaagataatagcagtacagtgagcattgtgggaagaccagttgctgttagctgttcatacacaggtcgccttgcagtggcttataagcagcctatccaccataatggttttgtttctaaagaattttccatgcatgtttgtatatttgaatgtgaatctacaggaggatcagagtgggttttagaacaaacaattcatcttgatgatttggttaaggttgggagtgtacttgattcaagggtcagcgtcgacagtaatctgtttgtgtatagcaagtcagatgcactcttgagcaaggatagatatcttattccgaatatcaaacatttagtacatttggactgggtatcaaaagaagatggctcccacattcttacagtgggagtcggtgcgaatatcttcatgtatggaaggctttcaggaattgtgactgagcaaaccaacagtaaggatggagtagctgtcatcactttaccactaggtggtagtatcaagcaaggagttaagtcaagatgggttcttcttagatctatagacttggtatcttctgttgatggtactccttcactgcctgtttctctctcttgggtaagagatgggatattggtggtaggaatggattgtgaaatgcatgtatatgcacagtggaagcatgctgtcaaatttggagacactgaagctgatrgtyctaatgcagaagaggcagcaatgcaagatcattcgacctttaaatctaatatgctggcaagaaaaagtgttgttgaaggaacagctatttctgatgatgttttttgttcaccaactgtaattcaagatggtggcttatttgaggctgcacatgtactttcccctactcttccacaatatcatccaactcagctgttagaattgatggatttagggaaagtgcgaagggctaaagccattctctctcatttagtaaaatgtattgcaggtgaagtagcaatagttagagatcctgatgctggagaaggaactaagcgacatctctctcgaactattagtgtaagtggcagtacagcaaaggaaacagtcaccgtaggaaaagatggtactcgagattatactgagatagattctatccctccactaccactatatgcattacttgctgcagatcaagatacatcctacagaayttcagaagaaagtacaaagataccacagagctatgaagatcagacagtaagtcaaccagaggatcagtattcagagctgtttcaaatccaggatataccaacggatgrtattgatttagagcctgaaaagagagaaaacaaatcaaaagtaataaatctttctcaatatggaccagcttactttggccaagaacatgcaagggtactttcaagtcatcttatgcactcaagtctaccaggccttacccgtttggagcagatgttccttgtagctttggctgatacagtggctactactagtactgagcttgatgaaagcagagataagagttgctcaggtaaatattctcgctaaaaatttataaagttgtacctaatagaaatatttgtattatctctatactgactcatttactgaattgcagtctcaactttcaaactttgcagggaaaagacctccttaataggtaattastattatataatatgctcagttagaaaagacggttgaggccggcatatgaatgcatggatttgtgagatccatgtgcattctctcatgagtttttacactgaaacctttgtgtcattttggatttataatcttgtttttttgtgtgtgtttgggtgggttttttgtttgtttttttgagacagggtcttgctctgttgcccaagctggagttgagcggtgcagtcatgggtcactgtagccttaacctctcaggttcaagtaatcttcctatctcagcctcctgaatagccgggaccacaggtgtgcaccaccatggggcccagctaatttctttttattttttttgtagggactaggtctccttatgttgccccagctagtctcgaattcctgagctcaagcagtcctcctgccttggcctcccacagtgctgggattataggtatgagtcaccatggactggccaagtctcttgttttttaacacagattgatccctatgattttttctttgataataacagcccatttgttaatgttactatggaatcatgaggcttattgggacctcatgggctcaacttgttggtcttcccatttctagccataaacaactttttacaattacctaattttctccaaaaagtctcttcagcgagatttccatacagttaatgtcatacgtattttgcctaattcattctgtaactagaaaatttttggctgcttcctggaactagattccattctcttttatgcacatagttcagggtaatggtgttgattgtaaatgatggcattggcaaaggaaactgaaaattaatgatcagaatttcattaattcaataaatattttggaggagtgaaaaattgctatgtttcaggcactttctttactttatcatatttaattatcacagtcttctagcagatagctattattatgtttaactttatagatgaagacactgatccttaagaaattaagggactcatctgagatcacataggcattaaggagtagaagtggagttcatatgtggataaactgttgactcaaagcctgtacccttttaactatttcatgatttccagatctgtgggggaaaggtagctggaaaatatctcttcatatagatttacatccttatagtatatcccccaaagttttcttctctgcaggttaaaataactagagaccttctagggttttgcctatgacttattttctcactattaattggaaaagaaaaatcttaaccattatgaggttgtatgcagttgaatgagattcttcccagaacaaccttaagcttgtgttgtgtgtttaatatatattagtttttactgtgggacattaagaaagtaggcatggcatgatttgtaaaaaatagtttatactttctaatacaaaactgtatcattggctaagcaatatagaaatagtgtatcctggacacagtggacattcatgaggtaataaggcaggaatgaatgtctccatttcacaggtgggaaactgaagctcagagattaaatgagttacacatctcagtaaatggattctaagtaaatgagttcttccatttgttcaggtgagacaacttacagtcattcttgactctgctttctctcatacccagtatccagttcattggcaaatgctatcagttctattaatatccagaatccaataatcaattctcattacctctgcagttactactctggtccaagtccctgtcatctcctaactgctttattctttttacctccatctgttctttgcttaggaaccagtgattcttttaaaaccaaatcacattaaatctctcctttgctcaacatatactggtgccttcctgtctcactttagaataaaagttaagagccttacagtggcctaaaaggccccacacgatctatgctcatttctactctattagaatgctcttcttccagattcatgcatggcttgttcctttacttcctcaaattgctgctggcatgtcatcttattggagagttccttcctggccacactgtatgaaatagaactctcttactccagcattccctatctctcagtcctgctttatttcccttcatagcattaatttccacatattatttgtttattgtttgtctctacctcctaaaatatgatccccaagagagtagggactttgccttattcactgctgaattcccagtacctgaagagtccctcacatgtaatagatgcttgatttgttgaatgaataaacggacgaatgagcatggtggctcacacctgtaatggcagcactttgggaggttaaggtaggaggattgcttgaggccaggacttttagaccatcttgggcaacatagtgagatctcatgtccataaataaataaatagatacatattaggttggtgcaaaagtaatggcaaaactgtaaatacttttgcaccaacctaatagctatctatctagctaaataaatagatggatggatggatataggtaatgggaagcagagctggggcttgatctttggcaatttaaaagtttttgtttttttttttctggaaaatactatttgattctataatcattgagtacttccaaagtgtcagttattgggctaggtgctgtctgtatttttgctttgcttttatccagcagtggctatagttttggttacgcttgccataccttcatactttgactaagtggaattaatttgtataaataaatttgtagaatcaaggtgaaggttcaaactaaccatgtaacactaactagcctgggtattcaaattttaaatctttgatagtaccatatttcagttaatttaaccaaagtagaaaatactacctgcttaaatatataacaaatgatttcacatcagttatgtaatttccattacatctcatcggaattcatgtagaaaatattattaaaagttgtacctaacttaccatarttaatatattttttattggatttccagatgtctttcatttattatgagtcaatataaatgytcttgttatctattctaatagttaattgtatttctccaaatcatttttcttttaagagtttagtagtcacatttttttttgtaaagataattttttgtaaagacgttaaagtgttcaggaaggaatacactaaaacttatgtattttatataaattatgactaagtttaatgtttgttttatagcttatcagtttgtggcctcttgcattcttttttccttaaacatatttcctgtttaaattacaggaagagatacattagatgagtgtggtttgagatacttgttagctatgcgcctacacacatgccttttgacatcgctgcctcctttataccgagtgcagctacttcatcaaggtaattcactcactgtttgaagctttgcacaacttttacttaatattggagcgatggggtgtatcatgtttgtgtgtaaacattaggtaagtcattacgtgcacacctatcacttggcttaagatctttctgtcacatagtacccacttaccatttttctatgtatccttcagctctattctgtgacttttgctcatctaactaagttttttagaatttatttactagagtagtagcttagggggtaaatgtggtatgcctgaggttgtaacccaaagtggctgtctacagagtagccctgaatatcttgatgtcttttctttgaaaaattatgtaaactttgctctgcgatgtgtttttatatttactttaatgtaagcattatgttctagttatttgccagcaagtaaagttgatgattcaggaagatctgccatattgataacagtggatttgtgtacttcaggcatactgctacacctgatttgagacataaggatttatatcagccttcgtattacagattaaaaaattgaaactatagaattaaaagtgacctgcccaggatacaggactatttattagaagagttgggagtgcgaatcccagtccagagcttatttcagtggactatatttcttttgaaaccaacatcttggaaagagtcccataatatacgtcttagtattatagaacctagaacactaggcttgatacactgttattcttacccatggcacttaccctttaacctatgaatgttctttgaaaacataactataaatagctatctgagattctgtgtctaaactatatttcatctgcccaatcctttgtttttgaaatagattttgctgaggtwttttttctatttgaattatcactctaatgaataaccttgtaccttggcatgtaaatatttgcattcctgattatttcctcatgctagttttccagcagtggaattactgaatcaaaaggcatgaaaattcttcagtcttgataagtattaccaaaatgcccttcagaaatgtgctcatttacattcccagaagtttgtatacacgtactacgtaccaacaaaaattgaaaacaaaaaattataaaaaatataaaataaaaaagaagtttgatgatgccaaatctcaaccccattgcccacatttgatattaacattttaagcaatctatgccatttggataggtttttaaaatggtatctccacgttctcttaagttttagttttgggtgatagtcaagtggtattgaatcagttaatgacaattttgtacatttcctagggcagtctaaaacacttcaaatttctaaagctgtgtcaaattccattttccctttgactgcagttaaaacattggcgatgagaagtgactggtgttgtaggtgttggtcctgggagcagttttcagggaaaagttaagtagccagtacatagatagaaaagctgagaagagcaagagcagaggtaaactgcagagaatagcctgccattggtaggtaaataaaaagaagtgcctattcgtgcccctgttctttttcttccctaataacttttttcacctctgcaggttttcaaatacattcactgctcttaatcttactttctgaacctaattcttctgacatgtctgtgtgtatttttgtttcttcttataccaaaattttaattaatttaaggatatagaatgtaatatgctatgtattgtcattttatattatatattttatatcagcaaaattatgcattttgtgttgcygtatattagttkctgaagcagaatatcaattatttgataaagtaattctctcacagcagacagagatttaaatagtgaaaaaattagtctgcctttcaggttataaaaaactaaatttattttattaattttttctggtgttttcccctaaatttatagtggcagccaagacatgttgcattaattttgtggtatgattacaaacacagttgttatatgagtgttggcagtgggaaatttaaaagagttaagattgttattcaaaataatcataatagtttttattttatactttctaaagaaattacagtgaagcagtaattattagaaaagctttaaackatgtacaaaatctatatagtagttgaaaatggaaaaaattatgtgtaacaatatagatacttaatagcattgagaggcctatgttgtaatgtgactttcattgacctcagacatttctttgtttctaaaatgaattcatacagatggctacttrgactagtttggcttctttccaaggcttcccagagttcttgccagcattcccattattgattaccattctgtgtggttcacattcattatgtttcgtttttacctgctgtaagtcgaatatcagtaagagcgttatcagtaattgaactgttgataaatccattagtacttaaaagtctaatagcgtcagtaaagattttgttgcctcttcaaacagcctagatccctgtcagtcttctcccaggtaaaaaaaaacaaacmaacccaaaacaaaaaacaatgttcaccaaaaagcatcagtattaggcagctttaaacttttaactgaaggcactaaaagcagaggaatgtacatcatgattgtaacttatccttattattttctggaactcttacgaagtttagagcttgctttgaagtgatatttagctccatggctagagagaagaatggggtagtggcactggaatcgacatccaggactgtgagccaagtgcttttgacttgaataaagctttcaccacactttccttcccctgggctcttgtgggggataacacaccttgtgtcctcttgggcgggccggattcacaggtcctggtgacagagaaacctggaatcgggcctgggccctaccttcctagttatgtgagcttgggcagctcttatgacctcttgataaatttggtgtaccgtacatgtgaatggcctgatattcaaatatttttctttctaatgattaagttytagtgtccctatttttgtaggggaaatgaaaacaaatgtttggggaaaaagagatttggattttatgtatcacattattgatcttgtattcagaaacttttatagtataaagtcctgaatgatgacagactgcctttcattctttctttctgcttcaaaattctttccaaaatgaatgcgtatgtgactgcatgaaaaattgtttttcttcttatttgatasagttacgcagattattattttatatttccaatttaggtgtctctacatgccattttgcctgggcttttcattctgaggctgaagaagaactgattaatatgattccagcaattcagagaggggacccccagtggtctgaattaagagctatgggcataggrtggtgggtgaggaacattaacacgcttcgaagatgcattgaaaaggtaacttttctttagtggattttgagttatattaaaaaaaccttttcctaacgaaaaaaagatactatctcccagaaaacctgtagtgggaaatttgtttgtctatcttgaggtcttgagaatttttttttttttggagatggaatttcgctcttgtcgcctaggctggagtgcaatggtgtgatcttggctcactgtaacctctgcctcctgggttcaagcgattttcctgcctcagccttctgagtaactgggactacaggcgtgcgccaccacatccagctaatttttgtatttttagtagagacagggtttcaccatgttggccaggatggtctcgaatccctgacctcaggcgatctgccctcctcggcctcccaaatggctgggattacaggcatgagccaccatgcctggtgagacttttttaaataaagttttttggagattacaaaaacttgacctttataaaatgtccatgcagtatgatattgtgtctttctatataggctgaatttataatatatccgtggaataataatattttctgttattagttgaggtatgccctggtttaagaaaatggaaaaatctaactttagaaagtaaacttgagttcttgtttgttatttacaatacattaaaaaactctttttatacaaaggactctctgcatcactagttgaataagtagcaaacgttctttgcacacttgaaatctcattggataaaaacagttttgatttgtatgtacttgaagaacatatctgtggcagcaagtgaaatggctatcaaagtttttaaggcaggtttttggagtcagttttctggtagattccttttaggaaaaaaattcagttcagctctctaccaggtttggtgccagttgcttttcataaataattccatgttatgttctaatcaaccccatgtcatcatctccattttacatatgatggaactaagattcagagaggatgggtaacaagcccaaactccagtcatttataaatgttagatttagcctgtgccttttctactttagcaggattaggaaagtggaattcttattcatattttccttttagtcctttggaattccctggagtacaatcagtggtactatatttgtgaagtatgaatttgtttctccgaaggatgcaaagaccttttcctgatttattccttaatagtagttccccagagaagactcaactggtaaacttatgtaaaatgcatattctccatcccataaccagagattttaatttggtagtggtagggctgaggtttcttcatcttaatcagcatcccatgattctggtgtgcatggttctcagatcacagttttaaatgtgagtataaaagtattattttactgttacgtgtaaggctgccaacaaaatatcagtatttcttttctcaaaataagcacagatataagaaggaattcattcctgcaccaactaaaaaatgtgatmtctgatgtacaggaaaagttaattgttaaaggatataaatgatacagtttctacattaaatgttttatattccaaagcactggataaaagaggacatactttatctgaaatgtttcagatgtatcccacaaagattttacttcttgtcaacatgtgtcttgtcattatgattatctgtgataatatacacatgatttatttccacaagtaatttatttcttaaaattaaatcaaagggatatgtacattttctgcctcaaaatgtatattataaatcagctgaatacaaataaaattcctctaaaaattatctaacatattgaagcactaagttaaatgatagggggcagacaacacaattaaaagggggaagggaaaagagtattgagagtaaagcattttcttttttctttttctttctttctttcttttttttttctttgagacagagtcttgcactgtcgcccaggctggattgcaatggtgtgatttcggctcactgcaacctcctcttcctgggttgaagcaattctcccaaccagcctccaagtagctgggactacaggcgtgcgccaccatgcctggctaatttttgtaktattagtagagacggggtttcaccacgttggccagactgccctcgaactcctgacctcaagtgatctgcctgtctcggcctcccaaaatgctgggattacaggcatgaaccactgcgtccggcccgagagtaaagcattttcatgatgtaattttagatgtcttttccctttctcccataccttagtattatagcttcctgctttgccatcaatgtgagctaattaataaaacatccactgttgttttgtcattatgcctttcaacttaatgatttgcagaggctatatctcagcatcttggaaaaataaggtatggcctatatgctcttatgtttaagacagtatgattgcatacaatataacatgttgaattttcaagaaaaagctcacatctattgaatattctgccttctttattgctttctatgttagtttcagttctacgtggtttctattcccttttctaacccttactgtgtgactgtaggcaattcacttaacctttctgtctcagtcactttatctataaaatgggaataatgatagtgcctcatggtttgtagtgatgcaataagataacaaaaggtgcatagactcgtgcccaggacgtggtaaatagtcaataagtgctggctgtaattaggatttttaccataattactggcttgcgaatggttatctctaggagcatgtattaatattataacctactggagattgtgaaacaraaccaactttttctgtctccacagtttctatcagccatggaagtagcaggggaacattattgttgattaattgattgtaattcttatgtcaaattgtgaatttaatattttatttatcatttargttgccaaagcttcttttcaaaggaacaatgatgccttagatgctgcactattctacctttcaatgaagaagaaagcagtagtgtggggtctgtttargtaagttgccttgacacttaacrtgattcaacagaatgaagattgtgctgtgagtaagaaacctaatgcttttgaaaataattaggtatatgagcttcatcaaatccacttctatgcgacctggttcctttagctgaaaaaaatgggtaaaatatcttttcagcttaatctagaggatgggatgttttaaaagttgataaaagcactttgcaaagtaaaaaatgctgtttcctatttatgtatacataaggcattattgaccttccttcttagaagaagtgaagagatgcttgataacaaatgcctgtccttgaagttaytgttcttcttttagatttctgtttgaggtttttattttatattattatacattctgtagaacattttaaatttggtttaaccactttatgtttatgctcggtccccaggtcacagcatgatgaaaaaatgacaacatttttcagccacaactttaatgaagatagatggcgaaaagctgctttgaaaaatgckttttccttacttggaaaacaacgctttgaacaatcggctgcttttttcttgctagctggttcattgaaagatgccatagaggtataaataagaaaacacactatataatacttgtaaaagattgaaaacctaagaaggttgtagaggagattgtaacttttggtcatatgtttgttaggacacagaataactacagaggttgctgtacttaaaatagtggcactgtggtaaaggaaaatatgaataaattcaagggagaaacaaatgaaaaatttcaggctgggcatggtggctcacgcctgtaatcccagctctttgggaggccagggaaggtagatcacctgaggtcaggagttcaagaccagcctggccaacatagcaaaactctatctctactaaaaatacaaaaattagccaggtgtggtggcacatacctatagtcccagctactcgggaggctgaggcaagagaatcacttgaacccgagaggcggaggttgcagtgaggtgagattgygccactacactccagcctgggcgacagagtgagactccatctcaaaaagaaaaaaagaaaaatttcatatatggcacattgcatttcaagactatgtgtaaaatatatgaaaaaaatgctgaaaaatagtttatgaatgtcttcttccagaccatcttgtgattctgaactgtttaaagtacataggtcacaacctccttattctgtgcagaaaggcagatacattaagctgtttttttaaatgaaattcataaataaggaactgaaactccagtttgtactgttttataatagtttataatattagaatattatattagaaaacgatgtgaggaggtaaaacttcccactttttgatatgtaatcctagcagctgattatgagagtaattacaaatgtttgtgtttacttctgatatcttcctcttagattactatcatgaacaatatgaacaggtaaaggacaaatacagttgggaataatatatgatagaaaaacaggaaatattcaattaagtgaaagtactttagtattttaaatttagaattagttgggtttttttttacaattatcccaggcatatgagtttctttttttaaataacaaatacttaagattttaaaattggaagtttagcttagaagatattcaagcaaagagaagtgttgactgagagatgctcatattgcctaaatgacctcaaatgctcagaactggtagttgcattagaatacaggctcccagagactatgaatagaacatatggctgtatttcataatttatttactatttaaatatgaggcagatagtaataattatgattatgcagaaatatrtttggaaattaagaggaagtggtatataaattctagtgtcatatatagtatttaatttaaaaatgaatgttatttaagttgatcttaagtctgagatgatattaatatactttgtttcatgcttattttataaatgatctgtctagtttggaagctactgggttccaacctgttactctttttgctattctttaatctcctatcaatcatttaactacccttcactgtcccttcgcccaccattaggatataaatggtagataatttcagggtattgatgggatatttcatctctctaaataattatcattaagtaagataagtattaatatttaaatttgcaggtatgtcttgaaaaaatggaagatattcagctagccatggttattgcccgtttatatgaatctgaatttgagacttcatccacttatatatccatcctaaatcagaagattttgggttgccaaaaggatggctcaggattcagttgcaaaagattacatcctgatcctttcctgcgtagtcttgcctattgggtaatgaaagattacacccgagccttggacacattactggaacaaacaccaaaggaggatgatgaacatcaaggtaggacgttttgtggatttcttttttttcttttttaaaggaagagatactttctgaactaatgttcacttagattaagaaaaatcattaccagatttgcttttcaactttgagaatttattattaaaatttcttgtgtgtctaaaggattagataggattaccatcctattctaattacgtatatatttaacaagcatacaaaatgtttgccacattctgtagctctttttacataatcatatagccattttttttaaatggaaattttggctgttacacgtattggtttgtcacatgggcctggaaaaactttatgcctctgtggtaaattttcttttttccttgttatcctaaataatttagatattacaagcacttaaaggatatttatcagcattgttttcaataatttgaaaggaatggaacattttaagtttttgtcaatagaatagttaaatacgttttaatatatccacatatagaaacagtgtgtcattaaaaattgaggtagatacatatgttaatatgtgctgtatttttaagtgaaaaaaagtaagatgcacagcagtgtggttcttgttgcatttggcatatgtatgttgtacaaacatgcacctgaatgtgcacacatgttatgtctgcctcctccatttcctttggttgtttcctgaaacaaatcataagaaatgaaatactggtcattggtcactggctaccttttgggaataaaaatgaggagatccttgtctttgacttttgacaacttgaccatgtgccttggagaggatctttttaggttgaatctatttgggagtatttgaacaccctggacctagatgcctatctctttcccaagacttgggaattttgggctgttactttattaaatgtgttttcctcaccttttcccttttcttcttcttctggaatgcccataatatgaatatttgtttacttaatagtgtcccataaatcctgtaggctttcttcattcttttttttctgttcctccttcttcctttttttttttttttttggtttgcctgagttatttcaaaagacctgttttcaagttcagaaattctttcttctgctcgatctagtctgttgttgaagctcttgattatattttttatttcattcattgaattttttagctctagtatttctgtttggttcttttgtatgatatctatctccttggtgaatttcaaattcacatcatgtattctttrcctgatttcatttagttgtatatctgtattcttttgtatctgaatgagtttccttaagactatgatttccttaagaattatttttctggcatttcatgtttccttgtgactaaggtctgttactggagaattagtattttcctttccattcttttcctttggtgtcatatttccttgctttctcatggttggkgkgtttctacattgatttctatgtatctggcagaaaaagttgcctcttctaattttatggagtaggtttcatagggaaagacttgttactatgaataggtcctgaggtgttggtttggtggagtgcattggttagatggatacagtagtgtagtctccatgtagcttcttcacctgtaatccacattagtggcatttgcaatcctctcagttgcctaggctgaaagagtttgcggtgatggccatgtagctttgccaggtgggctcgctgggcagtttttcaggttggggtgcatatgtgcacacaatgggtcagccagcttagggtctggttggctgggattggggccacaggtctgttactctggccaggagtgtgggtacatggtcacttggccagcctggaggtgtgcctgccagaagcagcccacagggctcatatgtggcctcacggctactcagctggcctggggttttgtctgttaggggtggggataaggctatttctcaggcccatgacacgattgcatggctgctcagctggcctgggggtgtttctgcaggtgttgcccatgggttatttgtatacctgtgatgcaggtgcagggctgctcagctggtctggtactatgttagctggggtggcagtgaggctgctcctcaggcctgaggtgtgggcataaggctgctcagctggcatgggggcgtttctgttaggggctcatggggctatttctcaggtctgagactggtgcaaggctgttcagctggctaaggggtgtgcacactgggagcagcctgcagggctgtttgaccaggctgggatgtgtccaccagggatagcccacagggccgtggaagtgggctcttggctgcttggctggcctggtggtgtgctgccaggggcggcycgaaggactatttctcaggckttgattgcaggcgcagggcctttggcaggccagaactctgagtgcagggagcaggggcgctgcacgctgtttctgaggtcctgagtgtgggcatgtagctgctttgctggcctgggggcatatcagctgctcgtaggcttggagacctctcccatttgggggagggtatgtatgtagtggtttggctggctcaagggcaggttcaccctgggcaagactgccagattgtttctctgaccaaaagtgtgatggtaggggttgatttccctgccatgcaggaccaaagtcatagccagtcrtggtcctaggctctgcatagctgggattgtagcattcagctacccatgtaggcttggaatgaagacgggtccccagtgttggagaggtacagtgactcctggcccccagagcagtgcgcatgccagaggtgactggtctcaagatagtgcttgtgctgcagcagcttggctcactggcggtaggtggagggcacacaccttatgctcctaatctgggtcagtgccgttgcgtgaacttctgacgtctctccaaactggacacagggcttgcaagtactatgggattcttctgttgtaaggactgtagatgtttgtggtggccatgagggctgatggggatcttctgtttaccttttcccctctgcaatgagaagttcttcctgactgtgggcagatccagtctgggtgggggagatagggctgcagaggccgggtacctccacactgctctcctagacttgcagtcaccacaggtgcatctccactcccctgctgcactctagtgctctccctttgacactccagtcaaatcttagctgtttrttcattgccttggtcctttcttttcggaggatgaatgccaggtgtgtctagcagccatcttgctggcatcattctcttggtttatttttatggatgctcagattgttctttcacaaatgggaacttcttcaggtttctgaattcttctggcattatttcttgatagttttcttgctttctggtactacaaaatgtttaagggtcatcttgtacatttcctgccccagacctggaaatgaccattcctccaaagcattctgcttccttttagtggggaataatatttagaaactatagtttgggcaccaggatcctcattggtactaatcttgtcataatttctagactattgcaatgaatggaattaggaaattttttttccttagaatttaggagtttaccctgctatttctcatgcacatatagattatagggttctttcttcttagatgtyaagtttgtgtcttataatgaaatgtttggattctcatggcatgaacatagttatttgctatctatgtgcatataagtttcagaataataatatagatatttttataataacatgattctgaacataatttaagcttttttgcagaatttttttgttttatggtacattctgctaaggatgtacagtcaaattacttgtttttaactcactttttagagttcatctctgtgtgattatgctaccaacttgatagactgatttgtttaattttgccttttgtgaattgtggtttagatttggttttattttaaaattatgtaaaatgttgacatggtgttaaaataaaatatataaaaccagtgtattttcagagaaatctagctctttttttccctgttttgctctccccttttaaggaatcaattaaaattttttgtgtttgtcttccatttaaaaatgataagccaatatgcatgagtgtgtatttgtatttcctcttcactgtcttagatagataaaaggtagcttactacatgtactttctgcatcttctttttcttagtgtatcctggacatcactctatagtgatgggaatcactccgtagcatattgggaaattctttctatttcagctgtacagttgtaatgattgtatatgccatagtgtaacctatcgtaggttaatatttacatgttgtttttttgaagaaatgctgacgtattttattgttttgtaatgtaaatacatattaacacaatgctttgtgattttatctgtttgatttctatagttatcatcaagtcttgtaacccggtggcatttagtttttataactaccttcgaactcatcctttgctcattcgaagaaatcttgcctcccctgaaggaactttggcaaccttaggtctcaaaactgagaagaactttgttgataaaattaacctcatagaaagaaaattattctttaccactgcaaatgctcattttaaagttggatgccctgttttagccttggaggtactctccaaaattccaaaagtaaccaaaacatctgccttatctgcaaaaaaagatcagcctgacttcatttctcacaggatggatgatgtaccttcacattcaaaagctctgagtgatggcaatggaagttctggcattgaatggtcaaatgtaacttcatcacagtatgactggagtcagccaatagtaaaagttgatgaggaacctcttaatcttgattggggtgaagatcaygacagtgccttagatgaagaggaagacgatgctgttggtttagtgatgaaaagtacagatgccagggaaaaagataaacaatcagatcagaaggcctcagaccctaacatgttattaacacctcaggaagaggatgatcctgaaggtgatactgaagttgatgtgattgctgaacaactaaaattcagagcttgtttaaagatccttatgactgaattaagaacattggctacaggttatgaagtagatggaggaaaactcagatttcaactctataactggcttgaaaaggaaattgctgccttgcatgagatatgtaatcatgaatcagttattaaagagtattccagtaagacatattccaaagtagagagtgatctgctggatcaggaagaaatggtagacaaaccagatattggttcctatgagcgccatcaaatagaaagaagaagattgcaggccaaacgagagcatgcagaaagacgaaagtcgtggttgcagaaaaaccaagatctcctgagagtatttctcagctactgtagccttcatggggcccaaggtggtggtttggcttcagtaaggatggaactcaaatttttgctacaagaatcacaacaggtgtgaatatcacttttttttcaatcttgrttatttcagtaatttcagtagctcttccagttatagctataaagctcttttactactttttactagttaatctaaatatgttcagctcctctctttataggaggcagatatttatactctatgtgtcttagactgaagttttgataataaggagtaggcttaacagcttgagagtattcttgtgtcatatttatctatataccatctacatctagcatagtacctggtacatactgggtgctcaataaatttgtgtagaatgagtgagcraacatattccctttacacaatgtttatcaccagtatttctgtcagagaactgataaaattttttaaactactttgaaaaaaataattcactrtcacccacaggaaactacagtaaagcagctccagtctccactaccactgcctaccaccctacctctgctttcagcaagtattgcgtcaacaaaaacagtcatagctaatcctgtattgtacttaaataatcacatccatgatatactttatactattgttcagatgaaaacaccacctcatcccagtattgaagatgtgaaggtaatgtaaagtttatgatcrtttgatattatacaccctgagaaggtaaatatgttatacctgtcttttaattcgaacttaggggaaatatttcaaagtgctacctttctcactcatgatcagttcaagactattagtccaatgaatgtaatttaaaagtaagtgttcttacttctggaraagttattgtcttcctttaagacagacaaatacttttggcaataaaactaattttcttgacagtattcttgctacttaatatccctttagatcctccattccccttaaatgaaccattaagttggaaatatgactatttgtttacatgccaagatattatgaaaatacaagttggggagtatctgggagggaagcatgactggtcacaaatggtcccagagagagtgtccttattactgtttccttggtggttgtgtttattggaggcaatagttagaggcaatcagagttttggcagttactactgcgaactatattgataccctgtgctaagatcttaaaaactgatacagtccaagaaacactagggagcttggcaggatctggggagctagctgatcagacttttcactgtcccagcctgagtgtatttgtgctatgctttttccagttctactggctgatgcacaattcaggtcccctgttttcttattttttatttgttttgtttgacaggcacatttactctctggcagcacattcttctaaaggcctggtcataaccaattagggacttctcatccatattatgaattaacctgtattagtattttagcagagattatttaaatcatttgttaggtgaatagggacacgcagaaaaggcataaaaagcatatgaattcaaagtaaacatttctagttcctagacatttggataaggctttcaaagagtaatctgtataaggtatgaaactgtttctaaggtcccttcaaatttaaagattttgtgagtctgaaaatattgattcagtatagcatttcagggtggtgggtttttttttaattatatggagaaatttaaaactttctaaatgtaaaattctaagactgtcctcaattcatgagtaccaagtaaattactttctggaaaatctgctgtttcacacagtgattgacacatttactaaaaagatttaattcattttcattgataagattaagtgtttattttcatcaaggcgaatttcgtgaggcaagcttaaataaaaactctgaaaattctattcttattttcttctgcttttttttaaatattactatttaagctaattgttarggtaggacaaatgcctgtaatatgaacattagcactttgctcagggcctcgtaaacggcaggctcacagtaagtaactgtttgattaaaatgtgtytgaaacaatcagctttattgtggcatgtgtataaaggtgggtgacagttactttagaagatttaaagcagagttagtagtctcatctaggattcagtcttatttatgatgttgctaggtttcctggatgttttctaatttttgaaatattactgttgtgtagaaatgttagtacaaaatgtaattgtgactgttttggttttaggtgcacacacttcattcactagcagcatcactttctgcatcaatttaccaagcattatgtgacagtcatagctacaggtaaaaaaaaatcacccaaaatagtattaatacagcaaaaacattaaactgttccagagttatattaagtttctatttcctagggactgaaaaatccctaaatatgacagccatgatattttaatacatgcgagagaatcagaaataaaataattatttgtttagttgtcacytagtagtcacagagaaatatagaaagtaacaaatagtaaatgtaaattaccatcattaccatcctttttgtttttaagaaagaagagtttactgtccataataacttatratatgaaattttctaattgtttttccttagaaacaatttctttttgcattggattagcagctatttaactaattatccaytgaaataaaaaatacttttgaaaaatgaaaaagtacattcctaaaatggaattatttaaattacttttacctacccatttacatatgatgtaaaagtctttggaagtgatatcaattagaagaaatggattgaatttttctaaatgtataattgccttcattagtgtgtactttgcattttaatgactagagcaatgtaagtagcaggaaattgaatcacttggaaagataacctagatttaaatgaataatgttaataaatgaaaagtttataatagtagattcacattaaattgatattaaatatatttctggctttctttcttgtaatggtagcagccttttgtgggaacatttggtatcaagtaaagaattatctatcaaaatggcctgtactctgattgtaacttaattaggctgtgtctaaataactccaaagattggaaatgtaaataaggaaaaaagttgatttagttgactgttgtcatctaaatgatcaaagataacttgtttgatgtcagtcaccattaaaatggcaccaaatgaaaatgcaaatacattgtttttaaatatatattttccagttggtcggctatgatttactagactcagcttgactttccgcttttatattttccccaacttcacaaagatagccattatagagagggaagtaaatattattaaataatatttagggacatttggttttargtttargtatttctaaaatgtgattctctgggttttagttcataactttaatttarggttaaacttgcacaactttgcagagaaaagaaatgcaacctactagtccctgaaactttctgcctactgtatcctagtaccagcagtagtctccttacctcagactttgtaaaaacacaaaataaaaattactgcaaatagaaaagattttaaagtattaaagtggcatctggaaaaaattctaaaggaataagtgtcatctgcccaacataataaaatttgttactttgtttaaaagaaacaataagcatttgtaactaatttcagtaattttctaaaataaatttttattagaacagtgaatgcattttaagaatttttgtttcttaaaataggtgtctaaaatagatgatatacataaagtgcaattttttattacctctcaggatgataaataactgaacctatttgttttagcagtcaaacagaaggaaatcagtttacaggaatggcttatcaaggacttcttttaagtgatcgtagaagactaaggacagaaagcattgaagaacacgcaacaccaaattcatctcctgctcaatggcctggtgagaatttaaatgattaaaaaaaaaaaatcttctagttggcaatttcttcctaaaagcctactgaccagtttcctgcttgttgctggatttagtgagtggttcctttctttctttgttttttgatgatgtttttctgctatggattaggaactattaagtactgcaatattgtctgaagactcaggaagttaaggcttcataaaaccagctatgttaaccaacataaaaaagcaatgtcttaacatccttcataaggatggagcacattatctttcttagaaatgttaaattagagtcttagaaaatcacagacatattttcacagacataccatagaaaatacagttagttgttctcgggcgtgtaaatttatgtattggggtaggagtgactattctgtggtacatatatcatgctgtctgacagtcctttttttcttgttggctctctttctcattctctacatcagttgtttcaaaacttctccactctcttcaatatcctaagtgtatatttcagattactgtaaccattgccttgtagaaacacattgttttcattttaacctcttatttcaaaataatttcagacttgcaaaaaattgcaaacataatactaaatttcacccagattccccaaatgttaacattttaccatgcttgctttgtcattcatttcttctctctcactcacttgctgtttgtgtatctaagtgtattttttttgaaaaatttgagagtaagttgcagaccagatatccctttccatctaaacatttcaatgtgtgtttcctataaacagacattctcacataattatccaatttaacatttatgttctctaatctacagaccttttttgaattttgccagttgtcccactaatgtgcttttgggggcccatatgtaacatttagttgtcatgtctcattagtctcctcttatattgagtaaagtcttccttctttctctttcacaactttgacacttttgaagagtaccagccagttgtttttttaagtgtccctcaatttgggcatttctgattttttttctatctttccttatgtttatttattttattttattttttgagacagagtcttgctctgtcgcccaggctggagtgcagtggcgcaatctcggctcactgcaacttccgcctcctgggttcaagcaattctcctgtctcagcctcctgagtagctgggactatagacgcataacaccatgacyggctaattattttgtatttttagtaaagacagggtttcaccatattggtcaggctggtctcgaactcctgacctcaggtgatccacctgtcttggcctcccaaagtgctgggattacaggtgtgagccaccgtgcccagccctgatttttttcttaatgttggattcaggttacgtattttttggcagggataccacaaaaaagatgtgtctttctcagtaggagatatcaagaggcatatgatgtcatttggccccagctgctgttaactttgatcacttgktaaggtggtttctgccaagtttctccattgtaaagttactttttttttcctttgtaattaatcagtatcttgtgaagagttagtttgagactgtgtaaaatattatactttcacttgctaattttagcatctagtgatgatttttgcctgaatcaggtattactgtggggttactagmtggtgattttctaacactatcactcattttatgtattagttgaaattgtactttaaggaagagcttccccttcttaccttttgtttatctactcatttattatatcagtgtagacaaatggatgattttattctataggctataatccattcctatcttgtttattttgttgctcaaattatggaaatattttgtaaaatataaatgcataattttggataagttgcaaatttggatgttttttccttctggtgcttcatcctgacatacgtcttatgattttatatacccttataggtgtgagctcacttattaatcttttgagttcagcccaagatgaagaccagccaaaactgaacattttgctatgtgaagctgttgttgctgtttacttaagtttattgatacatgctcttgccacaaattcctccagtgaattatttcggcttgcagcccacccattaaataatcgaatgtgggctgctgtttttggaggcggtgtaaaacttgttgtgaaacctcgaagacaatcagaaaatatttcaggtaagatacgtttgataccagtaatgtawgtaaatgttaatcattttgaatgttaaaatttyttttaatgtttcaagaaatttcactttgaaaataagcgatgcttaaagtataatcactcttgttatgacagcaaataattaaacccatgatataataaacatatagtttgttacttttatttttatagaaataacatttttgaggttgataaagcaggacatgtttgaagaagattaaaaatagaggaaaggtaaaggtaaatacagaaaaaatgttaaggaacaaagtcatacaaaaagagtagttcctaagacaataaaatgaaaaaaaaaaagcaaaaacaaaacggatagttcttaattacagaaagaagaaaatttaagtaagtgttcaaaatctttagcgcataccagcagttggcttcagattaaatgtatggtcatgtgcaagatagccattccaatcatacacacagtttttaaattctatttttttattctccaaaataggttcctttagtcttcaatgtgatagtattattccattttccttgtgtgtttcttcttccctcatggccagaatatatttttcatcccacttttgaaaatggtatgatatggtgaggtatagactgatgccgcaggaaagatttctatcttgatgctgatatatagaaatcatcttaattcatccttagaaatggacatattacagatgagaaatcagtggcacacaagtttaatgacactaacctctgtcttcattgtctgtgattgagttaaataaataggttcctgtgtaagtcattgtaagggagatgatcttatcaactcccactgcttccattcccatcaaatgtggatatctgaatctctttcttgctgcttggttatagtccactttaaacttaaaagtttttctccaaaattgtttatttctctgcctgagttttctgattttttgttcatggtaatttatccatcaaatcatccatgcttaaaacctgccagtacatattaatatttgcattaatttattcacttaacacctatcaggcaattaacaaagatatttcaggtaatgataagaactgtgataaaaatggagtaagtggaaagacggtgatgagggaatgggaatggaccagtttagttaaggtggttggaagacatatttctgatgagatagcatttgaggagagctgtaaggaagttgggaatcacaccatgtggatatctgagaccagagcattccaggcagatgaatgcaaaggtcctgaggtagaattgagtttggccttttccaagaactacccagggaccatcatggctgtcatgaagagggartgttgtaggagatgagaatagaagagtagctggggcaagttcctttaggatcatggtaaaagcgttagttgttctaaagagaggaggtgacagaatctgattcagcttttcaacagaaccgctctagctgctttgtggagaatagactgggtaacataaataagagtagggaggctggtggtagggaggctagttcacttaaaagataattgtgggttaccatcaaggatgaaaggatcaacaaagtgtggtatattcgtgcaatggagtgttactcagctataaaaggaatgaagtactaatgcatactataatctgtatgaacttcaaaaataggctaagccaaagaagccagacacaaaaagtctcatattgtctggctccatttatatgaaatatcctgaataggtaaatccatagagacagaaagtagactgtggttgccatgggctagggggagggagaaataaggagtgactgcttatttggtatagtgtttccttttggggtgaggagaatgctttgaaactagatagaggtggtggttgcatgacatgttaaatgtactaaatatcactgaattgtacactttaaaattgttaattttattttatgtaaaatttgcctcaattaaaaagaaataatagtggttcatcctagggtgttagttatggtcagagtgaaaagtgatcatattctgggtatagtttgaggttagagccaatggatttgttgatgaattgtgtctggggtagggaagatagaagagttgagataaaattattttctgtgatggggaggtttaggagaggagcaggttgacttctactttctggccctcccatacccaattcctgaatccttttgctatttcttttgtgtatcactcatatacaacccttcctctactttttaccacccaccatattagtgcaggctgttcttatgtcatcttccatcttcctctctaattgatcagacaagccatacctcattgtgtgactaaaacttaagaggtgttagtgagaattgcccaaaacataagttcccaggttcatagccacagacttgtcctaacctaactctagactgttgttgatattacttccctccatgactcctgtctaccaaaagtaatttactcctcatttacccaaaccttctttgattatttgtttatattgtccttttccattttcccattgaacttctgcccttcttttaaggcacactattaaattctacatattcagtgaatctttcttgaacctcatagccagggataatcagtcaatcactcactttaatatttattgaatataccacttatttagtgtattttatatagaattactttaatccttattttagggagcacatggcaagataggctttaatgctttatctccatctgtatctctgccatgactgctggaaagctgattcagtaactagaaaagtttagaagcacaggaataagtaatttagtttagaccaaaacatggcaagagtaggataaaaagaaagcttaactctatcaattaacaatggaaaatgaatgctagatttttttttccttctatcttcatttagcacctcctgtcctttctgaagacatagataaacaccgtaggagatttaacatgagaatgctcgtccctggaaggcctgtaaaagatgctaccccaccaccggtgcctgcagaaagaccatcttacaaagaaaaatttattcctcccgaacttagtatgtgggattattttgttgcaaaggtaaggagtgtgaggaatgcaagctttaagagaagtctatcatctattttattaactcttgcatgtgtctcacataggaatgatggggtagcttttggattgaatcaccatagtttagacgtttaatttattaagtccagaaactgaatagtcatagtaaattcgaggatsatcagttacctgatgatgtaggagacaaattaaaatcacatgggagttatgtataaattagaagtcagcttattacataatcagcaccatctttttcgagtgactggaatacttgtatctaccacctagacacccctcttctaattatcagtggctcccttggtaagcatggaattagaatagaaggagatggatggacatttggcggttttatcaggccatgatgaggccccatgatacatctctgttttcccagcgcaaaggaaacttctcaggggatcagaatactcatggtgactagatctggtatagccccatttcataccatgctgggtgcatgctaatgtttgcttttctgcactttgctcttttgagctcatgattctccttctgttggtatgtttccctctttacatgtgttaactctgttgttaccttgctgtgcatacacatgagggaatacatctccagagtcatgcctcttcccatttttagatttttattagatctcagagttattgaggcgctgatcccgctccgtttttttgtatgctaagctgatccttaaaaagtctttcaacatgagtttggaagctttgttttgttatctaaagactctgaggccaggtgcagtggctcatacctgtaacctcagcactttgggaggttgaggtggaaggattgcttacatccaggagtttgagaccagcctggacaacatagaccatgtctctgccaaaaaaattttaaaacgtaggtgcagtgctgtttgcctgtagttctagctgcttgaaaggctgaggtgagaggattgcttgagtccaggaggtcagcgtkgcagtgagccatgattgtgccactgcacaccagcctgggtgtcggactgagacagtgtctcaaaaaaaaagactttggttacgtcagtggttctcaaagtgtggtctcagaaccggcagcatcggcattccttgggaacttgtttgaaatgcarattcttgggtcttccstcagacccctcaatcagaaactctgggagtgagaaccaacaatctatgtcttaacaagctctccagatggttctaatgtgtgctgaagtttgagaactatgagcttaggcacattgtgagtgcagatttccaggtttacactctatcagggtccgagttatacttccagagtcattctggcctatcccttaaggctgccaattgagttgcacttagttgtatttagctaataaaccagggaaataataaagtactcttaaaaatgtataggcagttcccactcctacctttttaaaatttttatttgccacgaatgaaagctcattgcatcattaatgtgagtgataacaacattaagatttgtaaatggtaatgtgctaaatttttgtttttcaaaaatgtttcctcctgatatatgttctgaaaatttggaaaatgcaaaatattataaagaagggaaatagcactcatctgtgcaacaaagataactgttaccattgtggccaatttactattaatcttttttcctcagattaaaaaaatgtataattggatcagtatatgtagttttttttctgttaacattaacaaggtaaacagtttttatgccattaaaaacttatatagctgtcattttaaaaacttcagtgtagaaaacttccaacatacacaaaaggagagataatagcatatgaatcttttatctaccatcatgtagcttcaaaaattatctactcatggacagtcttgtttcatttatacctctccccactactttgtttggaagcaaatccaaacatcatgaaatttcattcaaaaatatttcattatttatttttgaaaaaaaaaaaggattttaaatagatctacattagtgttacacccacagaagcacacccacaattctttaatattatcacatattcagacagtattcacatttcaccagttgcatctkaaatgtttttatatagttgatttgttcaaatcaggatctaaaatatgattcataccttgcaagtggttgctatatcttcagtctcttttaatctataggctccacctctctctctctctctctctctttttttaacttaactcccacctttttcgtttgccctgaaagaattttgacctttagaatttttcaatggattttgctgatggcatcaccatattttgttcctctgaatcttgtcaagtgaaaattaaatccaatttcattctgattggataggaagagggagtacaggattaacttcataggtggttttgtatatttctgtcaggaagctttttatgattttagttgatctttgcctacatttattatttcagtgaaagttttamattatgataatataatcctgtcattcatttttcatgtatttgctggaatgtctcttcatcaacctattcaattaccctgaagtacattttgagtcggaaagacaggataaatgctttattcttttgcttttgtgtaccagttttcaaaatgatgagttggttcccaagcatccttcagaggaggccagtgagttttgttttgctttcagctttgttatgaacttatagatttaaacatattttatatgttttaatctattgcagttatttttttctcatggggactcagattatccatctttgccagtgagagcctcttccacaattggctccgaatctttttgagattattccactagtgtttgagtttgcctgctttctagttttattctaggctaatcatgtatatttcctgcccgtgactgagaacaatcacttttttgaaataacctggttcctttttgtgagaaattatatttagaaactacagacagatgctggggtgctcgctcttacttggttgatcattgtttctagataagcatcaattatagtgaccatgtaacttttcactttgttagtgatttgatgtttaaaatgccaagaatagtatcttttaaaatatgtcttgttcatgagcagattatttccttaagaagtactaggtcaggcccggcatggtggctcacgcctgtaatcccagcactttgggaggccaaggtgggcagatcatgaggtcaggagaytgggaccatcctggctaacacggtgaaaccccgtctctactaaaaatacaaaaaattagccgggcgtggtggcaggtgcctgtagtcccagctactcgggaggctgaggcaggagaatggcgtgaacccgggaggcggagcttgcagtgagccaagatcgtgccactgcgctctagcctgggcaacagagtgagactccgtctcaaaaaaaaaaaaaaagaagtactaggtccaaggctrtaaacttaaataaggcttttaatacatattgccagattattttccacattactaatttgtactctcttgagaatagtgagaggatgcatctaactttacccccttattagcattaagtattcctttttcatttttgttaatttgatagattaaatgatttttattttctgttagtgacattaaaattttaatgatcttattgccatttgattttccagtttgaggtattgactgttcatattcttacctaaattatctgttgagattatggtatttttcctttttctggatactttatctagagatattattaatttatcttgttaagctttttctagtttatttgctttaaaattttgtttattatgcatttgaagttttaaaaagtttatcatgcacagaaattttaaaaagtttaaaaattagatctatccatacatttccttattgattacattgtttttcagcagaagtcttttccactaataaatgtgtacatttattttaccttccttctctgtttcctcctgttctttttctttctcctcctccttaacttttaattctcttatttatctagaataaagtgaggaacagactggatcagacttcatctcccattcccacacttagctaactagttgttccattattatttattaaataatctttctttttctcccactgacttaagatgttacctttgtcagattaacttcttatacgtgtatgatttttgtattatatttttgcrtcaatctagactacatttttcttacttagtttaatatccactaaaaaaaatgggattttttttatttaaaaaaaattccccagctaatctcatctattttttcttctctacgaacttcagaatcattttaaagttccaaaacaggaagagaaattcacagggagatttttattgaaattacttaaagcctgtgtaaattaacttataaagaattacagtttttacacatttcagtccttcccttcatataattttataaagatttataatttccttcacaatagctctctcacagctttcatagtttgtccttttgtatttctttagacttttctaactatttattgctgatctataagaagaaaactattgattaaaaaaaatttcacatctagctattcagttattgaatatgagagttttaccttgtcatcttgacttttgtagatgtagcattatctgcaaaagaaaatttttacttatgctgacaccatttaaaatgtttacttttatgttagaacaaaaataattatatactaaaaatattttctatattaaatatataatacatgttatataaaatatattttatatgtttatgaaattataatctttaaaaaaataattttaccttttattgcagccatttcttcctttgtctgatagtggtgttatatatgattctgatgaaagcattcatagtgatgaagaagatgatgcctttttttcagatacacaaatacaggagcaccaagatccaaattcctataggtaaataagacttttctttctctcatttttttttggcttttctttttgtagaaaatatcaatgttattaattttaaataacattattatcctgaatttatataagaaatgacttatgtttccaggttacaaattctacacctttgaggtcaatgtctacatagtgttttctccacctccaaagactagcttttatggagagtgcaaacacaagcatctttagtgaggaaaaaatatgtaactcatggatatactattagagtttaatatataaattattggtatactattaggtttcatgtgactatgtggttaatctttttccacgaggtaattttcagcaagtgtaatatagtattgcaagttttttgtattcagtgaccacagaggtgccatttttgcatagtaaatttcaatgacagctttttttctgggttggagagtgggctaaacagttggcagggaacaccactctgtttctcccatgattttatttttcacttaaagactctttttgcccctccttgaacagctgggctcttctacatttgacaatggttaaactagcacttcacaatgtcaagaatttctttcctattgctggactggaattctctggtgagtttggaatttaaaaattaatgttattaagtataataaattgccgtcaagtttctctttacaaaatctatatataaggtcatttggtacttaaaaaatagtgcattagatattttataaagtcttgtttattttaggytccaatctgtgactttatttttatttttttagatagagtctcgctctgttgcccagactgtagtgcagtggtgtgatcagagctcactgcaaactccgcctcgtaggctcaagccatcctcccacctcagtctcctgagtagctgggactatagatgtgctaccatgctgggctaatttttgtattttttgtaagagacaaagttacatcatgttacccaggctggtcttgaactcctgggctcaaacgatccacctgccttggcctcctaaagtgctgagattacaagtgtgagccaccacacctggcttcagtctaatactttagtttatatcaagaatcactctctacacagaagattgagaaagagcagaaacccacttctgttttgttgaaagcattaagaatctaaactgtattacattaacatttgcagatttmtttgtattttcagaagtattatctctgagaattcagattctataaatatttgggtgatgatcgatattttttattaaaataaataacatattctgtcaccttgtagagctgcctgtaacatcaccattaggtattgctgtgattaaaaacttggagaactgggaacagatcttgcaagagaaaatggatcagtttgaaggtccaccccctaactatatcaacacatatccaactgacctttcagtgggagctggaccagctattcttcgaaataaagcaatgctagaacctgaaaataccccattcaagtaagaaagctcttataatgctgataaagagcgtagcttaacttttctggaagacagtttggctaaatatgccaatatactttaaaacattcataattttgaacctgcagtcctatttttagcagaatacgcttaagaaaaatatcagaaatttgaatagaatttttcccagtattatctgtaattcatagacattccatttacataaaggaaaaagtctttattgtattaatttccggtgtggtgttttttgtttgtttgtttgtttgagacaagagacaaggtctcactctgtcacccaggatggagagcagtggtgcaatctcrgctcactgcagcctcaacctcctgggctcaacccatctttttcacctctgcctcctgagtagctggaacaacaggcgagcgccatcggctaattttttttgtattttttgtagagacagggtttcaccatgttgcccacactggtctcaaactcctaggctcaagcagtccctggtcttggcctcccaaagtgctgggattacaggcatgtgccactgcgtatggcatatttatgttcttattgtcagaactcttacagaatttttttctaacaatctatatatgcaaataaggtgcttctgacttttgtcagtaatttaacagtaaacacattacaggtttttaactgatgttttgatcttttacctgccaatctaggtcccttttgataagcagcatgcttttttttttgaggtagtggaccctgattaatagtttttactattaaaataagcttgaaagaacaaagctttttagcttgttaggctgttagaatcggtatctatgacttgtattcattgttgatatgctttaaccaagagaaccaatataaagtataatttaaaaagagaataataagagattcatttgactctcagcttaactggttcattcagtgtaattagagaattagttgctagatgaaatgatttttaggagaactaaaaattaaaagtaaactgtacagttttgttgagcttaatgctgtgtcttctttgcaatagattatgaaggttttaaaaataaatatctttgcaatagattgtgaaggttttaaaaataaatatctgcaaatataaacatattttctatagactaaagtagtgtgatatgttaattttttttaataggtcccgggattcttctgcatttccagtcaaacgactttggcatttccttgttaaacaagaggtccttcaagagacatttattagatatattttcactaagaaaagaaagcagagtgaggtattttgagaaaaatattttctattgtaatttttctttagttttctttaacatttctaaggaaatcagtgcttgatttattctgaaattttctttctggttgggtaatagtcaaagttcactraactaccgtgaactacttttaagataaaaccttataattttcatttcatagcaatgaaacaacataggtactttgataaattacatatattcaagtgaaagttggtactttacagtatttgtcattaggtttttacacataataaacattgtgatggatggcttgaggaatttaatatataagcttactctataatattctccaaatatgtrcttaaaatataaaatagccctttaaaagcattttctttacttagcacttagaaatgaacagaatgatgatttgaagcaacaaattcaggatacttttgtgagagaataaactacagaaatagcaaatacaagatgaaggaagattgctcttacaaagcaagacagaggttctgcattgcatggttatttttaagctaatacaattaktaatgtaatagcagacatggttcaagaagaattagcagtttgggagattggcaagtgacctcttccttataaaagtgggaccttttatatgagcatttcagtctgtttggctatttagtgaggtaattagtgaggkaatgagcagtttgaagagtattcagagttgagcgtctgatgtaattaaagatttggcaaacatggccgggcacggtggctcacacctgtaatcccagcactttgggaggccgaggcgggcagatcacctgaagtcaggagttcatgaccagcctgaccaacatggagaaaccccatctctactaaaaatacaaaagattagccgggcgtggtggcgcatgtctgtaatcccagctgctcgggaggttgaggtaagagaattgcttgaacccgagaggcagaggttgcagtaagccaagattgtgccattgcactccagcctgggcaacaagagcgaaactctgtctcaaaaaaaataaagatttggcaaacacaatcaatgagaagagaagaaatgaattatatttcgcttagaaaagtgaaaacagagagagtccatayggctcratttcccgagataaagtataaaattgcttctcagtttttcctcatgcccagggcagtggaacctaccatacttgttctttttcccactcacccacttacctgaatggtaattgtggtcagcccttatgaacagtcatttgttttctctatggatttaaaaattatatacttaaatgaggaagtagaagaatgaactgtagagaccttttgagtcctagttataagctttttcataacaaaagacccttatggcattgaaattattgatgtgactttgttagggaaatcagaggcaaattatttgcctctgtcatttaaaccactgtgtatagcatttcctatagtgatgctgagtccaaattccataaactaaaatataggaatctaagatagtgatttaaaataaaagattttagccaggcatagtggctcacacctgtaatcctagcactaggtrggggatctcctgagctcaggggtttgagaccagcttggcaacatggtgaaacccygtctctacaaaagatacaaaacaattatccaggtgtgatggtgtatgcttgtaatcccagctacttgcagggctgaggcaggaggattgcttgagcccaggaggtggaggttgtagtgagctgagatcacacaccactgcactccatcctgggtaacaaagtgagaccctgtcttaatcaataagatttctggtcaattaggggctctgttattcacagaaaaccagttcattgagtgatcaattttctgagtgttttgttcttcaaattattaaaattaatgatttatcacaagtatgttttaagtattggtaaggttgatagcagcttgactggttgacttgtcagagtgtagagtgctgtgggaagccaggtgtctgggtttcttggaccctcccattctcgtcttgcccttccccacgagtttgcttcttccttaactaattctccccctctccgccccttagtctcccttccattatgcccctcagtctctgtgtgttctatttttcttccagcagtgggtccccatgaacagggaagtaggacagagataaacggaatgtttcttaaagtgctatataagcatcagttggctccaaggaagggaagtacatggctgggagttaggatggaagaatttttatcatgtacccttttaattttaaaacattgaatggaattactgtcttgtccagtactgtcccatagaactttctgtgatgatggaaatctgtatctgcatagtccaacatagtagtcaccagccacatgtggttactgagtacttgaaatgtggctagcatgattgagaaactgaattttaattttaattgatctaaatttaaatagttacatatggttagtgattgctgttttgaatagctcagayctgaaaaaaaaggtgttttattaagaaaaaaattatgaataaaacattaaggctgttaggacaaaataaaaactcgtcgttaggctcagaaatatgcaaaacttactaaaactctacccaatccagtaagagtgcttacatctttaaaattgtcaaataggattttggtaatcactaaatttggcaaattsagaaaattgaccaataaaattggcaggctaatcctaaaaatgctgggtgcatttaaaaaaaatccctgagaaatgctgaagttatatatttataagaataagatcttttattcactgaagatattacaggaaaatatttcacaaaacaagtttttgggaaacagattggtgaattcagctagttaagacaaatagattcttcagcagtttggccttcactgagttagctgtgccacacattgaccattccttggaagttttcttggatgcatctttatcagctgcagcagccataggggagtccctggaggcatgggcagaaaatttgaatggcccttcgtgatgaaaggaaggcagtcacctgaaaaggtatgaggaagagtttgtttctctgatcaaaccttcagagtttccacagcagagcagaaatataacttctgattgcagccatccttaggaccctgcatcaacccgggagcaaattactgagttatttctttttccrtgcctgattttattaaacatttatttacttagagaaaaatcatcatattccttataagagtgaaataattatcaatattttgaatctatgtttagaaataaatattttaatttgtattttaaatcaacccctatagggcaggaatttatgtagcatcttctgcatctgcttatacaaatgggctttaattttatagattaccagttatgtaacttagatttcttaaaactgtatacagataactaatttttattttgaaatagcttttatgttcttgtgtttatgtaatagtcacattaattttgctcttttggctttgtgttgtgtttatttgatgactgttttattcggtttaattttttcttgattttgcaaattcatttttatcatctttaagtggtggagtggccatttcagcttgaaatatttcactgtctttataatttcattccatgcatgtgttttgtgtttgtgacggtgtggtggtatttagtctatagaagaacatgtggagcaggtcaaccaaaactgcatagcagaagattgccacatcaaggtagtattccaagatcttgtatttagctcattctttaaagttcaaggagctaacgcctcatctctgatactaaccatgacctgcccaactggctaactactcagagaactcatagtactcccataccacttcagtggcacaggggaggagatgcttcactgtatctggcttgctctgtcttgcccttggttcttctctttcttgctccctgtcccatcttcacttgtcactttttctgttttaagcatggctgtttcatcttcttgattctgccttttctttccttcccatcaccaaccctaagccattgcatcttcctctcatcagtctcttttattcctttcgaagtatccctctttmcaacttttccttatttctgtctcaccacccttacttcaaagggtggtttctttgcggttttctatggctttttactccactctgtgcctcttaatgtatacacattcttattgcagaatatttatgcacttttggaagagctaagagagacatactactgtataaattactaataaaaatatattagccatgttttataattaatcagtatcttaccatcacagtggaaattggggtgattacaggacatcagagaatttaagcaaattttccaaagctagttttcaacacattaaagttactcttacccttttttcttgctgctgctgctgctgctgctgctacattttcttcttatcctacatttaaatcttatgggatgtgcataactctaaatagagctgtgctgcagcaactaaaactgctgatgaatgttttctaggttgaagctgatctgggctatccaggtggaaaggcgaaagtcatccataaggaatctgatatgatcatggcattttctgttaataaggtaaaagctctcatcattatacacagtgtatttctccttagtgaaattgcttaaatcatygattctgcctttgctttataggcaaattgtaatgaaattgttttggcttcaacacatgatgttcaagaacttgatgttacttctctactggcctgtcagtcatacatatggatcggagaagaatatgacagagaatccaaaaggtttgtctcatagtcacttttacatatagttttctgtaagaagtacccacyaaatggttatgcacatgatttgaattatttcaaaaggtatacrtgtatctccttcatttgggtaggtgacaaatataattggtttagctgccagtgaaagtctttgtctacattaactgaatgaattacacttccattaaaccctacactattgataatatttcaataaggataatccctaacacttggcttcatgatattcagtaaattaatctgatctggataattaaaacagtagacacaaatatgttaattacactgagtcacatttaccgagtaattttgcagtgtttcttcttatcacctgataagcataccttttcttaaacataaaaatgtagacggctttacttttcattgaagctatggacactgcaccaagagtgttttgccattcttacctattttgaggtttcttctttgtggtttgccttccctcctgcttttctccagactcttagaaattgttcatgcttgaggatggtgccatgatagtttctctcctcattttgttgaattcttttttttgttagtatgtgatataactaggatttaatatcacatttcagagtagatataaccatgtactatgatacaatccatcccaacaattactttcacattttatatgtcttactccaagaaatctttaaactcaaatttctttaaacgtgttaatttgatactgagctatctgtacttgaagagaacataatatttttccatagataacaacaaacttttgtttcaacttgtgcagcaataaagttgtccccaaacaacattagactaaatttacattttgccaaaagggaaaaaagttaaccagtattaacattggcgattaggacttgtacctaagtttttctcatggctacttagtttttaamataaagattgtcctatgggtacataagaagattttkagttggaatttgtgttaagagaaaagggaatgttcacagtaacacatgaatgtttttcacagttcagatgatgttgattatcgtggttccactacaactctttatcaacccagtgcaacatcctattcagcaagtcaggtgcatccaccttcatctctgccatggctgggcactggacagactagcactggagctagtgtggtatgttatttacttataggtatcatttctggatttggactctgaaaaatcagttggaatctctttgacataggaatgatcctaaatttcagggacaaacaccagtagataggccatgataatgacagctgacatttattgtggcttttttatttggtgacagggtctggctctgtcgcscaggctggagtgcagtggtgcaatttcggctcactgcagccttgacctcctgggctcaattgatcctyccatctcaacctcccaagtagctgggactacaggtgcatgccagcgtgcctggctaatttttgtattttttgtagggatggggtttcaccacgctgcccaggctgttctcgaactcctgggctcaagtgatctacccgcttcagcctcccaaggtgctaggattacaggcatgagccaccacactggcctcatatgactttcttagtgtcagatacatgctttttctcacaacaatcctaggtggtaggtgctattattaccctccattatcattttacagatgaataaacagatacaaaatggtaaagcaaagttaaaggggaattcatgtctacttctaagtgcttgaaagcatgtcagtaacattcttgtcactgtagctggaggggtcccattcttatgttctgctctgaagcatctggaggtgctcctgaatatcctcagggaggggcacttgaagaagagttcctttattatgagatgaagctccttggtaacctcacaggccagggctataccagcaagtgactgtgcttcctcaccctcttcagacaagtgttctatgtagtggttcagaacatccataacaggctttatctcagtaataagcaaggtgtaagagaataaatgtcagaatttatcctgaagcatatccttcctcatctyttctgcatacacaaaataaaatttttwaaattttcttttaaagcttatgaaaaggaatctacataatgttaagagaatgacttcacacccagtccatcaatactgtaagtatttatgacctaataattgtaagtgtcctcatttggaggttgatttatagaatagaaaatattggaactctttaatttcttatttcctgctttttctcttgtgtttcagatcttacaggtgctcaggacggcagtgtacgaatgtttgaatggacgcggcctcagcaacttgtctgctttcgtcaagctggcaatgcaagagttactagattatattttaattcacaaggcaacaaggttagtttctgggggctactgctgaattcatctgaaaatagttgtggatatttaggagtaagtgataaaagtgcatcgaaaaatgaattcagtgaccctggatttaaactgagtagrcagttkgttggagtctattcatacactctcttttcttccaatagaagcaaaaatctacaaaatttagtatggattaatcatctatttaaagatactaaatatactgtgagagtaaaaaaactgcctgtgttgagtgtgttggtgattcctgtaagcacagtaaagttcttgagagaaacctagtttcttactaaatttcatcagtaagaggttagaggaaaacagtgaaacaggtaagcagttaagaagtaatggaagggccagtcacagtggttcacacctgtaattacaacactttaggagcccaaggcaggaggattgcttgaactccagcatttgagacaacctgaacaacaaagggagaccacatccctacaaaaatttttttaaaaagcccaggcatgtgcctctagtcctagctactcagaaggttgaggctggaggatcccttgaacccaggagtttgaggttatagtaagttataattgcactactgcactccagcctgggtaacagaatgagaccctgtctctaaaaaaatttaaaaaaaaagtgacagggaattttttagcacttggactttttgggaatgacagcaacagaaacatagttagaggcagaatgtttatttagtagggccttagtgaatcttccttccatgtttttacctttgctgtggatgctaagaacatgtgtttagtagttatactgttcttacagtgtggtgttgcggatggagagggttttctgagtatctggcaagttaaccaaactgcatcaaatcctaaaccttatatggtaagtatcactaaatgttcccagggcgcatatacacaacactttgttcatgaagtgtctgtttcagacagtgaatctcattggtggtcctattgggaaaaggatgatttttttcagcaatcccagcctgacagcagcacccatccttaccctagttttagactgaaatgacctgaaaaacaaaaagccttgcttttcaccttgaagtacagtttatattttaaaaattttgggggctttccctgtgtgtggtacaacttgggttttttttcattattattatactttcatccattttgaaaactctatcttcttaatatacacatgataaaattctgtcattaagaatcaggttctgccgggcacggtggctcacgcctgtaatcccagcactttgggaggccgaggcgggcagatcacaaggtcaggagttcgagaccagcctgaccaacctggtgaaaccccctctctactaaaaatacaaaaattagccaggcatggtgacacgtgcatgaagtcccagctactcgggaggctgaggcaggagaatcgcttgaacccaggaggcggaggttgcagtgagctgagattgtgccactgcgctctagcttgggcaacagagtgagacttcgtctcagaaaaaaaaagaatcaggttccaaacatctgttccaatttgttccagaattgtgcttaccagattataaaataaccaatcccaatgagccaccttaatccaaattggattacaaaatagttggtgatgaagataagtagatctttacctgatggagatatggtgggggaaaggaacatgggggagggtggaaggtgatgctgtcctgtgtgaaacttcaggcttcacatatatggagggaggttcagaacgccttgaacctcctgggaccagatagattacccaaatactttttaaaatttttctaaactatacatatgttcttaattatgtgtataagataattctcttaaattaggacactatagactgtaccttgtctatgcagaaatggaagtaatcttgaatttatacttttgtcttcagtcagatctgtaccactataattccagacagaaaaacatgcattatatttyaaaataccttgacatcctaagactagttgggtctgtaagcatttcctttgtgactgttaaagtttattacatgtatttgagatcattagcactaaaattgacgggtcttaggtaggttcatgtactttgatgtcctattcttacataatctgaaaaacatgacctttaattctgtttttaccaactccagttattaaaaattattggacagtagccaaataatatacacatgacagttaagcctcatactatcacttattcttttatcctagaccgagtttttaaaaactatttttagctcatgcatatagtatgttattagcagacatgtatgttggtactgtatcaaattttatccaatggtaaaataacatcagttgcactttgtttttcgtagagttggcagtgccacagtaaagccacaagtgactttgcatttattacctcttcaagtctagttgccacatctggacactccaatgacaataggtaggttgacagaaaagcaaagtaagaaatataaaaacgttagaaatccatacctttagcaagaatacttttctattagtagggtttttccactctaggcattaaaaaaaaaaactttgttacataattcttatttcagagtgttttttcttaccaaaaagagaaaagcaaaaatgaaagttattcctaatatatgtaatttttattttaaagctattcagtcttttttaaactactactgttaacactgttagtttctctaggactaacaggcatctgatattgtctccatcattctcaacatttttattttattgcagtaggtttgggggaataggtagtgtttggttacatggataagttctttagtggtgattgctgagattttggtgcacccatcacctgagcagtgtacactgtacccagtgtgtagtcttttattcttcaccctcctcccacccctcccaagyccccagagtccattatatatcattctgatcctttgcatcctcatagcttagctcccacttacaagtgagaacatacgacatatgattttctactcctgagttacttcacttagaataatggcctctaactccatctgggttgctgcaaaatgtgattatctcattcctttttatgaagtattccatggtgtatatgtaccacattttctttatccatttgttggttgatggacatttaggttggttccatagttttgcaattgtgaattgtgctgctctaaacaggcatgtgcaagtgtctttttcatataatgacttcttttcctctgggtagatacccagtagtgggattgctggattgaatggtagttctgcttatagttctttaaggaatctccgtatactgtttttcatggtggttttactagtttacattcccaccagcagtgaggtgtccccttttcaccacctccatgccagcgtctattgttttttggttttttaattatggccattcttgcaggaataaggtggtatcgtattggagttttaatttgcattttcctggtaattagtggttttgagcattttttcctgtttgttggccatttgtattttgagaattatctgttcatgtcctttgctcgcttttgatgggattgttttttcttgttaagttccttgtagattctagatataagtcccttgtcagatatatacattgtattttctcccactctgcaggttgcctttttactcttgctgtgcagaagtgttttagtttaattaggtcccatttatttatttttgttgcatttgcctttgggttcttggtcatgaattctttaagtcaatgtctagagtagttttttttgatgttatcttctagaatttttatggtttcaagtgttagatttaagtttgacccatcttgagttaatttttgtataaggtgagagatgaggattcagggactaacaggtatttgacactgtccccatcattctcaacatttattttgacctcacatggttttcattagcaacacatgcccatgaataacatcttgtttccctgcagtggctaccacctggggatataaaagcattccttatactcaggaagtcatatcagtttcctggagtggcaatggaaaggagatggggtagaggatgcagagacgggcaggaccatgtgagatggaactgtgtagtttgaccctacccccatcctagttgggaatcactactctctataggtgtgagtgaacaaaaaagataagaatgaataagcaaaatatttgactgaaagacaggttgtccctgatgacgacttataacaatcatttatgatgtatttttgttattgtgtttctttaaaagaaatgtttgcctctgggacacattaatatcacccggaaacagcctcattcatggtgagttaaggtctatgatttttaaaaatataccatgaaggaataatacaccatgaaggaatgctttcttggttttaattagtgaatccagtgagtgtttattgacaggttgaaaatggagaaatatttagaatgaatgactaaaaatttggaaagttaattagcatatctggcttccttgctgagttaaagatatatggtctcagaaatccaaaatagtctttatattctattcagaaaatatggtatggatagtggtactactaacaaggctatttaagaaattagttgcaaagtattcattgagcttaatagaaaataacatattttaaagaattaaacctcatcataaaatactttttgtctttttttcctttttgtggagatcaaggtcatgctgtattgctcaggcaggtctcaagctcctagggtcaagctatcctcccacctctacctccctaagtactgggattacaagcatgagccaccacacctggccctaaccataaaataaaacaaaggttaaccttattataatgactagaaatgtaaacagtgccatttaaatattattccttttaagacaatacttgccaaattagtgtcctaactctgtcttccacatagtaccacccaaaaagtgctccatgctcaagtaagtttggttaaatgaagtagattgtcagaaagacagaaagattctcagtcttttaatacactgatatgcattttgaaatatgtagttaattctcaattttattgcagaattctgcaaacagtggttaacattgcttacagattttctgcatgttaatttgaatctttaatcatattaaaatgcaaatactcctgggaaggataatgaacttcttaacttgtaactgaaaacattcacacattttctcatagtgtcgttgtttcaattacttacctgaaaagaactttttgtacggtacagcacttggctgggttaatactcaccaactttgagaaggttggtctctgctcttctgtatactttttatgaggcagtatcacttagggcttaaggtttaaactttctttttctctctgtgttcatttcatattgagattatggataaaaagtttgttctgacattgcttaacatttttctttaatcatgtgattacagaaattcaatgacttacaaaacaataaatgtaccttagaatgaaaaatgcatcagtaaggtctgtatttaaatgtggatgtagacatcataattaccaagacaagaaattgttttgagaaattctctgatgtttttcttcttcaggtttcacgtgccacgatcatggtgccacggtactgcagtatgcacccaaacagcaactcctaatctcggggggtaggaaaggacacgtctgcatttttgacatcaggcaaaggcagctcattcacacgttccaggcccatgactcagctattaaggctctggccttggatccctatgaggaatattttaccacaggttcagcagaaggtaacataaaggtgagtcagtacaagaggttggaatgtgctaaagactgattggaaagagaaaaaacaaaaactccacattctttgaaataaagcttcactttatttcacttgggctactgcatggagatactgcatatctcaacactctgccgcctccccatgctcctgtatggttctttctaaactgttatggtcaatgagattatcaaactcattggactcaggccattagaaagctttaaagcattctattttgagtaaagtgtatgagtttaatgcatgaaattttttgatgacattagtttggctccttagaagcttctcccctctccctcagtactcttgtgtgtggtggaggtgacgtttccagtaagtgagctagtgcagatgctccttgactttatggtgggattatgtcccaacaaacccattataagttaaaaatattgttaaagttgaaaaacatactttcaacttaatattttcaacttactatgagtttattgagactaacctcaggataagccaaggagcgtgctgaatgcgtattgctttcacactgtcataaagtcaaaaagtcttgtcaaaccatcgtaagtaggggactgtctgtaccacactacttttacatagccttaggacctagctcagcatgaggaacacatttaactgaattaactcaaatagttaattgaattagagatgggctacatatggttaatatgaagccacaagaggatgtgaaggaaaatatgraaggaggacagtaaatgaatcgtgggagtggtgttatcatttcccacttagataagctcttaggaaagaggcagtgggtgggaaggttgggctttagtgagatcacttgggccaagggagcagaagggccatgtttttgcttttggtcttttcgtaatatatttttaactccttttgttttgcactaggtttggagattgacaggccatggcctaattcattcatttaaaagtgaacatgctaagcagtccatatttcgaaacattggggctggagtcatgcagattgacatcatccagggcaatcggctcttctcctgtggtgcagatggcacgctgaaaaccagggttttgcccaatgcttttaacatccctaacagaattcttgacattctataaagattggggttttatttttatatacatttcagttaaaaggcacactacagtcatcactaggcaattctgctttctaagcagttgtattgaaaacagagaatctctgtgtagaatttgaatatgayccaagctgagtattatctaaacaggttggtggaatgaatgcgcatgtaccttattatgctgacatactaaaaaaaataaaacctagtattgtatgaaggatagctattctttacagcatttagcaaacctgattcagaaaacatttgagattagcaaattagtaacttgaaataatgaaaaggacgtttataccaaattaaggaagaaaatgttgctgatttgggtttttcttcctgttcttaccactgactgaagcatgcctgcagtctcctcctctgttgaatgaaggataatcataaggtgtttgttaggagcgctagaccacctggaaaactttyttagctgtggagcagtgcgcagtgaccagttctctgctgtgagaggccgtttccattctttcctgctgaatatttttcctgttagtgtttatactgagctagtactgtaacttgcaaatgagtgcaaatttaaatgcaatgttttactcacaatttgcacattcacattttttggactgctagtttttctatttaaatatttgccttcatgttaggaatgtactatgtgaacatgacatatttgtagttaaccaaacacaccttcttagtccagtttagtactttttcttttcgtgtattcaaggttaaacacccaaacatttaaggrtatgttgaaactacaccaatagagcatttcatatcataattaaaatgaatgttaggcttcttgtggccagttaatagttgatgagattggtgacattatttattgccacagcctattgtataaactatgcagagttaaatatttgcttgtaaaatattagccaatgttgtcattattttgatgtatttccttggttatgaccaaaaatatgttgagatactgaaactaatgtctgtgtgtttaaatgtttaccagcaaattgtcttatcatgttaatgagaatgttcaatgcctgtgtggtaaatagtaaatacaatggcataaaagtaactttctctgaagatgtgatgttcaggctgtgaaatatatatgtaaaagaaaaataaatgttatttgttagagtttttagtttgatactgtttttgaccattgagatttttaatttgataaaatgtttaactgttagagaatttgcaagctatttggcagtctattcattcataagtaagtatttactgaataccttctataccaaaagccattctaggaaatgggatacagtggagagccagacagagaargcacacaatgttgagatttagcggggcaagagctaacctcactataccttctccagacagatttgaagtttattgaatgaagtactaacctcgtacccaaaactcaaatctgagtcttggctatttgcttgctcctaagtaagtaagggaagtcagaatatgcccactgataagaagagccaggaaaataagcttgtgagtgacatctcaatgcctaaagcaaaactgattcaaaggagctttcagaaaaaagggaagagaactttctctgtcaggtaaaagcagtaagagactctagattcaccttctagcttgaaacaactaaaagaaagaagacgacaaaatatataaacaatggttctcaagacattaagcatcaggtagggagggacagtgattcctgagaggtgagcattttaattgtcccaacttaccacctcaagaaagtttccaggccacaggcagggagagaacccaggcagagcctaatggtttctccaagttgccaagatgatagaactgygagtctggggaatataatgaggatagagttygcaggccaaaggccacagaggggcacagggagaggtacacagaaggtctgtattagtccattctcacactgctataaggacatacctgagactaggtaatttataaaggaaagagatttaatggactcatagttccacgtggctggggaggcctcacaatcatggcaggaggaaaaggaggaccaaaggcacatcttaacatggcagcaggcaagaaagcgtgtgcagggaaactgcccttcataaaatcatcagatctcctgagacttattcactatcacaagaacagaatgggaaaaacctgccctcatgattcagttacctcccactgggtccctcacacaacacttggggactatgggagctacaattcaagatgaaattgggtggggacacagtcaaaccacatcaagatcttcctcaatattttgctgagaaaggaatcagtgtatgtgtatgagcaaattgctggcacccagaacaayagccatcgaaagggattagaggtaacaatctaatcacacaaagctaggaattcagcaggaggccccccttatctgtggctttgctttctgtggtttcagttacctgtggttagtcatggtctgaaaataggtgaggacagtacaataagaaattgagagagggagagactatattcacataggtttttattactgtatattaattgttctattattgttgatcttttactgtgcctaatttataagttacactttttgagacagagtctcactgagtcgcccaggctggagtgcagtggtgcgatctcagctcactgcaacctttgcctcccgggttcaaatgattctcatacctcagcctcccaagtagctggaaccacaggcatgtgccaccatgcccggctaatttttgtgtttttagtagagatggggtttcaccatgttggccaggctggtcttgaactcctgacctcaagtgatctgcctgcctcagcctctcaaagtgctgggattacaggtatgagccaccatgcctggcctaaactttatcatatgtgtatatatwgagaggaaaacacatatatagggcttagtaccatctgcagtttcaagcatccatccactggagtcttggaacatctcccttgtagataaggtggggggactactgtaattcatattctcaccaaccagctggaaaacctcataattcatggggcattaggtagtactctcaaggattttgctgcagtagcaggacaaaattagtcctaggataaacactatcatggtcctgcctaagaaagctaaaaaggaaatgaccaaaagccaaatagctaaattttatctgaaaacatagctccagagtatttgtaggaatacaaaaatatccaacactcaacaaggtaaaattcacaatgtttgacattaaaaaaaatgcatgaaaagtaggtaaatacaaaccataatgagagggaaaacatacatcaaaacagatacagaaataacacaggtgataaaattaatagcataactatttcatatgtccaagaagctagagaaaaaattcaatgttaggaagagatgtggaagacacacagattcaaatcaaacttacagaaatgaaaagtataatgtttgagataaaaaaatacactagatgggattcacagcagattagacattgcagagtgaaaaattaktgaatatgaaggcacaatagaaactatccaaaaggaaacacttttaaaaaacattggaaccaaataacaccagtgagctctgggacaactttgagcatcctaatatatgtgtaattggagtccgtgagggaggagggtaaaggaaaaatataattaaaataatggccaaatattttccagttttgattcaaccacagatccaagagctttaatgaaactcaagcacaggaaacaaggaaagtagagccatactcatcataatcaaattgcttaaaatcaatgataagagaaaaatgttaggatcacaaagagaaaatagacacattgcatacacaagaacaaagataaggatgacagcagatttatttcaggaacaatgcaaaccagaagagtggagtgacatctttagaagttttggaagcaaaaaagctgtcaatctagaattctttgaccagtgaaaatacctttcaaaaatgaagtttacataaagacatgaaaagggtaaaagaattcatcgccagcaaatctgcactataagaaatatcaaaggaatataaagaaagtttctgaatcagaaggcaaaatgataccagatggaaatamggatctattcaaaggaataaagagtaccagcaattataactacataagtaaattacataaagacttttcctcattgtttaaatctctcctagacaattgtttaaagcataagtaaggccagtcatggtggttcatgcctgtaatcccagcaatttggaaggccgaggtggggcggatcatctgaggtcaggagttcaagaccagcctggccaacatggtaaaaccctgtctctactaaaaatacaaaaattagccaggcatggtggtgggcatctgtaatcccacctactcaggagcctgaggygaagaattgcttaaatgtatgacaacagcagcacaaaggccaggagagaactagaagtatactgttgtaaactttttacactatatgtgaagtgatatatcacttaaagttagataaaaatctacagtataattagtttggggagtgacatcagcaatatagcaggatgggactttccaatgctcaccccctcacagaaacaccaatttaaaggactatccatgcatgagaatacactcacaagagctraggaaaccaaatgagagattacagcacctgaatgttgcacagaaatcagaaaagatgctgtgaagaggataggaaagagttttacatgacccatccgtgccaccctccctccacccctgggtagtatgacgtggggagagataccttctgcatgggggatagagagggaggtgagcaccagaatggtgcctcggaccccaacaccaggcctgccccagtaaaacccagtgctagacccctattgcccagatttcaggccagttcccgcagactgagcctctaagcccatctaagcaccaggcaggatcctgcagccccaggcccctcactggacttcgtctctgggcccatacaatttctaagctcacctgcagcagccccaggctctggactggttccaatgccaggccagacaccatagtcaggctccaggatggccccaaggactcagtcctcagacycatccagcaacaggcagaccctaatggatataggctccagacaagatcccatggagctgcctgcaggcccgccttggtgccagtggacttattctctcaggcctaccccagggctgggctgtccccagtggctccatgctccagattgttcccagggctgggctggcctctatagccctgggcttcatgctccctccagtgttggtccggtccctgcagccctagtcatcaaggggacacccatggacccaagctccaggcctgccctagcaccagtttagcacttgcagcctcaggcttcagaccattctcaggctccaggcctgtcccactgccaggatggccccagtgacctgaggctccagactgccycaacacctggctggctggcaccagcagcctcaggctccaggctggccctgtaaccccagactccagaccggcctttgtagacctagtttccaggtcctcctcagcctcaggccagcattcatggacccagcctccagccagtccttgcagactagggacccagtctgccccagtgccaggctgggccttcacaaccccagatttcaggctagcacatgcagacccatcttgtaggcctgctccagcactagattggcagccattgaccccagtaccaggacrgccctggcagtcctgagctccagagcagctcagtgcatgctggcccatataaccccaggtttcaggcccaccccagcaccaggtagatacccctatcctcaggcaccagattggcacctgctgcctcaggaatcagtctgtgttagctccaggttggcctttgcagtcccagactccaggctggcatccatagacccagcctccaggttttccaagcacaaagctggcccccatggtcccaggctctatgcctaggccctaggtctaggccctagcactaggtcagcacccacaaaccccagtcccaagctggcatgtgtggacacaggctctaggcctatccggtgccagtccagtttttacaaacccacgctccagcagacccaaggttcagacctgtcctagtagacgcagtaccaggctagcccctgcagactcaggacccagacctagccctacagactcagattcaaggtctctcccagtggacttgtatgccaggatcatcccattgcctggctagaccctgcagattcaaagtcaaaggctgtatgtaccccagcactagatcagctcccatggacctaatcaacaggtccactccagtgaatctgggttcatagacctaggcaccaggcccgcctgcccaagaacacaagaagcaagcctgcccatgggccatagcagatagtggccagawtctctagacaggttgactgatgaagtccttgcccaaccaaagcaagcctgcaaagactcgaatcagtccctttctgacatgaatgcatggccacgtgaatcaagaacaatcagggacacatgacaccaccaaaagaacaaaataaagcaccagcaactgaccctaaagaaatgaagacttactattcagcaactacactcttggatatttactcaaaagtcagtttgttgaagagatgtttgcagttatctttattgtagcactgtttactatagtcatcttaagaaatcaacctaagggtccatcgacaaatgaataaagaaaatgaggtatatatacaaatgaaatattattcaatctttataaggaaggagatactatcattcatgataacatggatgggtttggagaacattatgctaagtgagataagccagggatctctgggcactgggggaaggagaacatggcaattgtgaggcaatgaactcagggctgtcctgttagagcagaaaggaaaaccagaccaaactcagctgatgctcacccatggaaggaacatttaaaccaaccctacccagaggggaatcgctgatcccagcagtctgaacctgagtacctataaaccttgccactgagggcaacagtgctctgtgtctccaggtaaacttgaaaggcagtctaggc

SEQ ID NO: 9900 - DNA, 12912 bp, Homo sapiens
  misc_feature (790)..(790): n is a, c, g, or t
  misc_feature (921)..(921): n is a, c, g, or t
cactctgccttgatattaccttgtcaaactgaaagagcagtaactgtcagttgaacctttttctgtaaatataatctagtcagaatttttaacatggatgtaacaaccatacccttgagataatcctagtcttaaggctgagtttttttgtttgtttgttttttgtttttttgagacggagtctcactctgtggcccaggctggagtgcagtggcatgatcttggctcactgcaagctctgcctcctgggttcacaccattctcctgcctcagcctcccagtagctgggactacaggtgcccgccaccatgccaggctaattgtttgtattaatagtagagatggggtttcaccgtgttagccagggtggtctygatctcctgaccttgtgatgcacctgccttagcctcccaaagtgctgggattacaggcgtgagccaccgtgcccagccatggctgagttttaaccaggcttagaaactcaaatactattcagtgttgagaagcagttgcctcttccagctctgcaaaatctcaagtttctagactcttctttctgatatatttttttcctgcttgcaaagtagtataaaattgtcagaatcaaaatgaagtcacttgtgttaaaactctgacaaatggagctggagaaggccatgaggggagagttcttaatgtaaatacgacttataacaagagctaccagaaaagactctacaaaacaacaacattgcacaaaggccactgcaaccctacacaaaaagatacttctgcaaggacatctgctcanaacctccttgtctaaccttagacaggtgtcacccttgttcctgatccttggatccaaggttaattatctcaaaacaattatgtaatcttcctcttttagaaatccttgtcttttctaatgtccctgaatanacacataatttactatggcacawgtattctcattgcaatattactcccaaataaatatcattttcttttagagcatctccctctgtttgctatttagctagacagtaggcaattattttctaaagtcaatttttttaattgtcaaatgaaccattaatatattcaattatattttttttctagagttacaaaactttcaaatatgtgatttacctcccacataaccacaggtgactgctatcgaatgttttgccactccctatcttgttttacagtaaacagtaatgttttttcttgccactcactgccaatgaatcaagtattaagccagtgtcacataagttaggtgttttgttttagtaacataccagttcaagaggccagtctcatacttgccaagatagcttagtctatgctgtactaacaagatccccaaakctcagggactccacgtaggagaagtttttgttgtttgtttttgtttttgatttctgttacatgtcctgtgctcatagtggtcacaaaagaatccaggctgatagatggtttattgacccttgtttgagtgtcaaggcaagaagatgagaaatttgcagtcttatagtggtgagtaaatgctctcactctgaagcaacatgtcatttccacaatattttattgaccaaaaatttacataatatacaacttcaagggggagaggggactcctacaagactacatttcttatcctacaaggaataaaatgttagcatatagctctaggtcccattttacgacctctatgctatgtacaagatatatatctaaatcctaataacaaagagaagttaaaagtaaaatttagaaaaatcacaccataaaacactaacawaaataagctaatgtaatcattttaatatatactaaatagattttttttttttgagacggagtctcgctttgtcacccacactggagtgcagtggtgtgatcttggctcactgcaagctccacctcccaggttcctgccattctcttgcctctgcctcccgagtagctgggactacaggtgcctgccaccatgcccggctaattttttgtagttttagtagagacttggtttcaccatgtgttagccatgctggtctcgatctcctgacctcatgatccrcccgcctcggcctcccaaagtgctgggatttcaggcgtgaggctaaatagattttaaggaaaaagacattagaatagataatgtcacctcatgtgagtagaggttatatttgccatgaagatactacaattctaacgctctatgcactcatcagcatggcatcaaaatatgtaaagtaaaagttgacaggacttctaaaagacatagataaacctatactcatagcaggatrgtttaacattaaatctcaagaaataatagaataaaaagacaaaactcagaaaaggtaaataggatttaaataacatgattacaaatagatctagtggatgtatgaaacactgcaccccaaagctacaggatacacattattttcagcaaacacaaaacatttatcaaaattgaccatatatgcataacataaattttagcagagaaaattttatgtaaatggaaactygaacatatattttaaaaatagtctatggtggaagaaaaatcacaataaatttagaaaatatttaaaattaagtataataaaatatagtaaaaccttgtgagaaatgctgaaaaattctaagaggaaaacgtatgccaggaatataacagcaaacatactcaacggaagtaaaaataattaaataacaatataagagatgaaattaatgaaaaataatacatctgaaaagatcgaccaagacagacttgaatagactaacaaaataggcaaacttctggtaagataaatcatgaaaagaaaagcaaataatatgaagaatttaaaggatatattctgttggtattaaaaatttaataagatgatattataatcaaaattacatgaaaacataaataattgaaactgacaaatatctagaaagtcgtaactgccaaaacaagaccagaagaaataggcaacggaatggttccagatcaagatcatagaaatgtatgctcatgtactcaataataagttacatgttaaagaatgttcgtagcatcatcatcatcatagtctccaaactcaaaataaaccaactttgtgtttccactagactagataaattttgaattgtcattccattaatactatacagcaattgaataaatgatctatctctatatgcaacatgattaattttagaaacataatattgatcaaaaatagttaaattcaaaaatattgtgtacagtattattccattcatgtgcaatccaaaaccaggcaaaaccaagctagtgcttagggatacatattcaaattaaaatatacaaagttaaacaataacgtgatttgaattgcagatagttgttacttctggaatgaagataggggttgtgattagaaaggagcaaataaggtgttatggggtttacaaagttctctttcttgccatgggaggcttttaaattagtgtgcactttatactatagcatttaaacttcattaaatgttctatatttgttatatgtaacaataataggcagcaaaaatgaaaaagagaaaagaaatatttctaaacaaatgatatgaggttagctaaatcttaataccaaattctcataggcacaatatgagaaatgaaaattaaatgtcaatattccttaaaaacatagctgcaaatatcctaacacaacgttggcaaactgcatccatcagtgacttaaaaaatactttacatactcaaacctttcattgtttcctcttcctgccctttgcctcattttccttttcagttcagactgctgaaaaagtttttctgtgatgctccctagcatctattctctttctcttatagaagtgagagactacatctctttgattaaattyatatttttaaatgttttctcttatggaaacacaccaggaaaatgcagctcagaaccgcaagcctgttatccattctctatgtctttgtcatgtgttatatcacaagttctaaaaactgtggtattttttcatataccagcaagtacagtaccattcctcaggcctatttgtacagatttgggrtattatcaagttgtgaccggcatccccaaacccttttctctagataggtaggaagaacaccctaaaatgaaaaagtataaaagatctcttcagccctgggtcaagaatgcaaatggaagaccacatgccacatagctacatatttaaaggtcataaatatacaaacctaacaaactgttaaaggagayattttctattctatcttgacaaatataccattataacaacaaaatagaaaatatctacctattttaagttataattgaaacttgcaaatcattaaagatgatgcaattattttgtaaattttttagtactctgtagatcacccaataaagattgcatgagtaataaaatacaaacattcataattcacaaattatatctttattaaataaaaatagctttgtattcatctagctaaatggctacttattatcttataatyaagataaagtgttttatttatattaattttgaattagacaatctttcttgagtctccacgttttcagaattttggtaatccactttttttcggtagtttttgaaagagtggggcggggtgaggaaccttgactcttcacaatgaacacattagtcccygcttatctgcagtttcagtgacccaaggtcaaccacagtccaaaaataggtgtgtacagtacagtaaggtatcttgagagagtgagagacaccacactatatattttaacacatttttttactttttatttttttaatttttatttattttagatacagggtctccctatgttgcccaggccggtctcaaacttttgggctcgagcggtcytcccgcctcaatctcccaaattgctaggattacarggatgagccacaacccctggcaacttttattatagtatattgttttaattgttctattttattattagttatttttgtaatcttttactgtgcttgatttacaaattaaactttatcataggtaggtgaatacaggaaaaaaatatattgtatatagagtttggtactatctgctgttttaggcatccactgggggtcttgggacataggcctcatggataaggggaactagtgtatctatttctttgcttggttttcagttttgcaagttatgatgtaatatagtactgctttctttggtagctgttgctgattttgtaaaatttgtttttttatcacttttaagtttaaaaaagaaatatgaggggaaaagcggataaaatgtgaaggcatttggtgcctatggagggatggtggtgagcactgctaagtagtgatgaggcagggaatgagaaagatggatgctttgtaaaygagtttctctttagtcacagtattgaccagatccagctttagctccacaagaaattgagcactcttttgaaatagcataggtaagtctttgcatattttataaagcttcattggctatgctattagccataaaagcttcatttagctacatattctatgaatcagatttttataatatttgtacctcagaactcaagctggttgaatctaattttctatgctcagacaaggcaaaaaagtacaaaacaatgaaagagaatatatctttatttgcatggttgcaaatgtgagtttaactttgctgcataatcatctatgaaatatttctgcccatggtgaagacataaatatcttagctagggctcagcagagaaattgaagaaaaataaagatatcaccagaacagttatgtgaagatcgatcagcaaactttagagatttctgctttgacgttgagccaacaatgaaagaaggagcagaaaaaggagaaggaagaagaactccactggacactcaaggatgtgaatagcattttagatcagtgaataaccagcagtgacattagacattgaactttctctgttctgacatggaaagtgccctgccgagtatcttcactcttgtaataattgcagaattcataattgggaatttgagcaatggatttatagtactgatcaactgcattgactgggtcagtaaaagagagctgtcctcagtcgataaactcctcattatcttggcaatctccagaattgggctgatctgggaaatattagtaagttggtttttagctctgcattatctagccatatttgtgtctggaacaggattaagaattatgatttttagctggatagtttctaatcrcttcaatctctggcttgctacaatcttcagcatcttttatttgctcaaaatagcgagtttctctagccctgcttttctctatttgaagtggagagtaaacaaagtgattctgatgatactgctaggaaccttggtcttcttatttttaaatctgatacaaataaacatgcatataaaagactggctggaccgatatgaaagaaacacaacttggaatttcagtatgagtgactttgaaacattttcagtgtcggtcaaattcactatgactatgttcagtctaacaccatttactgtggccttcatctcttttctcctgttaattttctccctgcagaaacatctccagaaaatgcaactcaattacaaaggacacagagaccccaggaccaaggtccatacaaatgccttgaaaattgtgatctcattccttttattctatgctagtttctttctatgtgttctcatatcatggatttctgagctgtatcagarcacagtgatctacatgctttgtgagacgattggagtcttctctccttcaagccactcctttcttctgattctaggaaacgctaagttaagacaggcctttcttttggtggcagctaaggtatgggctaaacgatgagaaactcacaatttcataagccattcagaccacagattattgaatattgcagacagaaacaggagtctacaaggagtttaaaagatattttatgcttcccctggtttcttttattgtgaaggtcactgtaaatgttttaaattcttctctataatagcatcttacctaagaatattatgtatttatgacatgtatttctacattattaggaatttgaaacttatttgaggaaattattggcagattctattgtaaattaaaaacatatactacagcatacttagatgttarttgtaaatctacaatcttttgtttggcaatggctcttcaattctaaatcattcattgagatgggtgatttaggtaattattttattatctcaagtactcctatttaaatggtgagctacagataattagaacagttatttggaatagaattagggaagtttggacttgccactattactatactgatgtgttgagagaattgagagggttaaaaagtttaatatgagtaactgccacataaaaagataacggttttttagtaattatattgtatgtatgtgtacatacatattttacattatgccttttaaagtaaatattattgaggtataatttacatataataaaatgcaacatgttagtccacatttcagttagagttttgacaatgtatacacttgtgtgaccacaatgtcagtgccctttgcagtttaccctctcccctccagccctttttcccaagcaactacttatctgcttttggtaacaataagagagtttttgatttctagaattttatgcatctatatatctatagatatagatatatagatgccatatatacacacacacacacacatacagttatagagtgtgtattgttatatgtgaggcttctttaactcagcataatgtttttgaagttcttctgttttgttgtattaatcagtagtttgttcctgagcagtgttcctgagtagtgttggatataccacattaaaaaatttctctttcctgttaatgaacattcaaatggttttcaattattggccattataaataaaactgatatcaacattcatgtatttctcttcttctggatatacaatttcctcactcttgagtaaatacctatgagtaaaaatgtcaaatcatatgataagtgtatgtttaacttaagaaaaaactgccagagttctatagagtggttgcaccatttcatactattgccagcaatatacgagtgtttcagttatttcacattctggccaacagttggtaggtactctgttttgttttctattttggccattctagtcagaatgtaatggcatctcatcatagttttaattcacattttcctaatggctagtgaggctgatgattttttcatatgctttgggtcattcatacaacctctttttatgaaatgtttgtttaaaccttttgccaactacttagcttgattcattgctttctgtttttattactgagttgtaaatgttctttatatagtctctgtattagtccattttcatgctgctgataaagacatactcaagactgggtaacttataaagaaaaagaggtttaattgactgacagttccacatggctggaaaggcctcacaataatggcagagacaaaagtcacgtcttacatggtggcagtgaagasagaatgacagccaagcgaaaggggaaaccccttataaaaacatcaagtttcatgagacttattcactaccatgagaacagtatgggggaaaccacccccatcwttcaattatctcccactgagtccctcccataacacatgggaattatgggagctacaattcaagatgagatttgggtggggacacagcmagaccatatcattctgaatataagttctttatcagacatatgttttataaatattttctgccagccagaggcttgtcatttcattttctttacagtgtctttcaaagagaggacattaaaaacttttaatgaagttcaataatcaactattttcctgtaagaaaattatttttaactttttttgctttcaaaaytcaaagatattttatggawcagttggaataaatatttgcaataaggcacagttatccttgagtataaggacagaaagcctaatttcattttctctgctgtcagaacaggttctttggtgataccacatgcatttttagtaacctgtttcaatagtactatctacttgagcattstcattttctctcttttattttctttttagaaaggacctcccaaatgggtttgcttaaaagttaggtaagtgagaggagtagtatgatcatttttatcattaatttctctgaactctcttgtagtttatttacccaatagcatctttcaatatctgtcagtattttcacctctgcactcatatggtccscacaaaaaacactataatagttaaggactgagtctggagtcagaggtacaattctcaattctatcacttagtagtgttagttaaaattgtatagttcctatttataagtgaaacatgcagtatttggttttctgtttctgcattaattcactcaggacaatggcctttagctgcatccgtgctgctgcaaaggacatgatttcatttttttttaatggctacatagtattctatggtctatatataccacacttttttggtctaatccatttttttttctttgagacagaatcttactctgtttctcaggctgaagtgcagtgacatgatctcagctcactgctgcctccacctcccaggttcaagcgattcttctgcctcagcctcccaagtagctgggattacaggcaggtgccaggacgcccggctratttttgtatttttagtagagacagagtttcaccatgttggccaggctggtcttgaactgctgaccacaggtatctgcccaccttgacctcccaaagtgctgggattacaggcatgagccactgtgcctggcctgtaatccattgttgatgggcacgtaggttgattcccatgcctttgctattgtgaatagtgttccaatgaaattgtgagagtacatgtgtctttctggtagaatgatttattttcttgtgaacagagtgagaggacaacagagtgaaactctgtctcaaaaaaaaaaaaatggattagaccaaaaaagtgtggcgtgcatacaccatactgagtaatgggatgactaggttgaatggtagtttattttaagttctttgagaaatctccaaactgctttctacagtggctgacgtaatttgcatgcycaccaacagggtacaagcgttcccattgctccacagcttcactagcatctgttttttttttttttaactttttgatagtagctattctgactggtgtgagatggtatctctttgtggttttgatttgcgtgtctctaatgattagtgatgttgagccttttaaaatatttgttggctgctcgtatgtcttcttttgaaaagtgcctgttcatgtcttttgctcgtttttaaaggggttatttgttttctgcttgttcaattgtttccattccttatagatttgggatattagacscttgttgcatgcatagtttgcaaatcttacattctataggttgtctgtttactctgttgatagtttatacaatgtgtgcagaaattctttagtttaattaggtcccacttgtcaatttttgttttttgttgcaattgcttttggggacttagtcataaattctttcccaaggccaatgtttagaatggtgtttcctaagttttcttccaggattattgtagtataaagtcttacatttaaatttttgacccatcctgagttaatttttgtatatggtgaaaggtaaaggttcagtttaattattttgcttatggctagccagatatcccagcaccatttactgaatacrgagtcctttccccattgtttatttttgtcarttttgtcaaacatcagatggctgtagttgtgtgtctttatttctgggttctctattctgttccattggtctatgtgtctgtttttataatattaccatgctgttttggttactgtagctttatagtatagtttgaagtcaggtaatgtgattcctctggcttttttctttttgcttagggttgcttttgctatttgggctctttttttggttttatatgaattttaaaatagttttttttttctagttctgtgcaaaatgacattggtagcttgataggaatagagttgaatctgtaaattgctttgggccgtacaaccattttaacaatattcattcttcctatccatgagcatggaatacttttccatttgtttgtgtcatctatgatttctttcagcagtgtttcacagttctctttcacctccttggttagctgtagtcctagttgttttttttttttttttttttttttttttttttttttttttgaggctattgtaaatgggaytgcattcttgatttggctctcagcttgaagatttttattgtatagaaatgctactgatttttgtgaattgatttgtatcctgaaactttacagaagtcctttatctgtgccaggagccttttggcagagtctttagggttttgtatgtatggattcacatcagcaaagagatatagtttgactatggcttttatttttctatttggatgcctttttttttcttgcctgattgtcctggctaggactttcaatactatgttgaataggagtgatgggagtggggacccttttcttgttccagttctcaaggggaatgctttcagtttttgcatgttcagtgtaatgttagctgtagttttgtcataratggctcttattattttgaggtatgttccttcaatgcctaattatttgagcgttttttcaagagtccagaatttccttgttarttttctgcctcaatgatctgtccaatcttctcagtggggtgttgaagtcccccaatattattgagtgggtatctaaatctttttataggtttggaggtacttgtttcatgaatctkggtgctccaatgctgagtgcatgtatatttggggcagttaagtcttcttgttgaattgaacmctttattattatgtagtgcctttctgtgtcatttttttactgttgttggtttaaaatctgttttatcttatataggaatagtgattctttctttttttcttttctatttgtgttacagatccttctacaaccctttactttgagcctaacagtaacattacatgtgagatgggtctcttgaagacagcagaccgatgacttttgttttttattgaatttgtcactctgtgacttttaagtgagggtatttagaccatttacattcaaggctaatattgctatgtgaggttttgattctattttgaagttgttagctgggtgctttgtagtttctattgtgtggtttctttatagggtcttgggctatgtgcttaggtgtgctattttggtagcagattttcatgtttagaactcccttaaggatctcttgtaagactggtccagtggtaataaattcctttaccctttgcttgtctataaaagattttatttctccttcagttataaaggttagtttgatggaatatacaattattggttggaaaattttctttcctttaagaatgctkwaagtaggcctccaatctctcctggcttgtaaggtttctgctgagctatatacttggccttatggggttccctttgtatgtgatctgatctttttctctagctgcctttaagatttttttctttagtgtagaccttggatagtctggcgactatatgctttggtgatgttcatttcctatagcatcagtcaggtgtcctcttgatttcttgtatctgtatgtctacctctctagcaagattagggaaattttcttaaattatttcctcaaatatgttttccaggttattaactatttctccttctttctcagg

SEQ ID NO: 9901 - DNA, 16326 bp, Homo sapiens
  misc_feature (14748)..(14748): n is a, c, g, or t
gtgtgctcaccctgctgaccgtcacccagcctccggggggggtcacagctggcccccaggaagctgcttcccagcagggcaggaattccatttgagtcttgtccctgttccaggagaagggctgggtatgtgtcccccaaaggggagagcattcgagaaggatggcgccagcctccccagaactgacctgtggttwaaaaaaaaaaaaaaaattgtgctttttaaaagatgagttttatcagctcacacatccttctagagtctaatggagattttttgtgtgtgtggaaatagtaaacaaggtcttgaatcccacagagcaaaaaagacttcctttcatgggcagcactggaagggttgttactctggaatggtttaaaagaggcgtcacatggcttgtttgtgctgatgtcactgcctcgctgctctcctgtggcacctcctcggtccctggccacagggcacagagccaagcacatctcrtgctcttggcccagttacgcttctgcccaggggtaagtcagctggagaggaattcacagcccaggcatttcatgtcgttatggcctattttaatttttttaaccccaatcatttttcttaggaagtgatggggagtttggaaaggcaggcttatttgtcatcaagctgccagyttttatcaatgcaaaccacatccctgtgacatctgtgactgttccttggacagttaggtgagggagggtctcctggtggccccagggttactcttatttaggttgagaaaaattcctttttccaggatcgttggtgatcaaagtgtagtcattctgttgcgcagagaactccatcccagctccaccctcatgaattttgtaatcttggacaaattatttagtatcttagtgcttctgttccctcatctgtaacatgggggtatattatagtcagtagcacctgcttcacaaactcgtgaggacttcagcagttcacacacataactscctcgctgcctggcacctagygtgcacatggcattctaccgtggggtagacttttaaaattctggctacagagatacttttccataaaagtggccacatggaactctccaaatctaagaagcayactgtgggggccttcatattttgtctaattcttttctccccagaacaggaacctgcacccttccttcttttaaagggcgacgtggtaaataaacatttttagacttgcaggccacagtctctgtcctaatgtcctcagctggtagttgtagctggaaagcagctgcagcccacatggaaatgagggagcgtggccccatgccagtgcagctgatgtagaggcgggcagccccgggttaggccctgtggagacgcaggcccccgggctctagaacgctgaattctagtgaattctggatggctctccctcacacccaggcccaccctccctcaaggttgcaccwtctccacctgaaggaagctgccaggtggccataggagcccttctcttggcaggccagcttccaggcccagtggcttctcttacatcaggggcctccccttggaatgttccctgaaggccagacacgggcaggtagtctgtggtcaagcagccaccctgacaggaggctagatgccactgggtgtgctttgagtttcctagatgtggagagttctgtgtggccacttttatggaaaagcatctctttagccagaattttaaaataaagaggataacttcctggtgagaacagacgtggaaaggaaggcactttggtttcacgctcaygtaagagagggctgttggcggtcactcctcagaactatggccagccctggatggtagccagctgctttttgccccaaaagtctgtttagctgggtctctgcattctggaagcttgtcaaagcccgggcctttcctgggtcagggcagccggctttccttgtccacgtgtggccggctgttttcttggggagccccggccacagccggcaggactccctttgctccatgygactctgagggcctcacaggtatttgcagcccaggtgctgtcggagcccagccgatgckaccgacacacagcacaagcgtcatcctgttctgcctgtcccttgcgtgtggaggggactcgtgcccagggctctccttgctggcttgttggaatctggcttcaggtctacacggggcctctcgtttggtccagaacagcctggctcatcggctggggcttgcttgtgcagggctggagcgagcacgtgctagatggagacagcagactyggagtgtgcatttcttcgtgttgcaagcctggcctcacagtgccttcttcctttggttgtctgccaggggtagccctgcaccaggaggaagcttagaaatagcacaggtgggaaccggagagagagcactgttggggaagctgcggtcactcatcagccttcctggtgagaaaccaggggtttcctgctaattctggaaaggatgtttcagcagtgcctgcatgagaygcctcagatagaaaactggttatttttgtttcttagcactgccaccatagataacagctgtcacgatggacagtgtggacctggattagtccttcttgggaaaggagagtttgggttttgtaccrtggtggttytgggttctgrgggaagagaatggaaccgtacgaggtaaaacaggagactctgaaggccacttggccatccaggcagaaagccagggatggagaggggcagcagggctgtgttcagtgctcccgccgtacgcttgtatgcgggaaaccactgcaggcggcccatgaagcctcctggccatgtgcgccctcccrgtttggaccccctcccgtgtgtcttggctgcaggtttgaactgatgygcatgtgctggcagtataaccccaagatgaggccttccttcctggagatcatcagcagcatcaaagaggagatggagcctggcttccgggaggtctccttctactacagcgaggagaacaagctgcccgagccggaggagctggacctggagccagagaacatggagagcgtccccctggacccctcggcctcctcgtcctccctgccactgcccgacagacactcaggacacaaggccgagaacggccccggccctggggtgctggtcctccgcgccagcttcgacgagagacagccttaygcccacatgaacgggggccgcaagaacgagcgggccttgccgctgccccagtcttcgacctgctgatccttggatcctgaatctgtgcaaacagtaacgtgtgcgcacrcgcagcggggtssggkgggagagagagttttaacaatccattcacaagcctcctgtacctcagtggatcttcagwwctgcccttgctgccygcgggagacagcttctctgcagtaaaacacatttgggatgttccttttttcaatatgcaagcagctttttattccctgcccaaacccttaactgacatgggcctttaagaaccttaatgacaacacttaatagcaacagagcacttgagaaccagtctcctcactctgtccctgtccttccctgttctccctttctctctcctctctgcttcataacggaaaaataattgccacaagtccagctgggaagccctttttatcagtttgaggaagtggctgtccctgtggccccatccaaccactgtacacacccgcctgacaccgtgggtcattacaaaaaaacacgtggagatggaaatttttacctttatctttcacctttctagggacatgaaatttacaaagggccatcgttcatccaaggctgttaccattttaacgctgcctaattttgccaaaatcctgaactttctccctcatcggcccggcgctgattcctcgtgtccggaggcatgggtgagcatggcagctggttgctccatttgagagacacgctggcgacacactccgtccatcygactgcccctgctgtgctgctcaaggccacaggcacacaggtctcattgcttctgactagattattatttgggggaactggacacaataggtctttctctcagtgaaggtggggagaagctgaaccggcttccctgccctgcctccccagccccctgcccaacccccaagaatctggtggccatgggccccgaagcagyctggcggacaggcttggagtcaaggggccccatgcctgcttctctcccagccccagctcccccgcccgcccccaaggacacagatgggaaggggtttccagggactcagccccactgttgatgcaggtttgcaaggaaagaaattcaaacaccacaacagcagtaagaagaaaagcrgtcaatggattcaagcattctaagctttgttgacattttctctgttcctaggacttcttcatgggtcttacagttctatgttagaccatgaaacatttgcatacacatcgtctttaatgtcacttttataacttttttacggttcagatattcatctatacgtctgtacagaaaaaaaaaagctgctattttttttgttcttgatctttgtggatttaatctatgaaaaccttcaggtccaccctctcccctttctgctcactccaagaaacttcttatgctttgtactagagtgcgtgactttcttcctcttttcccggtaatggatacttctatcacataatttgccatgaactgttggatgcctttttataaatacatcccccatccctgctcccacctgcccctttagttgttttctaacccgtaggctctctgggcacgaggcagaaagcaggccgggcacccatcctgagagggccgcgctcctctccccagcctgccctcacagcattggagcctgttacagtgcaagacatgatacaaactcaggtcagaaaaacaaaggttaaatatttcacacgtctttgttcagtgtttccactcaccgtggttgagaagcctcaccctctctttyccttgcctttgcttaggttgtgacacacwtatatatatatttktttaattcttgggtacaacagcagtgttaaccgcagacactaggcatttggattactatttttcttaatggctatttaatccttccatyccacgaaaaacagctgctgagtccaagggagcagcagagcgtggtccggcagggcctgttgtggccctcgccacccccctcaccggaccgactgacctgtctttggaaccagaacatcccaagggaactccttcgcactggcgttgagtgggaccccgggatccaggctggcccagggcggcaccctcagggctgkgcccgctggagtgctaggtggaggcagcacagacgccacggtggcccaagagcccctttgcttcttgctgggggaccagggctgtggtgctggcccactttccctcggccaggaatccaggtccttggggcccaggggtcttgtcttgtttcatttttagcacttctcaccagagagatgacagcacaagagttgcttctgggatagaaatgtttaggagtaagaacaaagctgggatacggtgattgctagttgtgactgaagattcaacacagaaaagaaagtttatacggcttttttgctggtcagcagtttgtcccactgctttctctagtctctatcccatagcgtgttccctttaaaaaaaaaaaaaggtattatatgtaggagttttcttttaatttattttgtgataaattaccagtttcaatcactgtagaaaagccccattatgaatttaaatttcaaggaaagggtgtgtgtgtgtatgtgtggggtgtgtgtgtgtgagagtgatgggacagttcttgattttttgggttttttttcccccaaacatttatctacctcactcttattttttatatgtgtatatagacaaaagaatacatctcacctttytcagcacctgacaataggccgttgatactggtaacctcatccacgccacaggcgccacacccaggtgatgcagggggaagccaggctgtattccggggtcaaagcaacactaactcacctctctgctcatttcagacagcttgcctttttytgagatgtcctgttttgtgttgctttttttgttttgttttctatcttggtttccaccaaggtgttagatttctcctcctcctagccaggtggccctgtgaggccaacgagggcaccagagcacacctgggggagccaccaggctgtccctggctggttgtctttggaacaaactgcttctgtgcagatggaatgaccaacacatttcgtccttaagagagcagtggttcctcaggttctgaggagargaaggtgtccaggcagcaccatctctgtgcgaatccccagggtaaaggcgtgggkcattgggtttgctccccttgctgctgctccatcccygcaggaggctcgcgctgaggcaggacygtgcggccatggctgctgyattcattgagcacaaaggtgcagctgcagcagcagctggagagcaagagtcacccagcctgtgcgccagaatgcagaggctcctgacctcacagccagtccctgatagaacacacgcaggarcagagtcccctccccctccaggctgccctctcaacttctccctcacctccttccctaggggtagacagagatgtaccaaaccttccggctggaaagcccagtggccggcgccgaggctcgtggcrtcacgccccccccgccagggctgtacctccgtctccctggtcctgctgctcacaggacagacggctcgctcccctcttccagcagctgctcttacaggcactgatgatttcgctgggaagtgtggcgggcagctttgcctaagcgtggatggctcctcggcaattccagcctaagtgaaggcgctcaggagcctcctgctggaacgcgacccatctctcccaggaccccggggatcttaaggtcattgagaaatactgttggatcagggttttgttcttccacactgtaggtgaccccttggaataayggcctctcctctcgtgcacatacctaccggtttccacaactggatttctacagatcattcagctggttataagggttttgtttaaactgtccgagttactgatgtcattttgtttttgttttatgtaggtagcttttaagtagaaaacactaacagtgtagtgcccatcatagcaaatgcttcagaaacacctcaataaaagagaaaacttggcttgtgtgatggtgcagtcaytttactggaccaacccacccaccttgactataccaaggcatcatctatccacagttctagcctaacttcatgctgatttctctgcctcttgatttttctctgtgtgttccaaataatcttaagctgagttgtggcattttccatgcaacctccttctgccagcagctcacaytgcttgaagtcatatgaaccactgaggcacatcatggaattgatgtgagcattaagacgttctcccacacagcccttccctgaggcagcaggagctggtgtgtactggagacactgttgaacttgatcaagacccagaccaccccaggtctccttcgtgggatgtcatgacgtttgacatacctttggaacgagcctcctccttggaagatggaagacygtgttcgtggccgacctggcctctcctggcctgtttcttaagatgcggagtcacatttcaatggtasgaaaagtggcttcgtaaaatagaagagcagtcactgtggaactaccaaatggcgagatgctcggtgcacattggggtgctttgggataaaagatttatgagccaactattctctggcaccagattctaggccagtttgttccactgaagcttttcccacagcagtccacctctgcaggctggcagcygaatggcttgccagtggctctgtggcaagatcacactgagatcgatgggtgagaaggctaggatgcttgtctagtgttcttagctgtcacgttggctccttccaggktggccagacggtgttggccactcccttctaaaacacaggcgccctcctggtgacagtgaccygccgtggtatgccttggcccattccagcagtcccagttatgcatttcaagtttggggtttgttcttttcgttaatgttcctctgtgttgtcagctgtcttcatttcctgggctaagcagcattgggagatgtggaccagagatccactccttaagaaccagtggcgaaagacactttctttcttcactctgaagtagctggtggtacaaatgagaacttcaagagaggatgttatttagactgaacctctgttgccagagatgctgaagatacagaccttggacaggtcagagggtttcatttttggccttcatcttagatgactggttgcgtcatttggagaagtgagtgctccttgatggtggaatgaccgggtggtgggtacagaaccattgtcacagggatcctggcacagagaagagttacgagcagcagggtgcagggcttggaaggaatgtgggcaaggttttgaacttgattgttcttgaagctatyagaccacatcgaggctcagcagtcatccgtgggcatttggtttcaacaaagaaacctaacatcctactctggaaactgatctcggagttaaggcgaattgttcaagaacacaaactacatcgcactcgtcagttgtcagttctggggcatgactttagcgttttgtttctgcgagaacataacgatcactcatttttatgtcccacgtgtgtgtgtccgcatctttctggtcaacattgttttaactagtcactcattagcgttttcaatagggctcttaagtccagtagattacgggtagtcagttgacgaagatctggtttacaagaactaattaaatgtttcattgcatttttgtaagaacagaataattttataaaatgtttgtagtttataattgccgaaaataatttaaagacactttttttttctctgtgtgtgcaaatgtgtgtttgtgatccattttttttttttttttttaggacacctgtttactagctagctttacaatatgccaaaaaaggatttctccctgaccccatccgtggttcaccckcttttccccccatgctttttgccctagtttataacaaaggaatgatgatgatttaaaaagtagttctgtatcttcagtatcttggtcttccagaaccctctggttgggaaggggatcattttttactggtcatttccctttggagtgtagctactttaacagatggaaagaacctcattggccatggaaacagccgaggtgttggagcccagcagtgcatggcaccgttcggcatctggcttgattggtctggctgccgtcattgtcagcacagtgccatggacatgggaagacttgactgcacagccaatggttttcatgatgattacagcatacacagtgatcacataaacgatgacagctatggggcacacaggccatttgcttacatgcctcgtatcatgaytgattactgctttgttagaacacagaagagaccctattttatttaaggcagaaccccgaagatacgtatttccaatacagaaaagaatttttaataaaaactataacatacacaaaaattggttttaaagttgactccacttcctctaactccagtggattgttggccatgtctccccaactccacaatatctctatcatgggaaacacctggggtttttgcgctacataggagaaagatctggaaactatttgggttttgttttcaacttttcatttggatgtttggcgttgcacacacacatccaccggtggaagagacgcccggtgaaaacacctgtctgctttctaagccagtgaggttgaggtgagaggtttgccagagtttgtctacctctgggtatccctttgtctgggataaaaaaaatcaaaccagaaggcgggatggaatggatgcaccgcaaataatgcattttctgagttttcttgttaaaaaaaawtttttttaagtaagaaaaaaaaaggtaataacatggccaatttgttacataaaatgactttctgtgtataaattattcctaaaaaatcctgtttatataaaaaatcagtagatgaaaaaaatttcaaaatgtttttgtatattctgttgtaagaatttattcctgttattgcgatatactctggattctttacataatggaaaaaagaaactgtctattttgaatggctgaagctaaggcaacgttagtttctcttactctgcttttttctagtaaagtactacatggtttaagttaaataaaataattctgtatgcatttctgtctctggtttggttttgtccctcctggaagcatcactacactttggtggcagggaagctgagctatgtggggcacgtgtgttcacgcatgttgcctggaagcgttctccagaaaagcattgcctcttctctgacagctgagctttctcagcatgcarattgccagtaaagacgacagggaagctatctgtttctccctccattaaatcatctggaaagaaatttgaatacataaattacgaaactctgtactgcagttccgactgatttgtagacttttttcctataccttccactaacaacagtcaggcyaaggcaagtctgatctgcatgaccccaaggcagaggacttcagttcttcacatttcccatgtgctttttggtctttcacagctgacatgcccacctcggggggrtgctggtgagaacccagtgggcctcacgcagaatgtgggtcactggaggagctccaaagtcctagttactttctagctgctgctcagtgatctctgtctgcccctagggaccctacaatgtaaacattatttttgtcaggggaaatggcatgtatggcaaggtgtgttctagaatcagactaaggattcagacacatcaggcagagaagctggtcatttccttcaactttatcatgggaaattatgctccaatagcaaaatcgggccagtagaagaagagctgtccagcaatgtataggtagaagtaaaccgaagaccatggttacttcagacctgttgagcctcagaagtgtttgcacctaaaagcaaaggcctttctgaaaggggactctcagctggggtgcggtggctcacgcatgtaatcccagcactttgggaggctgaggtgggtggatcacatgaggtcaggagttcaagaccagcctggctaacatggtaaaaccccatctctactaaaaatacaaaaaattagtgggacatggtggcgggtgcctgtaatcccagctacttgggagggtgaggcaggagaatctcttgaactcaggaggcagaagctgcagtgagccaagattgtgccactgtactgcagcctgggtgacagagtaggactctgtctcaaaaagggtactcaagcttggcattgcttcagggttactgctcagtgttgtcaccgagtgcctggcactcaggggatcttcattaggtgactgatgatgaggaggtctcaattctgaggctggaaagcccaacagggcctcctccttccctggtcaggtagatgctgcccttccaggttgccacagtgcagtctgcacttggcctgcccagccagaaggagcagcaatatctaaggatgaaggtgctgggtcttcagaagcattagaacctttcccctccaggccatttcttaagactgcaagccctcaagagctatttctgcatttaccccccaagtccaggtatgagtccatactcactcagatgtgtgatttttgtagtgttctaatgttgctaaaaagaccttcacatccattctctcaccagatgttcacaatcaccctgcaaaggaaggattttaattactcttacagatgagcaaacatacaggcatgctcaagacccctcccccgcccccccacctccccaccagctaccaactcaggactcagcctctcagccttttctgctgtggttctcaatctggcttcagcactgccagaactaagcaggctctgtgcatactgacaagggatgctgggtgaagtacacagcccaggtgtgaatgagacttctggggttctccctggagaacttcaggggccacagcggggggaaatgatggggaagttcttgaagagggagctctgggcctcccaactggataatatctaaaaatttaaaaaatgttatggcatgctgccaggcagtctgaaatataacactggagcccagtcctgggggccccttgcttgccagtgtcctgggacagaattgcccatagcasagacagatctccacattagcaaccatgcagccagacctgtgcacaccgcccagcaccacctccccccatcccccaatatgtgggctttgatctgttttctagcaaatgatccaggtgtacttgcaaagggagtcccctaaaggctactccaaatgcaaaaagcgtgctggcggccttgactgcttcctttggttttyttgtgggtttttktttgtttttttttttktttttttttgagacacagttttgttcttattgaccaggctggagtgcaatagtgcaatctcggctcactgcaacctccgcctcctgggttcaagcgattcccctgcctcggcctcccaagtagctgggattataggcacccaccaccacacccggctaatgtttttgtaattgtagtagagactgggtttcacatgttggtcaggctggtcttgaactcctggcctcaagtgatccgcccacctcagcctcccaaagtgctgggattataggtgtgagccactgcgcctggcctggttcctttgttaggaagctgcaaatgcttttcttaatagtgaatgaatccaaacactaactgatgaattttttaaatgtagtcaagtgaaaaatggtagttgtaagcacaccaacgtaacaagaaatttcccagagctcacctaccttcactcacttcctccaaaaaaaaaaaaaaaagcgatgttaccaatgggactcccaaaggaaatctgcccctagaaaacactgaacaggtagaatcttgctgggagaagcttggcacaagacccggtgctgtgtcataaaagcaaaacaaaacatgaaacagaaaggagattctgcttttaaaaagggaagacaccatggagagaagctaagcccggctattaacctgcgccttcaaaccaaacactaccagtgtgactgtaaaatggtgcagcccctgtgcaaaacaaaatggcagttccttaaaaaattaaacacagaattagcattgaatccaggaattcacctctggakattgacctgaaagcaaggactcggatacatatttgcacgccagtgtttgtagcagcatgatttgcaagaaccaaaaggagcaagtaacgtaagtgttcatctacagctgaatggatgaaatgtggtccatacatacactggaatattattcagccttcaacagaatgaaatcctgtcccatgctacaacatggatgaacctggaggacatgaggctgaaataatacgccagatgtagaaggaccagcgccgcatgactccctcatatgagctacctacagtcagattcatagggatggaggstggagtggtgrgcaccaagtgctgggaggaagaaggaatagggagttaataggtacagagtttcagtttgggatgaggagaaagttctggagatggatggtggtgatggttgtacaacaaggaaatgtactgtatactactgaactgtatgcttgaaattattaaaatgagtagtaaaaggggcaaacacagagacagagaaatcatacagtagagcctcggtggcttcgaggctacccaggacctggacacacaagctcaaaggccaggaatggggtccctggagcagcggctgtctctgtgcttctgtaagcatctccaaaacaggtctgtggtccccacagtctgcgcaggatcacacagacccactgtgtagatttttggaagaaaacagatgactcggatttcattttattgtcatgaaaaccataactgaagctagttcatcccctgtgaaatgtccacctttcagagtgttctttctcctgacaataaaataaccctttgtgattttgttgggctaattcagagttttccaccctctttgtcttacaagcaatttttgaaaaagtttctcaatgcacagttgagtgctacatacaggattgaaacattcaattttctctagaggagcaatcccccggtcagttccctttggctggaaggaccrtggttgagttttcttcgaactgggctctgtgcttgggctttcccacctcttccagcatttsctggatgatgactctcaaggctcttcccagcaggctggccgggagcccgcgcgatagtggagggacatggatgagtgccrcgcagccctttccatgatgcagagacaggtaataggtataatcacagacgtatctgcaaccacaggaaatgccacattaattctcggaccagcctctaacctcagtgaaacatacgcagaagtggcaatgcaacacccacaaagcctgaggagggagcactgccacccaagggagacttgtgttgtttcacctcagaaagaacatggtgccaggatgagctggggagagctggctcttggcctcatggcctcatgaccggcaagtggccaaggcagaaaggggtcagatattccacagcaccngcatcccagtgaatccctctcattcatgtcttcgttgagtcacttactcattcattcactggggaaaggggaaaaaccacctactggggatcggagtttggagaaacaaaggtaaatcaatctttatctggggctacatcaacacagttaactcacaacttcggtcaccccaaaaatcaaaatcagaaaacattcacgaaatgttagtggctcttgaagtctgccttcccatctcttctcctagatcaacacaccaaagaccgtgtttccacaggcaggtctcacaaacgagacctcaggcaaggtgtgagcaactgtgctggcctgcacacagcaaagaggggcaatctgggggcggcaccgcatggccaagtggccagctggacgatacaggatggcttcttggaggtcggggggacgctgacggccattgcttctctcctacctgctcagagtcctgacacccacagagcatacctgcctgcatctcgggaaaagatcacgtcgacaccctccacagctacgcgcttgcagactgccttcatgcagacccctgactccagcacgtctgggctgccaggtaggcacacgccgccctcgggccagaagctgcggatgtcggcgtcccggtagccttggttcttsccagactgttccagaatgatcgccttggcggcggtgtccatgcccacatgcacgaygagctgtgtgaacgggtaacagcagagagaacccaggaaaaygaggccyaccctgctcaccaratgtgcagaaggggccactccttttgagagcccggstctgtgcaaaacatctcaaaccccaaatccactgggaaaccccaggatcccccaccagtgtctcctaattaatatggctggaaagaaaaacagctggattcttttagctgaataaaaactcatgctgcatttacatttaaatgctttttacttcaaattattcttacagggtaatgtattctctttttgtggggggagggttggagggaggagaggcaagctagtaagtggtgaggctaccacagcagagtcttygtgttttggtggaatcctgaatctttttattttatattttatttatgtatttatttatttttatgagacagagtctggctgtatcacccaggctggagtgcaatggcaccatctcagctccctgcaacctctgcctcccgggttcaagtgattatcctgcctcagcctcccgagtagcggggactacaggtgcaccacgcccagctaatttttgtatttgtagtagagatgggatttcaccatgttggccaggctggtctcaaactcctgacctcaagtgatccgcctgcctcggcctcccaaagtgctgggattataggtgggagccaccgtgcccgcctcctgcatctttttttaaatgaaactttaataaaggaagttagtggccatccagtgaaatcttcttagaatttattcaagctgattatttttcctttttgaaaaatagctgcccaagtatgttatcaaaacatctggggcattgtctgaatggcttgatagtgtatgttttattaacctcatc

SEQ ID NO: 9902 - DNA, 20082 bp, Homo sapiens
taaaagtttactggaaaccacatacctttcttcctttacgacaacctgtcattcatcacagctaaaacatccacccattaaatgatatttttacaagattaaagaatggttttaaaaagaaagaaatctccttagttaaaaatgaaccaaacaaaggtacctaatcactgatcagcatcaaagttttgttccacacatgaaaataattcatcaggccaggtgtggcggctcacacctagaatcccagcactttgggaggccaaggtgggtggatcacctgaggtcaggagttcgagacctgcctggccaacatggtgaaaccccatctctactaaaaatacaaaaaattagccgggcatggtgacagatgcctgtaatcccagctactcaggaggctgaggcaggagaattgcctgaacccgggaggcggaagttgcagtgagccaagatcacaccattgcactccagccggggtgacaagagcaagactctatctcaaaaaaaaaaaaaaaaaaaaaaaatcatcaatgtaaaaatgaattctgcctaaggaggggaatttaaaaagtcagagaaaagcaaggaattaaaattcagaaacaagctgttttataattaagcatctgcaatttaactatactatgtcactctgattttcatctttcctttctcataagagtcatagatgttctccgctcatataaaggtggtaggaagggagggagggcgccatgctaatagaacccacatcatgtttactaagaactaggcagatgtggacaaaaactccaaagatttaaaagtttcttgactagagcaagacatcttcaagaactcatccaacatggtgcctagccttcttcagagcaagacaagccactaagtcatccctgggtgtgtgttcagcagcagcccactaggaagtattaggtgagctacgatgggagagtaatgggcaggaaaatcataggaaagcaggtctggatttgggctggctgcttagctgcatggcaccttgcacaagttataatcaggtctcttgcctccatttcctcttccacaaaaaatggaacagtaatatccatatccaccctacagactgtgcaaagattaaagaatactggcgaggtgcctggcacctagtcattgttcagtgaatgccagtcatgatcacgaacacagtccttgctaagagggtgatatgatttggctgtgtccccgcccaaatctcaacttgaattgtgtctcccagaattttcatgtgttatgggaargacccaggtgaggtaattgaatcatgagggctggtctttccygtgctattctcatgatagtgaataagtctgacgagatctgatgggtttatcagggtttccacttttgcttcttccacattttctcttgctgccaccatgtaagmagtaccttttgcctcctgccatgattctgaggcctccccagccatgtggaattgtaagtccaattaaaacctctttttcttcacagtcttgggtacgtctttatcagcagcatgaaaacagactaatacagagggtaatcaccacaggaatccagacggggagtggggtcagttcactggtacaaggatcttsatcaaaggaactcatttcccacctgatccctattcactccagggtccacatctaggagtcccaaagaccggcatgcatgggttgggtcaacaggctgcctggaggtttacctcattccaggagttggagaagcactgtgggaggaactggggttcaaatctgcaaacctccaaaacataggagggatcttctaaaagtttctgagagttctaaccacagattaggggaaaaaaaagatgccctttcatcaacatgggatgaaatgctaggatttagacatggtttttttgtgtgtttttgtttttgtttttttccaattcagaaaacactaaatcatgtaaaaatcttggaagaggagatacagattctgacctaataagatgctactgctctgattccaccatcagaatacctttaggttggcaccacttgcaatgtattagtgcagcaaactgcacgaatcccctcattagatccagggcccctgagagtagaaaggggagtggggcagtaaatggccagggaacaggagacagtgggctggagggtgtcccaggttctaaccccagctgggccttcagagccctggtrtggtctgggctaacctctcaatccttttccaagtcttaagtttccttccaactcactgtgattcttccagagaattacacagggcaggtgaaattatttcctagaaaatgcccatggagtacagaggttctcactgaacttctctattccagggccgatgcctttgttttaatggcagcgcatcatcgactaaccaaatccacaggtactgcacaggtctgaaggatcyggctctgagggataccgaggcatccggggctccctctgtcttctttctgtgtacacaaggtaccttcagtgactgcaaggaaaatcctcttgctttctacatcagagcacgttccataagggcaaagtgctccagtcatcacctcctgttttctctagccagacctgctctgagctggagacccactgcagtcaagcaaacttttagacacaagaaaaaatgacaacgtgtctattacagaggtctcagcttaatcagaaaatggcactgtgggccagagaaaagctgacggtgatggctcctaccccagtgcaataggcagatccatgagagctctcactggggctgctggagaactggctgctctctcccactttagtmacccctgcttcataamtgtctgtgccagaaagccacagtgagcccccagtggcccctgtattacccacccagagagacaasctctcccctccatgaaactcatttctgggacccacacctaaactttaacacaaatcagaaaagttgagactccttaaaaatgcgttttgcaagctcacaggttcttggttcataagtgatactatggaacaatctggttgggaagggtggcacacaatagaaaaagttaatgattatctggtgtagtttgctttagtctgtgagttcaaaagtctcctcatttacaataaccttaaaggataacaaaataaagtcctagaagaaatgtaaatttaattatttccattttctcaaaatattaattgctgatacaattaaatggattggcctaaactgctccaaagcttttcctatctgctaattaaatttgccctcgctgccataatacaaattctgggaaaccttctggcttctgggcacactatgtaggatgagagaatcaaatccattcagtcctaatctactgccccacttaataaacaaaaaatgttaagaacatgcatttwaaaaaaaatctaaatgccttcataatatagatacagcaagtcttcccataatgctaatgaaggcttctcacaagagtttaatgagctagtatccagtatcttccaggcccggggatgttagcttctcctcccttagtacagaggttgctcagacagcaatcagcatcatgatccatactaaatgcaacggccctactctttatctttatagtctgtaatccaagtcactctattaacaggcagaaaaatcccagctagcttcaaaactccctcatctttccattatttcaaatgacaaccttttcccactactttatctttgcattaagtaccaggagctgaaagatgcaatcaatttaatattkccctctgcccatttacatgacttatttgtttcggcrgatcttctttgccacaaatccttcatytgcccattcrtgtctgcatacttaacatagatttaatatttctccaggccaaagatcatatgcagagtttttctttgactggaggacagaagagacaaggagagaagragaacgtctggaattcctttgttcttggagacaactccagagaacaattctcaataagaaaagttataaaaagcttcaatcagcaccctcacgtttctgatttaaagttggggtgggggrgcgtggaataaaragagagggaactaaacatgtacgaaactcattctagcgtgagacgttgtcagrtactttgctgacattttatcataaaactctctctcggtggccacgggttacagcagggaacctaaaacctagacttgggaccccaagtcctcgcttcacaaaaatcatgacatgggtgttgaaccagtttctgttcagccacacagaaactcattcaagtccttcaagaggaagaatcccaccttcaactccacacctcctccagcaccaggcggagatgctcctgattccactgagaatcctcctgcccacacaggcaggaaactcggggcactcagtgcctgctctctcacccactgcatgcccacagacctctgcaaaggcagctcctttattcccccaatcctgaacatctgttaagtgctaaggcctcagagggggctttttaaacaggcacaaagtagaaactaccagctttccaccactcctacctcatccatcagaaaacagagccaccagccttccagggtagggttcatcaagccttttcctccccatggaactaagctgtacacagtagtcagagataaataatgtctaagccaaaccggcttgagggcacatatggaggtggggggcagagggacactggcctgggacctaaaccaccattcagacctcatctttacaaaatagtatactccacattccaaatgcctggcaaagttttgcattacaactcattcacgagtcgagggccttgtatacagtgttcggcaaacagtactgagcaagtgtggacatttctcatgaaaggcctcgatttcaaccagacccaaatattcttttaatccaaagttccaaatgtggaacttaccctcctctgagctcctagcacttgttgcctctatttctcttctggcaaaagtcgtagagtgtctcgtcacaccgcataagttgtctctctcttttaaatgtcaagtgtttttatcttatctcacaacagaatcctagtttgtgtcatctcatastgcctagcatgagacttgcacaaaacgggggcaccttaattgtgcagctgagggacacgatggaaactctggccaaggaactagcaaggaaacctgcaaagacacatccagacctaacctaggtgcgacttataactcaaacctcttccccagtctccctctctatgggagtgatatgtacacaatgtgttcgcttccacttccttaatgatggtggactgacatgaataagaatgatggggaggaccataggaccccaaataattcacaagtcagcaaagtgaagaactcacctaggccatacatgtgcacacattctctagcacacacacttactctcacactctactgttatttagtttgtttattcattccagctagaaccagggaccaatttggtcatccaaaaatgttttgtaaatctctttataaaattcctgcacctctcagggccagcaccagagcaaggcaagattggtgtccaggatacaaaatgtaaacaggtgctccctctcatggtgcactaccctgagagaagacctcttttgtctctggtccaagatttctcactctggtccaagatgccaccactgctgccactgccatcgccacctcctcctccttcccttcctcctcccccaagagaactatgaggaccaaaccactcagacactaagtggggtcaagcccacatgggagatggatttttacagagtatctcctccacgggcttcccattagctgtgaggttggagaatcaaacattataaacaaagcatgagtcctaacccacaagtggtttctcaactgtttggggagagagatgaatgaggagtaaacaaggtcctctgaacctactgataaaaagtacagagaaaccatcatcactgaccaaataacccagcaatggatgagcacaaaagcaacctggaagcaagagtcctcagtaaggaagatttggggggcttcatggaagatcaagtgggtgatggttaaggagaaaccacgaagagcgtagcctcagtaggtaacgtctgctccagctagagctcaccatgcatgcacaccaaacccagatgccgaaaaccaaaaaatacagcagaacgcacccaactcccaaaccactgagaaagtattttaattttgctttgatcactccagctgcgcttcagagtccccagcatttcagcagcatcatagaagaagacatcaatcactggccatggcacaaggaaactcctgcttggctatcgggctgctcagattctggatgagggaaagcttactttagtggaaaagaatgacttaaatgaatttaaattcattccacataatcgagttacatcagcatttctcatatgcacttatgaataattcactttggtaacagcaaaagccagaccagagaaagtcacttcaaagatctaagacttaacatcaatcctacctgaatttcctgctctcaactccttccctaaccactttatttccttctgccctatcactgaggtgctttgccagcctcctgtcctacatccgttatccctcagtaagctctctggaacttyccaattgcagccacctcctaatgtccacagcctcctcttctagatctagtttcgtaggcagtccctaagggtagggcccatcctaaaaagttcgactgcttcataccattccaagtctagaacatgtcctcagtctctagtagtgtttactgaaagccacggccaacagatctatccgaggtccccaacaaccttgtcttcaaaactgaatctcagagctggaaggaaagtcagtagaagaggccagatcgtgctttctgcaatagacaatggtgcttaagtgtacacaattttcatgcaaattcccccgatcatgaagctgggctgctccctatacttcttgtcatttgattctccaggccacctgcctctccagcccagctttataatggtaaggcactgatgagtttgcatttatttagatacactggagggattttgcgactggagttacaggaggctgaggagctggcatctgaaagtccatgcttcacgcttttcaaatgcactatgtataaccaagctcrtttccaaaaacagaatctgaactagctcataataaaccattcaccttttattttttgctgaaggggtcagagcatcatcccaattaccatttctctctaatgaccacttactcccttcttacacattttcatcagctctttattctacactgagtatttccaagaattaggataacactacygcccaataagatagagttggggttacccaaataagcaacagaagctttccagtgggaccgagtcaagtcaagggtctcaagtccccccaccctaaagcactgaacacgaagttcagggagcctgtgtctgaggcctaagcacttgccctgcatcacaatgagcagaagacacaggaggcacgacagccgtcatcactgcacagccaccagtacacctcgaagccaattaatcctgcaaaacaaattcctctcaaaatggcagtctgttaggtcaagtttggctgttttrttaatygcctatcaacagaaacagctttgctaggcacacccagaagttcatctctcctmatcacccacctttggcacccagtgacttttccaaggaggatctttttcccccctcagcaaacaagaaatatttggtgagctaaagaagcattcttctgagaaaattatacattctcagaattccattcataaasgactactggtcacaaaagaatggccagggrtaaggcaggggtgggargaggaagggcaggagayccaacggatggtgctgcctggacagtccctgaagtgataaagagttagaaccagayacacacttctgcattcagctgctgtctttccttgtgagtggaaaaacacactcagtacattctctgcaaycctgcttaaaacctcttctaaagcttctttgacacagttattcaaaagcttctaaaagtagtatcgacgtattacaaaataatccaatcatttcaagttcactgaggaagagaacaaaaatatatccttacatcctatctgaagaatagtctaagcacctaataatatcatctacttagcaaagcagaaggggccattcagaggtcaagaaataggaacggaaacgttgtactaggttaccaccccaggaacaaagctggtcttttctaggacccaaggatctgactagtttccatttgtctctgcattacaactaatacctctgggaggtgggggtgggggtgatcctaattcaaacagtaaggctgcccaggaagtayttctaataatatcaaccttcgtctttccttttttgtactgtaggctctttgtctcctgatcttcttttattttgttccccctttttactactaagcccaactcctggtctcagcagctgctaaaacacgtccaagcactttgcatctatccggaaatccagaatggcagcctgggttcacagatctgctgccaagggcagatgtatscgcactgcagctgggccctcctccccaggggccccatgggcacaagcagctcagggtgggccagcgagcctcagtcacactggctgccctcagccccaccttctgcatgaagggtggctaagctccatgggccactctgcattaaccccaggaacggcaacctcactaacttcatccaggtcccttcattaggacttgcaaaaacaaatcagatgcagctacacgttggggcagtgggtgcagcttctctaaacaaggccatgggtatcaagcaaccgacagtccctaaatacgctgcctctgttcccatcccacatggattctgggaaaaatggcaggaagaaagaagagaggactgggcgcttgtttgtgaccaaggcaaagaaacaaaaagcgacttctgttcaataatgagatgaaacagaagcccggcttcgggcagaggcctggcattcctgcacaacattttcccacccacctgatccccttgaacggaaggaagacctaagggaggacagagagccagtgtttgtttcctgcaatgggggtgagaggaggaaaatgaaactaaacaaaacaggagaagaggctgggtgggagaataaagtggtacgcacatacacaaacacacacgcacacgtgcacgtgtgcacacatatacctagcgttaccaaagaagaggataaacaggcacatgcttcatcctggagcagatggttggctacctatgtgagacctaaagttgtcataaaaatgcacatctttgtaatctttaccaataactgtgcccactctaaccactttaatgttatccatgcaaacagacagaggcatttaaaaaatatggtatttaatgatttaatgtcagtatcatacaagaatctatggatatttcttaaatgctcccaaayaccaaacttgcaaacaaaataaattcagtttcggaaccaaataaatagagtttacatatgactagggtgactccactggcaccccgatatagacatatgtacctcgctgaatgttctgtaaagatacagtttatctggacagacacaagaatttgaacagtacgaatcaaattagcaagaaccacacctacagtatggcccgctatttacaataattgaaattctacaatttagaaaagcaatacagaaggaccatttagttatggtagtgaacatatatagtcaacacagcttaagactcagaattttagatggtctyagaatgcaactcttagatagtttaatttaaaaaaaaaatagcagcagctgccaccatttaccaaaaacctatgtgcttggaaacatgttagatgcttttcaaatactgtcctattcctgtctcactgaaggaaggtgaggtctggcagctttgtcctagcaccacatacctgaggcaaacagatggcactatctcaaggcatcaacggtccttaaacctttgcatatgataccacttgtccacacaggaacgtagtttaaaagaaatacatcctgttctgtacaaaatgatgtattcttgcagatctcgctgttaatatgccatggggaaaacaagcaggggaaagctgtacatccgcatgtggagccacctaaacatcctgaagaccagtcacactgagagtgagggcaggcacaggatggtagcttctgcccccacggactccacaatattgtaaggaacagatgctcagggatatcaggggtgaggcctggccagccccatgacatcctgaaaacctaacagcggccaagctgaccccgcagaagaagtgatctaacctggatggtcacccttccctgcctaagactcaccctttccaccsgccccagaagcccttattcctccttgacttgaaaagacaactgtcccccataagccctcacacctcctaccaagctccaaggactgttctgttcttctgcctactcccgcaatgcagttcaaacgtttaccagggctctrcagtgagctacttttccaaagacagaaaagcaaggctatgtgcaatcagacgaaactccagctctcattgtaacatccagcttaaagccatatgttagccagtggcaggtacagattagaacccagaatggtctagattttgggtttctacttggggttccttcttccatataaatgatctctaaatttcttaaaccctgattcccaaattatacatgatgatcagtgtgccatttgatgagttatgaacattttaaatgctgcataccttgcctgtatgtactaggatcaaagaggagagagagagagacagagagagagaccaagcaacacgaacacacaggcagatcaggaagcaagaaatcttctcagagcagaccacggaaaccctcartaacttactcaattttagagtttgaggaaacggcacaggtagtccgatgcaagccccccgagttcaaagaaaggaaatggaagtacagggcagacaggtgacgtggcaaccgtccctaggaaaggcactgctggacccagctgtccctgtccctcaccagcctcacatgccsaagtcccatgtacccctggggctgccatgctggctgctgagccatgggcgctggtttggagrtgaacttcttcgaggaaagcagcttcttatcccccagaagttctgcagatcatctgtgcactttggtttttacttaaaatgtgatttaaacagcctgctctacttaatactgcctgtgccacagacagaaaaatcccatctcccacccaccagcctccctggaacaaacaccttggctgtctctcgctacctccragtcaggggaacattccaacyaggatggtgctcagagaccccaccttttatagccagagtccctgattcacaccatatgcccaaaggaggcgtgtttctaagtgatgcttccaacttcaccaccagccaaacttaacttttgaaccaccctatacacgcaagttgagcaaggcaattcaggacaagattaaccacgggcccacacgctccacgtcatccccactctgccgagaatgtcacactggcatacacatgaggaaagcaagacagaggtattaacgcaacaaagaaagaggcttttcaagcacaggaagaaaccagaacaawtgtacaaataggtttaactggtgagagctgaaggggctccagatattttccaaatacttggcatgcaaaaatcaccacaagtcagtggttctgaaagctttttggtctcttagacgagatccctattaaaaacttctgaaggaggcccaggatggtgacaccatcactaatgacaattagccaaaagcaaagtctttgaggcacaaggcacacgccccaagaaatgaggtgggctaagccaggtcccagggaacctgcacacaaactgcttcaccatctcggcaacaagcgtcggcaatcaggcagaagagaatgtgagctccacgcctgactataaaaggcatagcaatgaggcctgggggcatgtgacccccttctaaataaagatcacccccacactgggagcagctgaccagagcagaggccttccagggcaaccgagacaagttcctaccaacaacacaaagccagatgcccctctcctggctgccttctcctccagggtccacaagcccctcccaagagtccacctgaaaatgcaagcctgtgtcatgatcgtcttagcagtctggggaacagtggcctgcagaagaccagcagcagaccacacagtgcttaacagaaacatctcagctcttcacaagtagcttaagtttaaaaaaaaaatgttaagatgaaatactgcacatcacatgagtgaagtctcactacaaagacaatgtgcccctcttccccccatccagcaggtgatttacacattctttttttattattattttcctttctcaaagctagccataaaacttagttacaaaatctttttttttttttctcagacaggatttcattatgtcgcccaggctgaagtgcagtggcacaaccacggctcactgtaacctccatctccccaggctcaggcggatcctcccatctcagcctcccaaagtgctgggactataggcacgtgcctccacaaccagctaattatttaaatttttttatatgaacaaggtctcaccatgttgcccaggccagtcttgagctcctggactcaagcgatcctcctgcctcagcctccccaaatgctaggattacaggtgttagccactgcgcccagccttcaatttacacattcttaaacaggtcctccactttgatctagcaggtcagccacaccaacctatagaggaaaacgagggaaggagagcgcctctactccgcaagacaacactgcccttgtgagcagtggctgacaaacaaggatataagaacgtggcggtggaaaaatgtagacttttttttttttactacaacctgccttcattttaagtcagtgagatgccatcagtgagatggcagtaaaatgttttccttttgtcaataaaaacagccatttactgccttctcgaaggctccaatctgctattttcctggtttctcattttgagggcaataggaaatgcaacaaactccaggactgctgctcccagtcaatgcccttttaattgaaataaggctgccccaccagctaagccagcttccaacacagcccggccctgccttcctggatttcctggcaaagcccaggccttctcacacgcactcagggtgatctgagcagaccacaggctgttcatcccawtrggttaaaaagtacttggaracttagttgcagtaaggtcttaggttttgttggggttttttttgtgggaaagtgaaggcatctgcacctgaaatgaaataccagaaagcctccacagcaagcaaacaacaggcacttaggtaaattcagcaggaagtaagaaaaccacaggtactcaggaggattcacctccgtccctcccagggcagaactggccttcagcaaaactgccttacaaagtcatgaatggcttcacgtgccaagcttcaacctttcagatgatttccatacttctccatcatctttggcctggaatcatccccacaatggcaggaaagaaaagagctacccgccatagtggtcctctctgccaactaagagttgcagatgattctggtcagtactcctcagtagcaatgacagcaacaatgacacagtaaacatctgcatttcataatcctggtacaactggctcaccgaagactgccaggatacgcyactctctgctcaaggggaaaatgtatcttccgaacaataaatccttcactaagcagatgcagtgcttgcccttggggtgacagcatacagtggaggatacacccagaatttacagtggggcaaaaagtgtcccatcaggtgctgggagacaggcctcccgaaatctgcagagcctttacatccttgagaggaaaaggcaaggctagagttcggccaggtgagccgtgccggctggtcagcacgggagagcaccactggggccaaggacacagcaggcaggcrggagggagtggcacatggagtgtggcatgttgtcacggggtagctgttgaccactcaggagcttcacactgtaccacatgcctatcctatagggacttgctacaggatttcaggtaggggagctcatcagtccaaagtgcacactagatggccgggcgcagtggctcatgcctgtaatcccagcacattgggaggccaagaccggtggatcgcctgaggtcgggagttcgagaccagcctggttaacatggtgaaaccccgtctctactaaaaatacaaaaattagctgggtgtggtggtgcgggcctgtaatcccagctactcaggmggctgaggcagtagaatcacttgaacctgggagcccggaggttgcaatgagccaagatcgcaccactgcactccagcctgggtgacagagtaagactctttctccaaaaaaaaaaaagtgcatactgaaaagctccccagtgctcggtggagccacaggacacaatagcaggagagaggctatgtcactgctgtaagggggaggagcagaggaacacagctgaagcagcatttccattccattcgggagggaaagggcctggtatccaactggagaaggaagtgtccaaaggacacccacattcctgacataagaaccaggggaacaaaagtgtggcccacttaagagggaatagaaaagaaaaaaaataggcaaaagtgaggaaacagggaagaccatcagaggctgtagtgaaatgctcgtggtggtctgatatgaatgacaagtcctgggttcaaaagggttctgggatggatatgaatgacaggtcctggactcaaaagggttctgggctggagatacttggaagtttaggtggagacaggaggcaatgcagttaccagtggatgagatgagaacaaggaaagtgaaaagagagcccaggacagaactccagccatgctatgatctgaatgtttatgtcccctcaaaattcttatgttgaaacctaatccccagtatgatggctctgggaggtgattaggccatgagggtggagccctcacaaatgggattagtgcccttataaaaaagacgccagaaaaaaaatccctcgccccttccaacatgtgaagacagtgaaaaggtgcttctgtgaaccagagtgtgggccctccccagacagttaatctggtaagcaccttgaacttggacttccagcctccagaactgtgagcagtatttctgttgtgtgtaagccactcagggtatgggattttgttacagcagcctgaatggactatgtcaggagaccaccgttaaaagccagactgagggaagggagacagagaagcggcacctgtgggggtaggaagagactcataagagggtggcgttggaagacaaggaagaagaatcaaccacaccacatgtcagggggtgccacacaactatgttcttactgaaaggaaaccactgtacacagttctttaagggtcaatcgctctttaggaatgactcaaaaatgtataaaatccactcctaaatccaaaaagaaccgagaaatacagaagtgtgcagagaacccacagagggatcacgtccatagagggagtagagtctactacgctgccagacactgcagagtcacggcacagaaggagtttaaaggacagtgccaagtgaaaaccrcgcaacagcacgacaaaatcgagtaggctcaacgatttcacacacacccttgacrtgtttctccagatgttctccgtagttctacagccagccaacagaagattacctgaatgggattcttctgtgcttaatgttttcgaatggccatcttaatgcttatgttgaactcaaggtagccattctgcctggactcaatgcccttcatggagctccccaaatgattcctaagggttctggctggagaggtacatgcggggctatgagcgctgcagtgacgactcagccaaaaagatgatgaggggaagaactcctggtgttaaaagaaatgctctaaagcagcttaccaacacagaatgcaagccacatctgtaattttaaattttcaagtagccacattaagaattaaaaagagtcrrgcatggtggctcacacctgtaatcctaacactttgggaggctgaggcgggcggatcatctgaggtcaggagtttgagaccagcctggccaacatggtggtgaaaccccgtctccagttaaaatacaaaaattagacgggcatggtggcacatgcttgtaattccagctacttgggaggctgaggcaagagaatcgcttgaacccaggagacggaggttgcagtgagcygagatcgcgccgctgcactccagcctgggtgatgagagmgaaactccgcctcaaaaaaaaaaaaaaaagaataaaaaggaaacaggcaggtgaaatttaagaacacattttacttaatctaatatatccaaaatgttatatttcaacatgttatcaacatagtaattattaatgaaatggtgtacagagtttttgctatactatgtcttggaaatctagtgtatattttacacctaaagcagtcccaattcggacaagccacagttcaagtactcaataagccacgtggcttactcaataagcggctaccacactggacaatgcaggtctaaatggaatctacrcaaaccaagaggaagttctgattcaactagaaaatctccaagaaatatgcccatgcctgagttttcaggacaaggggaagggaagtcaatttcccggaaagcagttaccaattttatataagtactccattgtgaaatcacaaggaacatcagcagggctgggatggtcaaggagaaggctgcagggcgtggccttggggaagcaggtgaccaaccaacaggtgatatcaaggctctgtctgtcaccagcagagcccaccttctaaccatcgttaacattttcacggtgcttttccttcctccttttcatcttccaacagccctatgaggaaggcaggctttaccccattccacatatgaagaaaccaaggcccaggcaatttaaataacttgctcatttctagtcgccactcttagacttggacccagaatgcaggcctcacccctaccccaggggtcttcaawcagtagctcatcagaaacagccaaaaacctatggcaagaccaaagtaactacctacctagttcgtgaacaactctccacttaatgacgtttcatatggcacctcccttctctaaagagcttatgagttttcaaaacatcctcatgcccatatatgatcaccactaagggatgtactggactgccctagaaatatcctaaaaaagcccaactacagcccagaagggctggcccatccaaggtcattcctggccctcatcaccacattcaacatctcttttctactccatgctgcctcccttgataacaccttttacttttcagataaaatttttaaatgtcaaggttatttaaaaaatatattttgttgttttctcaaaccagtgggtaacttaatgatagggcagttttaatcaaccacacaagtgactttagcataagatctccctccaactccagccaaccttaaagtggcctgactgcattctcagagctctacaaggtactggctgcagccagtgggacccctgccctcactaatcaatgttcacatacgcactgatccaattctgcagaatagaaaagtgcgtggcagatcagggtacacagatccttttcctgcctcaggactggttgaacgggaactgaagggctacctgggaggtctgtcctttatttactttacacacttcacccctgtggggtctcgccttttatttattttaggcaagtctaacaatttggggtttcttggttcttcataactagagaacatgggttccttacatctttaactgggccaacacttaaataatagctatttatagctaacacactgacttcaaaccagtgaggaaaagcttcctagccaatatacataactattgctgaatgcaataaggtgaaggctcagagtcacattttaataccaaacagcctggttcttaaggaactgatcacatgaaggcaagagctcagttattctcaagggaaaataagcatattgcagataaatatacaagaagcttcaaaataccaccatctgacccccagaacagtaaatactttccaaagttccttcactcgtgaaatcttaagattttcacaactgttcagtaaacaggtataaaagaacgaaaacagaatcccagaggtttaaaaatgcaccctgctacacagctacctgcaagtacagcctgaacctgggacttgcagaaatgggtccagaggtctcccacctgggccaggtgctctgtcataaccaggacacctgagtatcataacatcatcactaggacctaaggaccactttcacaggatatgagttagtgctttaccttccctttatttaaccatattccaagtccattcaaactaaggaagtcctgcagaacaaaaaatatcacttcgcacaaaggatgaaagagctgacacataagcagcccccagctgccaaggctcagggacttccaagcacaccaggtcacctttctcatcaggaattcaaagctgaaggtcagcaagtgtctagcccaggagtgtgctggattatttctaacatgtgatttgaacagtcttgacagcagccatgatggcctccagccacgccacagtcccgcaatccaagagtcccagatgcaaaggaaagccaaccaagacccccactgggaaccacttccgcacagcaggcatgccacgtcctaaatgcaacacgactgcaccctgcccagcggaactcgtgcactcagaagagaagggaggtcaaggaggaggagaggagagagagaggcagagagaaagcarcagtcagcatcattcttacttttctggcagcggtttgtggtccagcagcggtagttgtactcattgttgatggtggtcttctcacacatcggcttctcctccatggtccctggacacaggtccccacattcctttgggggcttattccccacaatgtagttattggacaccgcatccaggatcagggaccagtccacagtggagaggtaacagaggtcagcatttttctcaatcctgatggccccccgagtaatgttyctcaggttgtaaagcccaatatccttgagattggtcatctcgaagatgaccagggcgtagttgtagaagagtttccagccgcggatgaccgtgaggttggggaagaggtctccgaggctctcgaggccagccactcggaacagcagcaagtactcggtaatgacmgtgagcttggggaagcggtagctgcggtagtcctcggccttggagatgagcaggatgtggaggtagccctcgatcaccgtgcagttctccaggcgcttcagctgctgatagtcgttgcggatgtcgatgcctggcccgcagactgaagggagacaagagggtaaacgtctcagttagaargaaataatttttaaactattttccaaacaataatacagttggttttcaggaatcctgtattattattaaagaaatgaggttcaattgttcactgcagagctgtgggttgcagactgacagtttaggtggctaaccagttagctggcatttatacagtgccaacactggaccagacgctgtgcaacacactccaaccgaccatgggagaggccatccccgttaaccgtgcaaactaaagcttacagcccagaggcacacagaggcagaggcgaaagttaaatctgcaacccaggccagccggactccaccaccgcacactcctggtccgttctgcagagcgtcagttgccaaggcctgaacgacagctcagc

SEQ ID NO: 9903 - DNA, 13183 bp, Homo sapiens
gtgttcaccaactcaaaacctctcagaaccccatcctttaaagcaggtgtccccaatccctgggctacagactggtagtagtccgaggcctgttaggaactgggctatacagcaggaggtgagcagcaggcgagcaatcaaagcttcctctgtattaacagccattccccatcactcacattactgtctgagttccgcctcctgtcagatcaacagaggcattagattctcaaaagagcacgaaccctrttgtgaactctgcatccgatgaacctaggttgcgcattccttatgagaatctaatgcctgctgatctgccactgtctcccatcacccccagatgggaccgtctagttgcaggaaaacaagctcagggctcccactgattctacattatagtgagttgtataattatttcgtttatattacaatgtaataataatagaaataaagtgcacaataaatgtaatgtgcttgaatcatcctgaaaccatccctgcccagtctgtggaaaaactgacttccacaaaaccagtccctggtgccaaaaaggttggggattgctgcttgaggggtttttatggaggttcacaatatataggtaagattttgatgactgattgaatcattggccactggtgactgaactcactttctagcycttcttccctccccagaggttgggggatggggctgaaagttccaaccctctaatcaygccttggtctttttggcaaccagcccmcataatgaactatctaggggcccccagtagtgtgacttcattaacataaactcaggcatggttgaaaggggtctgttatgaataagaaaacatgcttcctatcactgttggaaattccaaggaatttagaagctctgtgacaggaaccagggacaaaggctaaggagatatttcgtattataccatagcagtgctatttacatgggaaacaagatcaccaggaaatcctccctgaatctaaacccctcacttgcctaagaagcaccaaaggacacaggacaaacctgaggagsctctcagctggaaccaagcactatgtagcaactgtgtctctcaagaaactatgaggtcaacctcttggtgctcctggacttttgtttctagcatatttttaaattcctgtatttttctagaatgcaaatttccctgcagactcctcctaagaaaggcaaactttctaactcttctattatgctttcttactaagttaacagacacagacccagaaagaaaataaagttgtgttaacagtaaaagtcattgcatttgtgtcataattctaaccgaatgaaaacrtcacaagcgatgttcatagaattgcaaaccagacaaaactgacctgaggtttgagaggagctgaatgagacaggatgatgggaggagtgagttttaatctattcaggctaagatggatcactcaaaggtaggtagtaaaataaaagaattttaaaggtagctatgttcaatttttatttgaaagcatcaatgcttggggttttgttgtgatgataaccattaaaataagatttatcttttcaacagatgttaggaaatataaaacctaaccaaaattaaggtatatcttattcaaaaggtacacattcctcttttcctgtttggttttgtgctggtaagttgcagaaagtattttcttctcaacattatactgactgacttgctagaatcttttcatctgatatagtgtcaggagaaggataactgagaaaaaaaaagaggaccctattctcagatgcatcttccaccatttaaatacctgtarctgcctgctgcgaagaggtctgcaggaaggacagagaccactttctattagttcctccatgtggtgagaagataatctggccgcctgagccacagtcccaggaaggccattaaatgccctgcagaatcaaaaccacagtgagatagcatctcatcctggttagaatggctactatcaaaaaaacaaaaataatgaatgctgatgaggatgcagagaatggggaaccttatatactgttggtgggaatgtaaattagtacagccactatggaaaacagtatgacgtttccccccaaaactgaaaatggatttattatgtgatccactgctggatatatatttttaaaaattgacatcaagttatcaaagcgatatctgtattctcatgttcattggagcrccattcacaatagccaagatataaaaacaaactaagtgtccatcagtggatgaataaagaaaatgtagcttatagacacagtggaatattattcaactataaaaaagaatgaaatcctgtcatttgcaacaacatggatagaactggaggtcattatgttaagtgaaataagctagrcacagaaagacaaatattgcacattctcaatcatatgcgggaactaagaacaaagtggatctcatggacatagagagtggaatgttggttaccaaaggctgggaagggtagaggggagggaagataaagaggggtttgttaatgggcacaaaaatgtcattaaatagaaggaataatttctagtgttcgatagtacagtagggtggctataagttattgcatatttcaaaatagstagaagaattggaatgctctcaacacaaagaaaaaataaattattgagatgatggacatcccaattaccctgatttgatgattacacactgtataaatgtatcaaaatatcagttytttcagtgaatggagcaaaggaggatgcccatcagccagcaggtgycaggggttttctcaggtgagctgcccttttgtccatttttggcactgctggagaggagcagcccaacccgtccgtgatcttgggcctctgagaatagaggaagcttgatgtgggcctcagtccaacttaatctggaaagtctgcctaaggcatattttagagagggaggacacattttggggcacatawgttttatattgttgcaccccaaaatatatataactattatgtctcaataaaataaataaattgatgaattagttaattaaaaataaaaataaatgccctgtagggcagtatttgaggaataggatattggtgagagagattcactactaagaggttcctatttttgttaactgcattcctggtcaygaaatcatgttaatcctagtgctacacatggggttgaccaggaaaccaggttgacctgcccagggccttagcagccagcctgcccaagaggcttttcagcaaaatgctcaggtgtgtccagagccctctgaccygaagggcctcaaggagaacctctagattatgctggactgaagccctcatcaagctgctcctattcgcagaggctcaagaccatggcaaggtggggtgctcctcccagaaatgccaaaatttgacaaaaggggagctcacataggaaaacacgtgtcacctaatggttgatgggcgtcttcctctcacccatccactgaaggcctggatctccctctctatctatctctctctctctctctcacacacacacacacacacacacacacaaacacacacacacacaatgataatgccaaccctaatgctaatgyctaagttctatgttctgcttggtaattagctcactctgccttgatctcttattgcgttacctcagcattctcactatagttctayaactaggaatgattataactcttactgggtcattttgcaaatgaagaatttggaaattgaagttaattacttaaactcacacatgtactaagtggggcagaattgggttgttaaccaggttccctgactctctgcttcctaatcataaaacatatgagaatgaactatcttactgccctttatttgctcagtttttaaagaaataggaacctggaggattttaagtgcctagcatctatttagagagtaacaactactgtttaataacatttcaccccagaatgtgcctgtggctcacaatctagagaggaaaagatggcccatgttggggaggacacacccataatcaacacaaaagaaaaacctctcctgcttgttgccaaggcagccaagcattattgttcagattattcattagccaaaggggtaagggaagagaatgaaacccagtctacatttggctcaccaagataagtgtcctggcaagggacacatatactcacagaaaagggcactcttttctaatttacacaagcaccatagagactagaagtggtrcatgtgaggctaagagtgatggtttaaaaagaattggatttttactagagatgggttttctccatgttggtcaggctggtctcgaactcccaacctcaggtgatccacccgcctcggcctcccaaggcatgagccaggcatgagccactgcacctggctcgttccccatcaaacatggggattccctaagatcacagcagtcaatctcaatgatctttcctgcttcaatgttttctctgtgtattaatttcctagggctgccataacatagtaccacaaattgggtggcttaaaaccacagaaatttgttctctctcagttttggagcccaagagcctaaaatcaaggtatcagcagagccatgckccctttgaaactccccgcagcatccttccttgcctcctcttaggtgccatgctctctcttcacatggcatccttccttgtgtttttatatcttccctccgtgtgtgcctgactctgtctcatttcctctccttatgaggacatcagtcacattgggttagcgtcctcccaatgtgctcatctttgattatatctgcaaagaccctatttctaaataaggtcacatttacaggtactgggagctaggacttcagagcatctttttggtggacacaattcaaccctccaatatgtcatagataggactgggcataaaggagtagttggctcaaaagctgctcctaaccaattctctttkggcatgttgatgactctaagaaataattctttgtaagaaaaaggagaagaccatgcctgacactgagtttattcagaaaagtcactttgcccaccgtcttgttttagggggaagaataaaactagaaatgtttatttcactatttctgccttggggaaagaagcagttgttttcaaatcttaatggaccaagttggaaacctagagaaaggtgagaaagagcttctccttgccccaggttcatttctcctgacagcattattgcttttttgatgcatgtcatctgctatggcatcctgagaaacsaaagtgtcatatagcattgaggagttcaaaacctatctaactgcattagttttccaactaatctaagtcactggcagatttaatccctttcagccagtattcaagcagacaaaatgcatttgctgatatcatgatgttgataatttttaactaaggcttcacagcctagtatggttcctccttaggatattgcagggacagcaccaaacacttggcaatatggaatgacgttgacaatgttaagctttacctaagccttatgctcctggaaaacagctatggggaaaaaaaaatccaccccccaccctccacctgccttttttttttttttttttttttttttttttttgagacaggatctcattgtgtgtgtcaccctggctggagggcagtggtatgatcacagctcactgcagcctcaacctcctgggctcaagcaatcctcctacctcagcctccctgagtagctgggactacaggtgtgtgccaccatgcccagataaattttttttgcattttttgtagagctagagttttgccatgttgcccaggcagatcttgaactcctaagcttaagctatctgccyaccttggcctcccaaagtactaggattgcagstgtgagccactgtgcccaactatttaacaatgtttctacctatcttttcattagatagcattccatttccatcagaaaatcacgcaaatacttcctgtttattttcacagtaaaaatgctgattatcatggagtcaaagataggcttgagcagttgagatgtcactttacatgggggttgctaattgaagcccttgaaatttctgatttaraaaacagggtcttggaagagatccagttcgtggacacaaagtrcagtgtgggaatgcacaacatactagcttatgtgaaacactggaagggccagaatgagaaagcactagagaaagaagttgaatgagaacacaccaaccaagcagacatgagtgaccagtatcatcacatgggcaggtgacctggggcaactttgcctgggctggggcaaatttgcctgggcgtatcaccacataggcagactggcagaagcccagacttacctggataaggtagagaacatttgcaagaagtttgcaaatgcttcccgctatagaatggagtgtcctgagatgaactgtgaggaaggatgggccttggcgaagtgtggaggaaagaattatgaacaggccaaggcctgctttgaaaaggctctagaggtgggccctgaaaatcctgaattcagcactgggtatgtcatcactgcctattgcctggacggttttaacacaacagacagtaatgagacattttctctgcaccccctaaaatgggctgtcagtctaaatccaaaagatgcacacattaaggttatccttgccctgaagcttcaggatgaaggacaggaagctgaaggagaaaagcacactgaaaaagctctaatcagtatgtcttcacagacctatgtttttckatatgcagcccagttttatcaaagaagaggcaatatagataaagctcttctgctcttaaaaatggccttgcagggaacacccacttctgccttcctgcatcaccagatagggctttgctgcaggaaacagacaaaaaaagctaaaggcaggatagagaaactgtagacaaaataataagattagttatatctcatgttgaatttgctgtagagcaaaggcccacatttgcaatggtttatgtggacctagccaacaggtatgcagagggaggtgaacaccaaaaagttgaggacatttaccagaaagcactcagcctgcatgatattaataaaagctgttgcaagagatttattatcgttatggcccctttcaggaatgtcatgggaagtctgaagctaacacaattgactaatattaaaaagagctgggctgggcgcggtggctctcgcctgtaatcccagcactttgggagsccaagatgggaggatcacaaggtsaggagatggagatcatcctggctaacacggtgaaaccctgtctctactaaaaatacaaaaaattagccaggtgtggtggcaggcacctgttgtcccagctactcgggaggctgaggcaggagaatggcgtgaacccgagaggcggagcttgcagtgagctaagatcatgccactgtactccagcctgggcaacagagccagactccatcaaaaaaaaaaaaaaaaaagcgagggggggcgggtgyggctaaatatagaaattcagtcaagtgctagaggaaaaaaattttagtgctttactgaattggctaacaggcaagttcatttgcttaaatctgatgaggagagtttgaatctcattgtgctccttcacacattgaaaggggaaaagaaagtgaagctgtgctgtcctatgagacagcctgagacgggctactggcctgaaccctgtcttttgagatgttaaatgttatcatatctaaatctaaatatcagataaatcttccctgatcgctgctttcaaaaaggcatgacaggaagcaacataaaactgtttggtggcacacatcgcatcatcagctcaactcccactttttggctaatgaacacctatccacgtggttgtggcagcaatatcagcacttctcctttatcactgcacccctttgtcactcttgatatgtcttgtgttaggtacctggcacctkccagaccaatcagacttctgagaatttgcaattggaattgacaacttccattttcagtctactaggtcagctgttcaaaggagatttatattcagggagtacaggaagtcaactttttcatatgggcaaagatgttgacccacaagaagatctacaaacaaagcacatgggcagaaagagagaaaagattcttgtgtgcaccacagtatctcagctccattttcacttcttaaggcccatctctctcctatactttcagactattgagataccttataatataaattattatagctttataacaaatccaatcctttgtttaagaaagttctcagtccttgaaagcgaaatagttctaaagtattcatatatatgtatacatataatatatatgtatatatatagtatatatataattagtcattctgacctaagggaagttaagttgcatcacaaaaagagaaagtgaaaaaagtccccctatttgagatgcacaagtagtgctaggtagtgtgtaatatactctttgctctttctctgtatccaaaaatctatagtaaaattaaccaagataacaaatttgtgagtagagttttaaattgttgcaacctctaagaagctgtgaatttacatgtctgtgtgggaagcaagaaaactaaaactgtctgtgcagaaataagaggcagaagaagccataacatctacctacaaataaaagacacacatcaaggaagcatttagccttccatgaattgcacagaattggagagtgttgacaaatttcacagatatttaagggctgggaaaggatatggagcccttcatgtagctgacatgggtgtagaattcctttctaattttggtgaggagatttattagttttattcaaaagaacattaccagtgcatggggtttccaaggagctctcctggcctctccttgaattccttacctaataccactacagacctctgtgtaggggcagatttgactttccttctggaacacagctaaagataaaatctaaagacagagatcttgtaaatttgtttgagttctttgtagattctgggtattagccctttgtcagatgagtacttgcaaaacttttctcccattctgtaggttgcctgttcactctgatggtagtttcttttgctgtgcagaagctctttagtttaattagatcccatttgtcaattttggcttttgttgccattgtttctggagttttagacatgaartccttgcccatgcstatgtcctgaatggtattgcctaggttttcttctagggtttttatggttttaggtctaacatttaaatctttaatccatcttgaattaatttttgtataaggtgtaaggaagggatccagtttcagctttctacatatggctagccagttttcccagcaccatttattaaatagggaatcctttccccattgcttgtttttgtcaggtttgtcaaagatcagatggttgtagatgtgtggtattatttctgagggctctgttctgttccattggtgtacatctctgttttggtaaaagtaccatgctgttttggttactgtagccttgtagtatagtttgaagtcaggtagcatgaagcctccagctttgttcttttggcttaggattgtcttggcaatgygggctcttttttggttccatatgaactttaaagtagtttcttccaattctgtgaagaaagtcattggtagcttgatggggatggcattgaatctataaattaccttgggcagtatggtcattttcacgatattgattcttcctacccatgagcatggawtgtttttccatttgtttgtgtcctcttttatttcgttgagcattggtttgtagttctgcttgaagaggtccttcacatcccttgtaagttggattcctgggtattttattctctttgaagcagttgtgaatgggagttcactcatgatttggctctctgtctgttattggtgtataggaatgcttgtgatttttgcamattgattttgtatcctgagactttgctgaagttgcttatcagcttaaggagcttttgggctgagaccatggggttttctaaatatacaatcatgtcatctgcaaacagggacaatttgacttcctcttttcctaattgaatatcctttatttctttctcctgcctgattgccctggccagaactttttacaaatttataagaaaaaattttttcacaaatttacaagaaaaaaacagacacttctcaaaagaagacatttatgcagccaacagacacatgaaaaaatgctcatcatcactggccatcagagaaatgcaaatcaaaaccacagtgagatactatctcacaccagttagaatggccatcattaaaaagtcaggaaacaacaggtgctggagaggatgtagagaaataggaacacttttacactgttggtgggactgtaaaccagttcaaccactgtggaagtcagtgtggccattcctcaaggatctagaactagaaataccatttgacccagccatcccattactgggtatatacccaaaggattataaatcatgctgctataaagacacatgcacacgtatgtttattgcagcactattcacaatagcaaagacttggaaccaatccaaatgtccatcaatgatagactggattaagaaaatgtggcacatatacaccatggaatactatgcagccataaaaaaggatgagctcatgtccttcttagggacatggatgaagctggaagccatcattttcagcaaactatctcaaggacaaaaaaccaaacactgcctgttctcactcataggtgggaattgaacaatgagaacacttggacacagraaagggaacatcacacaccggggcctgtcgtggggtggggggaggggcagggatagcattaggagatatacctaatgtaaatgacaagttaattggtgcagcacaccaacgtggcacatgaatacatatgtaacaaacctgcacrttgtgcacatgtaccctagaacttaaagtataataattwaaaaaaaagacakagatctgctgattagagattgtaaagacaacacttctccaatcagacagctcttagcttctggcttctagctctgtcctgcaattgtttctaaaccacttcttattcttgtaaacaagatggctatagtttcccattactggctcatctaggcctatagaaaccaaaggacatattgttccttcttggttaaaagttacatagaaaatttactagaagttagatggcattatttacaggggttggctaacaggcaagttcattygcataaatctgatcaggagagtctgaatctctttgtgctccttcacaccttcccctggtgctggaaaccaaagctggtttccctagtaaccagcacctattatgtgtgagagaactgtgactgtgagttttgagcgtttgtgtgtgtatttgggtaattactgctgactgaggttttcagtacagcatgaacttcttttgtgccagaaacagaaactattttttttttccagagacagggcctcactctgtcaccaaagctggactgcagtagcatgatcatagctcgatgcagcctcgaactcttgggttcaagcaatcgttccaccccagccttccaattagctagaactacaggtgtgcaccactatgcctggctgattttctttttttaattttttgtagagttaggtctcactatgcccaggctagtctcaaactcctggcctcaagaagtcctcctgccttggcctgtcaaagctctgggaagaaactattaaagttcattttgaaatgtcattgattgactctcttgacattgggctgcatatgagtgctttctatggggcacacgacctggaggaaaggagggaagaatgaaaatagtgtggtgaacttgtgaattcatattccactagcacagagctattaagaaatcttccccagtgatcctattgtaaactctggctacacttctatgtataatccatatgcaccacacctcacaagcctttggctacatcacatttgtgtgttaggcctaaattatgatagctttagcccaaacagatcagaataccagaaagggtccccagctgtctcaagcattccaaagaggacttccacaaacatgctcagcagatattcatcaccttcttcctctccagcctctccacccaccaactctgctctctcttctgctgatggatttcatgggcttactgctctcttgggaccattgtcttaagtgggttatagaaaatatatacatatttaatatttgctttaaaatatacttattgagctctcaatgtatgtaagatataaacatggtgacaaaaagcaaattaaaattaagatggtgagagaaaaaaggaatagccaggtctaacacatcaggtaagttgtccacttttcctgctctggccctggcttggtgctagttataactcaggttcaagttactaaggatggagaaaaaaatctggaggagtccaaagtagacagagaaagacatacccccagaccatcactttaactacacacaaacatataaacttacacacacaaactcacacactcacaaacacaaacacaaaactcacacacacacacacacacacacacacaaatggttagaaggcatccgaatctgctctccctggctctggaactctttggagctgccaggtgtctaccacagggattggattatttatattcattaagctcaatgtcaatctttttccaygggcagtgctgattccatggccttctccacagtctacggcaaaggaaaaactccttagaataacttgtacacacaacagaagcattctacttgtacattcttcttgtacatacaaaagaagcattcactccaagctcagggaagagaaactcagtctcctgcctttctggggccccagaatgtctcttaagtgcccttccaactagtgcttggtaaatgagacactgggctgaggaaaccactgaccacaggccacgtcttccctctgcaagcttctagattcagttgccaggatgggctcctggactgtgcctattctactggacactgattaaaagtcatctctgtgccctttcatttcaggcagctggggaggggatggcagtgagcagccaagaagc

SEQ ID NO: 9904 - DNA, 12370 bp, Homo sapiens
gagaaaaagactggtaacaatcagatgaatcatttaagttaaatacagcaattaagtagcgcacctgccacgggccaggccctgtgctggggcagaggcatgggatgaaagttagacacaacgccttcctcaggtgctccccgactagtagagcggggctcagaacctgagcatctggatccctcgtgcaggactgagcctgctggcaggagggctgcaggcatgctttggggagggatgtgatgggaggggcctgggtgcccccgagacccccagggccctgcccaccctgcacctttgcccccaaaccggcctcccggctctctgtagtgggctgctgtgtctttgcattcctcgtggggctgttgttcgtccagcgctccggaaactactttgtcaccatgttcgatgactactcggccaccctgccactcactctcatcgtcatccttgagaacatcgctgtggcctggatttatggaaccaagaagtaagaggaacatgggggaaaggtgggatgggaggaggggtctgtcctatcatgactccctggagaggcagatcatagagtcacaatggcagagctgaaagtgcccttacggatcatttagggaaactgaggtgtagtgcaaggacatggctgcctaaggccacttgtccagggagaaacagagccagtctgaggactgggtgtcctgggtgcaggtcctggcatcatccttaaattaccacagcacctttcctgggtaccaactcttcagaactctgttaagtttttgtgaagggcttagtgggtctacaagaggcccttgccctccaagaacgtgtagacttcagcagcctggttcacaattgtaagggcctagataggggtatgagatgaggtatgattttggccccaagtttggggttgtgcagggtaagaggattcagctctaagaaaggattgggtctcacagcctaggcctagggcagttgtacacttactgtaaactcttggcctcatccctcatgttagggcaaatacgtgttcccaggagttctagaactaggtctctctgactcactcagcatcgaccatgaccacattgtccttgtccttggcaagacccacctccactaacccacttggtctgaccctccctgatgcctggacctggtttggcagtggggctctttcacaggggccgtctgcttcctaggagagcacaggaggggacagggagtggggggaaggacactcctctgcttccacctgctgtgggccagggctgtaagacactgccacaaaggactctggctgatttttgtgtcctggactccttcggcagtctggtgatgtccctgtatgttactttaaatgcataagataaaatgtgtagggttatataagaaacttattatattgaaaaatagcaaaatatcatttaaaatttgtgatatagtaatgtatgagcactttatttttaatgcattgttacaagatctagctatagatctaataacagtggtaactttgaagtagtgatgaaaatcagcgatgactcaatattttcaataactgggatgtaatatgaaaatatctgtaatctattggtgacagtcacaggtattgttaatactactgtgtttgcttgcattcataatataatagaaagtaatgcaagattttagttagcggttattgaggtaaagatgattcttttgtatgccattcaagcacaagcctgcctgccttccagaattctgctcaccccttggtgagaaacccctgagtcagggcagctctctacctttggactctagagaagtgcacttctactgcttttccagcagggggagccttcagccaggccagtgtgaaagggctaggcccctccctgaacacacaagctgtctatacataaaacagacgtgcacctgcccagggtgtgtctggtgggccctatcatatctctggatggggtatgatgtgacggaatcagaagaggttagaggaggacagtagagccttcccagaggccagccagaccacacacaatgagcactgaatgtgaagaatagaagagcccaggagggagggactgggaaacgaagactttctggaggagatggtgatgggggaagagggaggtgtgactgagggatgccaactgctggaccctctgctatgcctggcaggttcatgcaggagctgacggagatgctgggcttccgcccctaccgcttctatttctacatgtggaagttcgtgtctccactatgcatggctgtgctcaccacagccagcatcatccagctgggggtcacgcccccgggctacagcgcctggatcaaggaggaggtgaggggtggggccccaaaccccagggacatttgcatcttctcaggccttgaatgcaaccactgatagggatacacctttctagggcagctgctatgtgccaggccttgccaggtgcctcacacctaaaccgcaatcttacaacaagccaaagacagaggtggcatcatccctgtagcacaaacggggacaccgaggctcagaaagattaatgcacttatccagtctttctaacccatattctctctccatgcctgtggagtggaattagtccattttatagtaggagaaaccaccctagaccctttcaccaaggtgaccaggtaaacccccatccttggctgtgcctggccaggatggtgggaggggagaggagtggaaggccatgggtgagggcaggagagcagtcttggagggcctgggcggggagggctgtcacagtgccggcagcagcccttaaggcagcccacccgcaggctgccgagcgctacctgtatttccccaactgggccatggcactcctgatcaccctcatcgtcgtggcgacgctgcccatccctgtggtgttcgtcctgcggcacttccacctgctctctgatggctccaacaccctctccgtgtcctacaagaagggccgcatgatgaaggacatctccaacctggaggagaacgatgagacccgcttcatcctcagcaaggtgcccagtgaggcaccttcccccatgcccactcaccgttcctatctggggcccggcagcacatcacccctggagaccagcggtaaccccaatggacgctatgggagcggctacctgctggccagcacccctgagtcggagctgtgaccactgcccaagccctgcccgcctctccccccacgctcaacctgcccacttgtccaggcctggcctctttcttgaggtggccaccaggcccaggccaggccctttgcccaagaagagagggtctgccctgcctcactcccctcttcagtcccagtagactctgctccctagccctgagcaggaggctgggagcagctctgtttcctaattcaggaccccactcatctagccctccaagagcctccgccaaattgtagccatgtaattggaacaacccataaggcctgcttcccagtccatgggagattccaagtggccactgcaggagtcactcacctccctctctccctgtaacttgccacctgcagttcttagggctgtggggtcagatggtggtggtgagaggccttggggctggggaaggagagtggactttggctcactctgccatgagaacaggacaccatcctgcccagcccagacggggttgctcctggtccaagaggctacctgctccaaggcggagggtgggagcaggtgtgccagggctcagggctcagacttgggagggcctaggcagaagccccaagttctgttttctgaggtatgtgctgcccttggcttcagcatgagccttggtagcagaaggtgaggaacctcctctgccctggtccctgggtggaatcttcccatgtccttggccctgcctggggtgtgtggtgtgtgctcctgcatcttgtctgggagtgcagtgaccgggaccagaaccttccccacctcaattagggcttagccatctccctgtccccagcacccctccccagcccacagtggtggcctctgcctctttcctggagagagaaggacagtgcacggagaggtttccagagcacaaattgttggttcctagcacaaattagatggtttggagcacaatggtgaagcacactcccctccctcctcacctggggtccaatgttctgtctagtggcagcttttcccctggaacaggggtccctggagttcacaggcttatccccaggaagcctcactcctggggaaagacagataatttcactgcccctttgagccaccactcactctccttattacacaagcacagccgcccagtgtgcacatcatgtgcagacaccttggaaacctttcccaagccttcctggcccacagtggccagtgccataggcagtgctgtggacagtagaggctgccaaaggcaagggctggtcttcaggatggaggccagcctgtgcagaaggctgcagctgacaacagcgaccccacctgccattaccttcagggcctcctctggaagagaacccattctcagagtgcagccagggaggaacctgacccaagagtaaatgtctgcagagagatggatggatggatggatagatggatggatgggttggggagtgggggtggatggatggatagatggatggatggatggatggatgggttggggggtgggggtggatggatagatggatggatggatggacggatggggtgggggaaggaaggaaaggagggagaaaggagggaatactggctccatctttgagagctctggtgggcagggcagaaacaggccacagtgctcaacccggacaccctcacgaagggtcgcaagtcactcttgtggctcagattgctcttaggacctggagggacagaccagaatcagggtcccctcctttacccctgagttccttactgttcccccaagcctgggagcagtctatcccccaaccctgccatctcccttactcatccctcttccacagcttcccctttctagccccctctgccctacctgtctttcctgagtgtttgaggggagagagagacccacatctccccaaagagatgagcttttggggcacaacatcccaccgcagtccccctcacccgacaacacctcctacctggccccttgccaaatcccaagcagaattagcaacaggaaaagcagagccccaggagagacactctactatatatactcttctatatattctgtttctattgtatattcactctgtacatgtgggtgtaaatgctgttaaatgacaaacccaatattatactgtggctggtggactattttcatcctcagtgctgtacagatctattttcattgtatatttgatatatttttaattttgtagcgtgtggctgggccaggccccagcgggaggggctgagctggggctgtgtgcttgctaggtgtgggcgcgctagtgctcgttgtagccttttgctgtgtcttcgctgtgtgttagacgtagggcctagagctcggggtgtgtgtgtgcgtgctgtgtgtatggtgtgcacatacgtgagtgtgggtgtgtgtagcgtgctgatctgtgactcccagtgttcaccaccttcctgaagaccacgctccctccccctgcctcctcctcctcctcttggctctattgggagcctcagggccggcagggtgcttcgggagccccctgctacggggaaaggcatgtgtttcttgctggtgactcattgccttcacaccactgggtttgccagaaacagggaaggagggcgttaagggaaaaaaaaaatcctcaaatttatttaccagtcagcttcttgctgttcccagtagaatcgctagctcttctccagaggaaaagtactaggattcttaagatggcgagaccccaagagggatctcatagcactgctgcatttgccgttgacgcagtcctgacagtgtttgaaaagggccgcctgccccctccccactgtgcttttgatgcctttggagtcaaaggcaggtggggtcacctgatgagctaagatccagccccagaatcctggaggagcaggaggtagcaggagaggaccaggtccccaagtcccttcacagggtccccacccccactggctttggtgctgtccacacagtgcccaccagaaggcagagggaactccagggcagggatgtgcctgaaagagtcaacagtcccctgatcccctacctctgcctgccctccagccccatcaccagcttcttgctcagggagacttccgccctcctcactgaggcaacatgaagccygaggcccagatgggggctgaacaggtagggcacatcagttaatgccagtgaggtcagcttctgccctccagcaatacatgtgcaggggttgctgctttcccagtgccaggagaacccccgctccgagtcagcctgtgtgggtcatgaggctggggcccaggagacacggtcccaggcactgcacaggcctgcagtattaccaggcggaggggctgcttttctgcccttcctcacccccacgccccaccccactcccccagagtactccccactgtgaaaagagctggaaactaaactggttagaatgaacctggctccctgagcatccctggatccttcaaataggccctgagatgtgaggtctgctgcttcactggggcccgatgactttggctgggggagggggcctagggcctcttctcattgaaagctctgctttatacagacccaagcatacacaccaggccgtcactttgggttctggcataagttcagaacaattcaagtccatgtgtcccatggctggtcagagccctgggtcaaaaccactcagcccaggggaggggatgaggcattgtcaccctagacccctcttcctctctcccccaccatagtgtgcaataaagtgtctgttcttaccaaacccttcttgcctttctcacctgctcttgcaatgagggagagggaagggtggccaaggatcctgcgggaagctttggggtgaaaagcttggactgggatgggtggacaggactgctgaggggggttgtgggtgctggctggctgaggagcagcgcggggagtgtgcacaggttcatatctgtattttcctaggaattgtcctaggtattaacaatgcacacacttgtagagggccctattggggtccagcgattccacatgtctaatttcctgtcatctttgcaaccgtttcctaagggagaccctttgctggctacatttttccaggtgaaactgcatctgaaattaggatggtatttggtggtctcttacaggaccctgtaggggaaactcctgtcccacctgactaccaggaaaagctatacttgtcagcctggcaagggtggggtgtgtggaggcccacctcagggaaggacaggggtgggaaggtgccagtgttgagaggtctgacagcaaggaccaggactctcttgggtgctgggttggggggggggggtgggctcccctggaacaggcatattctaaagttctgcccctctcttcaagatagctatccctcttgcaaacttcagtagaaggtaaagacgaactaggggatctgacatcacctctgttctaacattccagccccaagtattcatttattaaacacccactgaatactcagcactgtgaagaacggactgtgctggtggctgggaagctcttcttcctgcctcaccctctaggagcaccgacattgaaagaaacaagaagtctggctcctggaggaggcctcacccccaccccacccagctccaggctggaatgatgctgcttgcactcagacgcacacagccaaggaccctgaaggaacctgccattttcttctcttgccatagaaagtgttgttccaggaatagccaccagatggcaggaaaacctttctcgccagatcatagtctgcttgccttcctctctgtcatttattcctttgtgggttagtttatttgttgaacaaacatttattacgtacccaccctggacaggctccatgccagctatagatgaataaagataaaatcagcccctgctgtcctgagtttggcagagggaggggaccggccctataactccacatctccccatgtatctttcaaaccaggaaatggcctggtgctgaaagtcactccttgtcaagtattcagtcttttggttgaaggtaatgtttttggttgagatgcaagccctcttgccaggaggggcacacagatccaccaagatgcagcataacaagggctttggttccaaggagctctagagtcatacttctcaagttcaagttcaaatgccacccagcttcctgcttcctgggaggccttgagcgagtcatttaatcactctgagcttaaatgtcctagtctgtaaaacagacataataaatagattcaatgagataacacatgttggtccagttatctattgctgtgttccaagttactccaagtctgagcggcttaaaacaaccattctatctcgcagttttctgagtaaggaattcaggcaggactcgtctgagcaactcttctggtggcaaccaaggtcactcagtgatattcaactagcagcgaactagtctggagggtccaaggcagctgccctcacattcactcaaatgccgggcactccagtgagaatggctggaagactgagttcagctgggcctgccggccagagtgagcacctacaactgcctctccagcatggctacttggccagacttctgactgaagggcttagggtccccagagagaccatttcaagagacaggaggtggaagctgccaggtttttaaggcctggggctggaaaatggcacagtacctctaccatcttctgtgggtcacagcatctgcccaaataaaggggagggcacacagaagccccccttgttgatggggagtggggagagtctggctgcccatgtaatgggctgattctagagtgttagggatctttgtcatcagtcacctgcacatgcatggaagccttctcctgaggggatgtcagcttagagacacagaactgggacacacagcaggtcatttctggtggggaggtgagtggttaagtttgggccctgggtggagggagcagtcagaggaggatgagaagggcatgcaggaggacaggtgaggccactgcttctgcctcaggtttgccccagggcaggtggcatgagtggtttgaatcatgggtctgtcgccaaccataccaccttggggaagccactttaaccctggaatctccattttctgatctgtaaaaggaggacgacaataaaatctcttccttagagatggtatgagggaaaaatgaacttcatcagtaacatctactggaatacagtatcgacttctttccatatggggatacaataggtgctcattaaatatttccttccttccttcttgcgatcctgggcaaggccatggggcctacttcattctgggggccccatcacccatgcaatgagccatctcctaaagctattcacaaaggacagtttcagcctaaaatccagagaagccaaggaaggaaggcagaaaaggaactctctccaggaaagggagtaccagagtgtgggggtctcactgatcctgtacattatcatgttcaccccagcagtcaccaccagacagctccagtcatagggacttgggccaaggctaaagtattccacagaccacaaggctattgtggggttttgtttttgttttctttgttgttggttggccccaaattctttttaatacttctcccatcaaaagtggagtctatgctcctcctcttgaatctgggtgagcaaatgcttcctgtgaccaacagggtatagtagaagtgatgctatgtgacttccaaggctagattaggaaaggccgtgccacttccacctggtgttctagggatactcattctagaggcagccagctgccatgtaagacagccaaccaccctgagactgccatgctagggaggcgatatgtttgcagatgcttaggttgacagcttcagctgagcttccagccaacagccagtgtcaactgccagccacatgaacacagcatactgaacgtttagcccagctgagcttcagatgtttgcagcccgctgacatctgattgtagctgcataagagaccctaagcaagaactgttcaactgagcccttccttatttcctgacccataaaataataaacaaaataaaatggctgttgggtttatatcactacatactaggggtaatttgtttcataacaatagtaaccagaatatgaaccttagtgattatctggtcaaacctccttgtacaacaatgggggaaacggaggcccaaagaggaaaagaccagacttcccacaaccaagcaaggggaagatcggggccaatgcctgggtttcttgactcccaatctagtgcactctctgccacacagcaagaaactgacagggaggactcctcccccgccaccccccgcctcattaattccatgcatcaagcaagcatgaatcaggtattttgagtgcctgggattgtgctgagcactgggaatatacaaaggaccaggcaagagtccctggctcgcagaggcagtcacaatctgacttgggcatctcccttcctggcacactcactggtgccaggcacgctgctgcattctttaattacatcatcttaggtgggaagaaaccttgagatgggagaagactatgcctgtcattcaaccacaaacccttacaaagattgatccatgccaggcacagtcctggctgcagagcataaagactcagtggggatctgctctctgtccctgggtctgagctgcctgggttctgggtccctccattctgcccagggctgacccaagcagggaagaatccctggacttcaggagcacccaagaggaacctgagtttggcctgtctctccagacacctgcttcccctttccccaggatattgctggaggggactgggcccatcaggactaattaactcctctaatggaatgaaccagtttttcctggaacttagcccaggtgggagcaatctctacttttctagatggagaaatgctaagtgtcaagaggtcttgccagccggaccctgggctagcgtgcatgtggcaggcgcggtggcgggagtgtgctgtctggatgcaggctgagttcccagcccaggagccttaaacaaggaggcctctagggtccactcagctggtggcccccgtatcgttctctgtccttggcccaacaccagccctagctccgtctctcagagttcgctgctgctgcttaggcctgacatccctaagcggggggaaggtgtccatgagctaacactcaggtcccctccaaccctatgactccaggtccatagtgtatgaggccctgagccctgcccaggcccgagcttctgatctcttctctttaagagctgggccttcaaaggccacctttgagccccagatacaacttcactgggattaccacagcaacccaaccctgctttcagtcctgaggcagagccattctactgatcttcacaagacctgaattactagggctaggttctccccagagcccctcccccaccaacccccctccccccaaagaaggctctcacatttgatttggagcctgcaagtctctgcaggctgcttggggttgggggaggcaggatgaagtgagctgagacgcagacaggaggctgccagcctgctcttgccttcccttctcttgttcccccatgagcggggaggccctatcaccctctaatgagtctgataaagcaattcaattttccaggctgggagagagtgaggcatgctgggaaaggatgctggctccttggcctggacctgaaggagggtcagtccctggcaggagctagaataccaaaaagggaaagtgtgagcaccaatggatagaaccttgccttggcctggagcccctcaccacaaacaggtttcaaagaaggaagatggagaggagattggatggctccagtcatcctaaagaggctgagcccatacaaagctcccagtggggaaaggggaagggtaaacggctttgatttcaggctttcagcttcctacggacagggtcagcgtcggcactcagagggtgaggaccttattatgcgggtggagggggggcctggaaagggtgcaggtgcttgacagcctccatcggtgcccctttagaatctcccatggccctctcttcctattctttcaccacaccctcacccctgatgagggaaacccgctgtggctgacaccttctgtgaactggctttcagacaggtgctcttccctgacagc

SEQ ID NO: 9905 - DNA, 60589 bp, Homo sapiens
agcagtgtagtgcgagaagctccagcacgggagccactagggcagggttcgaatcccaaatctggcatctgttagcggggtggcctcaagccagtcacttagcatttctaaacgtggaaaaaatgtttaaataaaacctagctgggatcccatttttgtttatgttaggggggctggtgaatattttattctatggggtataatccattactaccattatatattttgctgctcccattgtcccagactggcccataggatctcctttcaggtgactcctgtgtccttctgacatgcccccatgggttttcgatgacgtcttcattgtctggcatcacaaggtgttccagactcatcttgtgcttttccatcccacttctagaatcaaccatctcctcaaggcagagcaatcttcccgtggtgaaaggctgagtatagaagagcaaaccaaaaccacaagcaaatctatttcaagcctctgcttgtatcacacctgctcattggccaaagcaaaagacatggccaagaccaaaatcaaggtgcagggaagtccactccactccaatggggggaactgcagatcccatggtgaaaggtatgaatgtgtaattccagtttagaaggtgtgacaaagtggggaacaacgttcctatctctcactttccccttacttcccggactttatttaaagcatactgaactatttgctgggctacaaaaagtataaacctgagttgccctcaaaacaaccatgctagcagttgtatccatattctaaacccagtagtcaggtagaaatatagacagcagcagacacccataataattataataatttattaatataaatcacaatagcattttgaaggcatgggacacatacacgggctctttcatttactctcataatagtgctattataataagggttgtattcatttcccttcaatagctacttatgccagctttggtttgrataaagtggtagtttgttttctcagcccaaattttgggctctcggtcaacttggacctccagctgcagcagagggcccctcctggcaaagcagtttctctccttacctctcttgtcagctggaggactctggtgtgggtatagctgctctatcaagactgctgaaagagcaagaagtcatcaatgtaaaccaacattctgaatgctccccactatttcccctcttatcacagcctcactcagcttgcagtgtgcatcttcaagtattgtatatagtagttgaagcaaaattttgccactgcattacaagagtcaccagctttccagcctgtaatgtgtgtcccctccttgctcaaaggcctgcctgctgcacttagtcaattctacttttagtgttgttacttgtagcatcccacttccggtaacacgttctttgtcagtaagagctcttaggcacaaataacagratccactatggctagcttaaacagaaaaataattaggcaagtcgtcatcatcatcatagatgacagggtcttgctccatcatagtggacacaacctgacaggacagcaggaggaagaggcttggagctaagcaccaagaacaaagtctgaaatgatgctgtaggactaacacgagaagggagtcaccattgaagcatctgaacctgactttactgcacctgctaccrccacccactagccctgacatcacttctgcattgggactttaacctttcagcctccagaaaaccatcgccactgccactaccaccaccatagtcattcctgacaccactcacatcagaaaagatggaagctccaagtacatcctgtctctgcacctcactcactttcaaattaaagtcattcctgagtatctgaatgacacagcctaggtcataggcctgtgccctcgctgcaagcgaggttgggaatttgagttctgacttctagactgggattaagacataaagatttccacaaatattaargaggccattccaaggatratgggcagccatgagtatgactgatatttgctacaatcatcaagatattttcaagttagaaaagcaaaatgcagaacaatatgtatagactactatcacttgcataagaagcagaaattgtctacatgcatagactatctctggaaggtttcaggggaaacaggtaactattatctctagggaagggaactcaataatcaaggatgggaggaagatttaattatcactgtatactcycttgtaccctttgattaagaaggatgcaatstaaggaaggagaacaggggatggaggagaagagggatggaaggagggaggcactgtgtttcttgcttctctcattctcaaaggtgggctccagcatggcccccagcaaagccatttttactcttctttgctctttgtcattcagccctgtaagtacattgagacacacccttttcaccctggcaaggagaaaactttagaacttgcctgggcatagaaagtgctcattatccatccagttggggaggagggtgtagcaataataggcacattctgcttctttgcactcagcaaaatgtattcactgcacacgtgaacacagctgccattttgtatgtgccaaggactcaatgcaaataaaaatatattttaggtgtctgttgccgttttgaagtcatcagacttctagcaggtttataagctgaaaacttaatagagaacttyatattgggtaaatatttatcaaaatcatcaatcaggaaaaaaaaatccacttcttttctccttcaagcagctttcttattctacctaaattaactctatagaatttttagcaaaaaggtgctagaggaaaaaatcatttgtgtttaacaagttaaagcagcagagactttcaaagttctctactcatttatttcccttttgtgttcagtgaatayggaatatggccacatctctcattcagtctaatctacccataccccagacatgacatgacttactttttttttttttttttttttaactgagacagggtcttgctctgtcacccaggttagagtgcagtggtgcaatcatggcttactgcagcctggatctcccaggctcaagcgatcctcccacctcagcctcccaagtagctaggatcacaggcacataccaccacacccagctaatttctattattttaaaaawttttttcttcaacttttattttaagttcaggggtacatgtgcaggtttgttacgtagtaaacatgtgccatggtggtttgctgcacagatcatcgcataatttttatgattttttgttttttggtggagatgtgggtctccttatgccgcctgagctggtcttaaactcctgggctcgagcaatcctactgtcttggcctcctargtgttgagattacaggcctgaaccaccacacccakttgatttacctttttgaaggtactagttcaaaggtgagtttatcagtgtatgggtaattgacaacagatttttttttcaatatttgcaacttgaatgtataagatttcaaagtcaagaaatagagcttctctttatcttccacccttctgctacctgaagcgcaactatctgctaactaaaaaaaatatattaataccttaaaacagttctctagaaacctcaggttattataagaaactatgaagctcttatccaatgtttcaaattccatctcaaaaatcacctcctttctgaagccttttctcatattccctgccactccaaacacctggcagaagtagacacattcttctgtattccttagcatccctcctatcatctgaagacaaagtgcgtgcccagttaatctgagtattttcaacatatattacgatgtctagctcacagtaatacagtgactagcaaataaataatccattgctgattaatatgtatgaattaattaaataacagactcagtgaattgattctgcttgttttttaagggggcaaagggtgtgctttttttaatatatatgtacaaaattttgaagttcagaatacactttttaacccacttctaacccaggaccttgggggatgggttggacctgtgtcacacaaacgacagtaaccgtgtaataagtaaaacataaagttaaattaaaagcctaggacagccggccatggtgactcacacctgcaatcccaacaatttaggaggctaagatgggaggatggcttgagcccaggagttcaagaccagctcaggcagytaaatttaaaaattagccaggcacggtggttcacacctgtagtcccagcttgggagcctgagacatcaaggctgcagtgagccatgatcatgccactgcactctgacctgggggagagcaagaccctttctcaaaaaaaaaaaaaaaaaaaaaarsctaggacacataatatggataaaactcacaaacataatgttgaacacaagaagccagacacaaaatagtgcacatggtctgattccatttatataaagtacaaagacaggcaaaacccttctgaggagttagaagataagataatggttatcctgggcctggggtcgggggtaggggcaggcagcggcagtgatcataactgaaaggaataactaaaaggggtcactaacgggcttccgaggactggtgatgtcctgtttcttcaactgggcactctttatacgctagtgtctttatatactctgtatacaggtgtgttcagtttgcgaaaactcatcagctatacattcacgatttgtgctcttatctatatatattgtgtatatgtatgggtgtgtatatatatgatacacatttatatacacacargtcactacataaaattacaagtttaaaaattaacytaggccaagaagaacgcttaaaaccagtcgaattctttagcacaatgcagatattttcaattgaaaagagaaaaaccatattggtatgaatagatagagccataattcaaggtcacacataaaatcttgaccacaggctgggcacggtggatcacacctgtaatcttaacactttgggaggccgaggcaggtagatcacaargtcaagagatcaagaccatcctggccaacatcatgaaacctggtctctactaaaaatacaaaaattgtagtcccagctgctcgggagactgaggcaggagaatcacttgaacccgggaggcggagggtgcagcagtgagccaagatcgtgccactgcactcctgcctggggacagaacaagactccatctcaaaaaaatatakgtgtgtgtgtgtgtgtgtgtgtgtgtgtgtgtgtgtkktgtgcgcgcgcgcgcgcgcgcactgaccacagtctaagttctaatgggccataagcagggtttcatgatgttaagaggtagggaagtgggaccagatgacccttcccatcgttgacaaacgctaccaagtgaagacattctgtttcaagtttttaatgattttatttcaattataatatcctatatttgccaacaatgttcaactaacctttttaaattaaatgtactwtcaaacccataataattcctgaatatggtaatgtttaagcgaaaacagattcaacttctaaattttataacttctttattaaaatttaagtgttcacaagccttttaatgcaaatcgctaaagcctgtactatattgcatgaaatccctccgtggaakagcacgcattctatctctgtacctatttcacagatgaggaaactgtcatttccatgtctgttttattaaccactgtattctctgagcccaggcccattgggaggcctgtagagcagtaagcactcaacaaatgtgattaaatgaacaaaggaggcttggagaggttgtgtaaactgcccaggtcacccacccttcctgggtggccccagccctctttgaaaataaatccaacaggaaggcgactggcgggaccggtggtgatcctgargtgagccataccaggtgtggcccagacttccgcatgcagcctgcccttgggtctcctggagtctcccctggtcgggagcctcagccttctggagactgacaccaccctcttactcagagacgaatcgttttgtcgttgccttcacctccctgaccacaagtgctccggggctctttctragggaggcagctgttctagscgggaggctggagtctcctgggcctggacgcaccccggggtgtgagtgatgggtatgcctgaaaggaggggaagtggcgcggctttaatcatctgggctagtccccggcgggcctgggggaacagggaaactggaggcggccttaaagcgtcaggatgagacatcgcaagaggagctgcagatactgagcgtgcgccccgggttctcgccgccttctctccgccgagcagcccttcggccaccctttgcccttaaaaatctgcagactgcgcctcctctscgcgggagcgagacctagcaggcccggggctgggcgtgccctcgcctgccacgctgcgcgctgccctcagccgggccgctggggccgtgcagtgcaccgggcacgccgcgccaggctgggggcaggcaccgagcctccgtgggaggtcccgaggcagcttcgcctgctcgccctggctccrgccctcacctgccgcagccttagctgagcagccgccgccactgggcgccccccgctccccacttcgccagcgcccgctcstcggctcggcccggggtagtttgtagggacgcagctctccacgtgcgcgactgcgaggctggacgctacgggctccyggaaaggaggtgggtgctccggagctagggctggggagctagaggttgggaggctttcatgggcaccagtggctcytgagcccccttascccctttctttctgcagcctcttgtacttaaatagctgttgattgaaaataatttcgtctggatgtgaccaccttctccggccctacgcatctggccgcaaaataaactttcagttcagccgcaggtgctgccttaatgggagtaaggggcatgytttatccacccaacatccgccccaggatcctgcagagctggcaaaagacaggtcgggtggccttcgaacaccaagcaccttcagatattccaggggaagggtcggggactgtttccccctcatctttcctccttcctgctctccatccctccatgctttcgtttctttgactgtctgcgaagggcttttsagcactctgccagtaactttgcttcttgttttggtctccttagatgcgttttcccggctgaagtttgctgctatccttgacaagtaacagcttgctgcagactagacgttcactcaaaaatgaaggcacagaaagataggaaaggaatgcaggaaaaccagcttggctaattttagcctgcattttgttgtaaggggaatcagcatctattgcctgaatgagtagtgttttgatcacccaagttaggaaaagaccttatatcagattgcccagtgaaataagcagtaaggaatcacctttaaaagttattttctttatatacaaaacattttaaataactagacttcacaattatagcatttaagaaattgtaaggatcttaaagtcgaacagttcaatgccaagttatgagtttgacgatgaaggggcatcttttgtctcctcactgcgcaagatttgtgttgatagaaatgcttagtaaaggctactgagaatttagttcacgtagtttgaggagttttctttcattttggcattgcaacattatcaaagtggtttcccagtgtggtgaataagagtttgaaatagaaaggcagacctggatttccacctgggctccagcatctaacttgctgtgtgacctcaggcaacttgcttcatctctctgaggctgagtttcctcatttctaaatgagattgctgagaggatgaaaaagggataacagaagacaggagttaacacagagcacatcatacagtcagtaggtaataaatgatacctgaagctgatgatgacagaggcaagcagttaggcctaatgcagtcactgagtggcactcctcatgcagagggttctgtgtggatctctgtgcatggggaggagatgcattgcatcgttgcatgcttctgactatagaaacataaggaacggctgggcgtggtggcccacgcctgtaatgccagcactttgggaggccaaggcaggtggatcacgagatcargagttcaagaccagcctggccagcatggtgaaaccctgtctctactaaaaatacaaaaattaaccgggcgtggtggcacacgcctgtaatctcagctacttgggaggctgargcagagaattgcttgaacccgggaggcagaggttgcagtgagctaagatcatgccactgcactccagcctgggtgacagagcaagactccatctcaaaaaaaacaaaaacaaaacaaaaacataaggagctacttctgaactcttgaatttcatcctcacccataaaatctgtcctaaatctgttcagatttgcagtattcaatttatctgtgtagcgtattttgagattctcttatgcttacaaatgagtcgtttcgaatgaacatgcagaacagatatgacactggttgtttaattattattaaaagtaatgttcctcggatattaccatcatccctggtttaatattgatctaaataggttgaagggaagaactgagtatacccacagaccagcaacatctggagcctgttaagaaatgtatggcccctccctagacctgctgaatagaatstgcattttaataggatccctgggggatttgtgtacaccctcagagaagccctttcttaggagtttgagtgcattgatgtttcttaaaaataggccttatgaaaacatgaatttctcataagctggctttacatagtaaagtgaaaaagactcattatcatttaaataatttttactttaaatgtttaaaacagccaggagcagtagcattatttctttctgtttaaaagtragagagaactgacatctcaagttttgtttcagttctgccaatttggattccagtgttccagttaccccctgaaacatttcagttgtgaacgttctttcctgctagcttctcccatgaggggaaaacgatgggtttgaaattcacatccctatctgtactttgaagagtgagctttttatatctgttactcctgtttttaaatcttttgccaaagatgtatccaaatttttaattggtgcatttataatcaatttttatatgacatagaacaataagtaaatcgaatacatggcaataattattaatgacctgtatctatatgtatttaargtaaaactatatattataatgactgaaatargaattattttgcttttttttattttttgagctttattatgggaagatatacatttttgtargaggaatgtaataatatacatatattaaagatattaaagataagaggctttaatggcatcctttttaaacatcaactttattgaagtataatttgcatacaacaaaatatgttgaactatagtatataaaatctgcgcattttattacatgcaaattataccttaataaaattgatttctttaaaagataatatggaagattgcctattgccagaatagttgagagaaggtcaaaagaagtcaatagagagaaaatgargattgaagcattgggtggacgaaggaaatacatagccaagtggtcttggagaagtgggtgaatggaaaaatgaagtatgtaaatttagatgatttgagaccatttttataaaactttttgtcttyaaagttaagatgccaaatttgatrtctggagcayctggaacyttgcagagtgttttgaagaggaggttacaatgaaaaacaaaacaaaaaagaaattttgctctgcaagtctactgacaagtcccgtttccttcccacattccaatctaygtctgcctttktgttcagcagacaccagcatttgccacaatgctgtcatccactgactttacatttgcttcctgggagcttgtggtccgcgttgaccatcccaatraagagcagcagaaagacgtcacactgagagtatctggagaccttcaygttggaggagtgatgctcaagttagtagaacagatcagtaagttactcttgctttayggtttctctgtattagaaaccctgtctgktgcatcaccactaatggctggtgtaggtttttctgatcatttatcttgtaatgccctggagrgcaatcccccacccctcatcccagaggagagaaagaaatagcccaggctgggtgccgtggctcacacctgtaatcccagcacttggggaggccaaggtgtgcggatcacctgaggtcaggagatcaagaacaggctggccaacatggcgaaaccccatccctactaaaaacacaaaaattagcctggcgtggcggtgggtgcatgtaatcccagctactcggaagcctgaggcaggagaatcgcttgaacccgggaggcgggggttgcagtgagccaagatcgtgccactgcactccagcttgggtgacagagcaagactcggtstcgggggaaaaaaaaaaaaaaccttgagtctttggtggcaagctaaatttcccagtaggtataatgctggacttcaacagggatgggacccattccaccrgtgacatctaatgtgactttaartagcttggcattagactactgggttaactctctgttaatacttgagagcttagtgataaattggtgctgaggagtttttcaacayttatccaccgtttactatgctccctgtttaaacaaagaaagaaatcttcagggttacactcttcaccttgtagcgtgtcagatgtcaacattatcaacctagaatttaataacattctattttctttgtgcttcttttgccttctatttaaggccttagatgcgggcttttcatttgctctagcaagatagtttttttttcagtccttattgactgacatataatatacatacagaaaaattcacttattataaacaaggcttcacttatcataaacagttcaatggattttcacaaagtcttgtaaccactcagatcacgaaatagaacatcagctgttccccacccaagccccataccccgacccctcccagtcaccactaccaaaggtaaccactgtcctgacttctaacaccacaggaatcattgcttgattttgaactttatacaaatgagattataaaggatatactcttacacattgactttctttcactcaacattatatctgtgagatttatccatactgttgcatattgttttggttcgttttcattaccatataatattccattgtatgaatatgccacaattatttatccatttacctcttaatggacatttgggttgtttacattttcatgcacttacagaaaaagctgctgtaacacctgtctttcagagatcatttctgttgggtggtatagttcagagaaaaaaaatgctgattcataaggttttccaaaatagttgtgccaatttatgcttctactaacagcattaagaggagcattttctggctgagagcagtggctcacgcctgtaatcccagcactttgggaggctgaggtgggtggatcacctgaggtcaggagttcaagaccagcctggccaacatggtgaaaccccatctctactaaaaatacaaaaatttcctgtaatcccagcactttggaaggctgaggtgggtggatcactgaggtcaggagttcaagaccagcctgaccaacatggtgaaaccacgtctctacaaaaaatacaaaaattagctgggcatggtggtgcgtgcctacaatcccagctactcaggaggctgaggcaggagaatcacttgaacacgggaggcagaggttgcagtgagctgagattacaccactgcactccagcctgggcaacagagtgagactccatctcaaaaaaaaaaaaaaaattaractgacatggtggtgcgcacctgtaatcccagctacttgggaggctgaggcaggagaatcgcttgaacccaggaggcagaagttgcagtgagccgagatcatgccactgcactccagcctgggcaacagagtgagactctgtctcaaaaaaaaagagtttctaatttaaaagagaaagaaaaaatcatttaaagaaaaataagaaaacaaagatactggtaactcttcattttgcaaaataaaagattgaaaattgactccaatattgatgaagggtaaagattctattttaatgccaacgttaaaggaggggaaagattgacatyggtgctaacattgaaagggagaaaatattttaactctgacttcaatttggacactttggatatggtggtactgataaagagttggagattactgagaagaatgaaatgtcagttgtacagtacttctgtgtggactttgattggargctattgctactcccttgtgacacagtggtataaggatacatttctataagagaaataatcttgattaaacaaagtcagatgctttctcagaaagggccatggcacagagattttagcgaacagaactttagcattcattgtgaacacatttttatgtttcttttcctccacggtatctaaatgtaaatgatggtaagatttagtccctattttccatttttttttttttgagacagagatttgctcttgttgcccaarctgtaatataatggtgtgacctcggctcattacaatctccacytcccgggttcaagtgattctcctgcctcagcctctggagtagctgggattaacaggtgcgcaccaccacacctggctaatttttgtatttttagtagagacagggtttygccatgtaggccgggctggtctcgaactcctgacctcaggtgatcgcttgcatcagcctcccaaagtgctgagattacaggtgtgagctacagcaccygaccctattattttttctttttcttttttaattattttatctttaaakttttttatttgatttaattttttaaatgttttttattttactttaagttctgggatacatgtgcagaacatgcaggtgtgttatatacgtatacatgtaccatgatggtttgctgtcccatcaaccctgtcatctacattaggtattttgcctaatgccatcccagtccctattttttccctggagactttggaaagaagccaaaagttgttaagccttgaattgtaaaaggccatgaggagctggagatcagttgttggtttccattttcgcacacaatgaaattgactctgcagctccagraccctccaagctgggccctctctcattttacttaattgtgctttcatttttrcagatatatcccaagactggtcagactttgctctttggtgggaacagaagcattgctggcttytgaaaacccactggaccctggacaaatatggggtccaggcagatgcaaagcttctcttcacccctcagcataaaatgctgcgccttcgtctgccgaatttgaagatggtgaggttgcgagtcagcttctcagctgtggtttttaaagctgtcagtgatatctgcaaaatcctgagtaagtacccaggaaaggcccctgtgccctgtagactcttgcaaagctagacaggaaaattatgtgtgcattctgcctacttcaagtaattgctacagaacactcacctattaggaagcamatgtttaagcccttctgggtattgcagccatttaagtggagttaagccaagtggaacattattggcataaatcaggtacatctccacaaagcttaaaactattccaaaagagatttgttaatagacaagataaaccactaagattgccccccaaaatttattgatccaagctatactcaaacattattgtacagtatttaagatttaaagagttgtattaaatacttaatcaccatagagctatgtgtctttattgtttttgagataatggtgttccaaagtcttaattgcttaagacctggctcaagtaaataactctgcccataaaaatcacttatgaagtgattaagcagaaaagtacacttaattgtgaatttaaacctaattatttatagatttggtatcctataatttaacagtcgtaaagacaacactacccaaaccaatttttctttataaaactccataaagggaaggaaacaccccatgaaggtattctcattttataatttttgaaagtattataggtgtattcattggttccaaaaccaaaaatcaacatttgaacccagaatagrtaatatatagtgatatatagtgagtaatctatttttcccattaaaccataaactattcactcattcagcaaatatttattgagcacytactgtgtcccaggcattgtggtgagtgctagggatatagtagcaatacagagctaaaatccctgccacctggagcttacattttagcaggcagagacagacactaaccaataaatgtaaatgtaacaaattttaaaatataaatggaacaagttaaaaaagaatataagaggttaaaatgggatggatagtaccccaaaaaagagaaaaagtatgagcaggattgggaatgccagggttgggcagtgggggctggtatggtatatgaagyarggtgagagcagaaaccgtttcytgagcatctctgcattcctcactccagtcacartgcytagcatacaataactgttgagtgaacaaatgaatggaaactttcattacagaatgtaagttgcagtcttgtccctggtgtgcaaatggcaagcatgaggacaccttgtgtttttggtaatattctaatgaggatttgaaagcaaagtaaatgattacataaaatagtatattgcatacaccacagtggactggaagcacacatcacmgctgakaccaaaaatgtaaagttttcaagtaaacagaagcagtcagatgttctcttttcctgattatctctttgtaatagttttaaaggctcagcgtggcatttctaatcattgcattttatatcttatcaattgaagtgaaatcaaatgcagcagtttagtggtttttcccttgaagaacagaaaagacacaaatcttaaccttgaagatacaggtgtttctgtttcattgttttgcttttagtgctcacagtgaaattttttattcatgaccgagtttgtgtataaattatgcatttggaatggtcacacgtgtgttgcaacctgacaatccttggctgctggggagagtcaagctaaactgctaggctcagtctcaacactgagcagtatatgaacgaaatgatgagagaacttaatggaatcagtgcacttaccttcaacaaagctgctcagaaactaaaagtccaaattaattggtttttacstggaatgatmgccactagtgtagttaaaggttatcagcaattctgatcagcaattataaatatatttgattaatgggagaaatggggattaccatagtttcagttcccagaagaagaccctgagataaggattcaagtacaaatagtttatttgggaggtgatgccaggaaatactgttggggacagggaagtaagactgaaaagagaagagtgtcaccaatcaggttacacttcagcagctggtgacccctgggagacagtgtagacacagcctcagggtaaggatgtttatgcagcaccctggatagtcactgaaggttgctcttggggagcattaattcccggaatatgtgggctgttgcagtgcagaccctggtgagccatcagagcaaagcctctggcagaaagatgcatggtctagattccrccagaagccaggtgtgctgaaatggtgaggaccaagaagaaatgggcagggcatgagggtgtcaccacagggataaaatgagctgatgggcaatgtgtaaaagaaagacgttcaagatctgtgatctataaagaaaaaaggaagcaggacctttgtyggttgtttaaaaaactggaaaaaggaaagggagagggagcaaggaagggaagtctattagttcattttcatgctgctgataaagacatatctgagactgggcaatttacaaaagaaagaagtttaatggacttacagttccacatggctggggaggcctcacaatcatggmggaaggcaaggaggagcaagtcacgtcttacatggatggcagcaggcaaagagagagcttgtgcggggaaacaccctataaaaccatcagatctcatgagacttattcactatcatgagaacagcacaggaaagacctgcccccatgattcaattacctcccactgggcccctctgacaacacatgggaattcaagatgagatttgggtggagacacatccaaaccatatcaggaagaaaggggagagggaggtaaagttggtgrtaaataggtaacaagaatagcataatgctagtaatgactgaagctggggagcccatgaaggggacattataccattccctttgctttagatacatttgaaatatttttataataatttttctaacyagaaatttcactagactgaatctccctccaccgttttctccccccacctactttggaggtctctgttcccctttccccttctgtttcttcaaaagggatgcagtttagtcccatttacttttcagaaatttcctgagaaatgattttaaatgcacaaaatgaccctgagtcttagaaggagttttctttttactttttcttcatttttaaaaaatatttatttctagatattagaagatcagaagagctttccttgttaaagccgtctggtgactattttaagaagaagaagaaaaaagacaaaaataataaggaacccayaattgaagatattctaaacctggagagttctccaacagcttcaggttcatcaggtaagacttgttacaggtgttttgttgtttgaaygtacagtaaaactcaagagagaaatatatctctcctcccacccccaccaaacaaaggagaaataaaattgcagaactgatgtgatgaggaaaggctatctagtcaagtttagaattaacagaaatgtgtttcagactttttttcatcaagcatgtttaataactcattacttgaattgtatatctgatgttgccaatgaatgcaaaattttagtaccactgaccacaaatttgggataaaagagtgatatttagaaaacaggtaactggctggtcacggtgcctcatgcytgtaatcccagcactttgggaggctgaggtgggtggatcacttgagctcagaagtttgagaccagcctgggcaatatggtgagacyccatctccattaaaaatacaaaaaataaataaataaataacctgggcatgctgctgcatgcttgtggtcccagctactcagaaggctgagatgggaggattgcttgagccctgagggtggaagttgcggtgtgccaagattgtgccactgcactcaggctrggtgacagagcaagaccctgtctcaaaaaaaaaaaaagaaaagaaaaaagataagttaaatcactcaaatacacttctctcttcatgattctatcattgtgtgattctttcctgaattcagttttttatggggcatgcaagaggagggcaggtgaaaattctggaggagaagcatccttttctttttatatcaaaacwatcaaatctctagcttgcttgcaagattgagggctttctttcttcattttttgtttgtttgttttgttttgtttttttagacagagtcttgctctgtcacccaagctggagtgcagtggcacaatctcggctcattgcagcctctgcctcccgggctcaagtgattctcatgcctcagcctcctgagtagctggaattacaggtgtgcaccatcacacttggctaatttttgtatttttagtagagacagggttttgccatgttggccaggctggtctcaaactcctggcctcaagtgatccgcctgcctcagccacccaaaatgctgggattacaggmatgagccaccacacccggccaagattgagggctttcttgcatagtgtattccaatgaaaagaacaaattgtacaaattagagccagctgatttataaatcatcagcctactgaattcttaaaattggcaagtcctgctatttgtttaaggggctacctgaaacatattgggtacatgcattctatgaggtctccagttctctaatagtgccaagactcctactgaaataggaaaactgtgaattattagaaaagaggtggtctccattagccgggtgtggtggctcatgcctgtaattccagctattcaggaggctcagacaggagagtcacttgaacctgggaggttgaggttgcagtgagccaggatcacaccacagcactccagcctgggcgacagagtgagactccgtctaaaaaacaaaagaaagaaaagaggtggtccccaatgtttgtccctgttgatttttgaaggcttttacatatttgagttccaaggcttttgaggagctgaatttacagataagaccattacctgtgtattactaatctctgtaccatcatgatccatattattttttgggttttgtttgtttgtttgtttgttttttgagatgaagtcttgctatgttgccctggctggtctcaaactcctaggctcaaacaattctccaacctcagcctcccaagtagctaggattatagacgygggccacagtgcccagcttgacttatattattttaaatggtgccaaatttaaagtcaaaactcattttagtgtaagtaatgttaatattttcttgaagatttatatccctggattctcatatcatrgttcttgmtccccctgccttgcagtaagtcctggtttatacagtaaaaccatgacccctatatatgaccccatcaatggaacaccagcatcatccaccatgacttggttcagtgacagccctttgacggaacaaaactgcagcatcctcgcattcagccaacccccccagtccccagaagcacttgcggatatgtaccagcctcggtctctggttgataaagccaagctcaatgcagggtaaggacacggctccttttacttctctctgagctagtgccgacacagtaagagatgggatgtcaygtttcattttcaagttggtaggcctagggattgtgctttatttgcaaaagttagtgctgattttagcaacaaaggggaaaaattcagcctttggtcatttcagtatatttaaagtgtgcctaaatttacatgtttgggtaactcagtagatttactatctgtgaatactaattctttaccactacagatatgcaaagtatattttgtgggatgtagggtagttaataagtgtgttggtccccatgggccagtgggrtaaatccaargtgacccaccaggcttacattgtcttttgtagaatgtcactcttctcttttttttttttttttgagatggagttttgctcttgttgcccaggctggagtgcaatggcgcaatctcagctcaccacaatctctgcccccctgggttcaagcaattctcctgcctcagctttctgagtagctgggattacaggcatgcgccaccatgcccagctaaatttgtatttttttagtmgagattgggtttctccatgttggtcaggctggtctcgaactcctgacctcaggtaatctgcccaccttggcctcccaaagtgctgggattacaggcatgagccaccgcgcccagctgtcgctcttctctttaggcattctaatgagcaacttccttgagctctgtttgaaatggtctcagaaaatacacccaaactatttctgaaactaccatttctgttgttccccattgcctaccagataaagtcaaactcgtcaacagcattcaccttcctagaagatctggccccaacaggtgtctccgtgtcctcccatgctcccatggccccgtgccgcctgggtgcacactcattctttctgtcactgcctcacctccaggaccattcccctttaccaactgttcagtccctacctgtcatttaaggcccarccacatgctgtctcctgctcaagtattaccttcaagatcggccccctccttgtagctctgtcctgacactttgctcactccaacatcacattgtccctttatttgaggcttggtctcccccagcagactgtcaactcttttaggatggtgatttygtgttggtcatcctctttccccagtttttatttctcaactctagaactctactatrcattgtacaggaacccctagccacatgtggatatctaaatgtggacaggattttaaattaattaaaattaaaatgtggcactaacagccacattcagctggggctaatgcatcagacagcacagatatgaatatttctctcattgcagaaagttctagacagtaatacagagctggcattggggcaaaycatctggtaaaaggagaagtggtgcaggtagtcaggacgtatggattctcaagctggccccataaccaagcctgtgactttttttttttttttttgagacagagtctctgttgcctaggctggagtgcaatggcatgatctcggctcactgcaacctccacctcccgggttcaaacaattttcctgcctgcctcagcctcccaagtagctgagattacagccatgtgccacaacacctggctaatttttgcgtttttagtrgagacagggtttcaccatgttgcccaggctggtctcaaactcctgacctcaggtgattcacccgccttggcctcccaaggtgctggaattacaggtatgagtccccgcaccctgctgaggcctgtgatctttaaggatgatctaatgtcactcagactaagtctctttgtctacaaagctgagataataagaactgccctggccccttcattggattactttagagtatccatgagaaaaaaatctataaagcactttgaagactgtaagataaaatgcaaatataagctattattatgtgcttactgattttttgttatacaggttcagtatcccttatccaaaaygcttgagaccagaagtgttttgaatttcagaatttgttttttacactttttcaggtttggggatatttgcattatactcaccagttgagcatccctaatccaaaattctgaaattcaaaatgcttcagcgaggccgtgcacagtggcccacgcctgtaatcccagcacattgggaggccaaggcaggcagatcacctgaggtcaggggttcaagactagcctggccaacatggcaaaaccccctctctactgaaaataaaaaatttagccgggcatggtggcatgcacctgtagccccagctactcgtgaggctgaggcaagagaatcgcttgaacctgggaggcagaggctgcagtgagccgagactgcaccactgcactaaagcctargtgatagagcaagactctggctcaaaaacaaaacaaaacaaagcagaacaaaatgcttcagtgagcatttcctttgagcctcaggtcagtgctcagaaagtgtcagattttggagaatttcagattttcaaattagtgatactcaatctgtattacataccctgattttgttcaaggatatatatatgtagtatataatatatgacataataatataatggatatatatgtaaaattgactggcttctaaaactcatgctgtcattttctagttggctagactcctcacgctcccttatggaacaaggcatccaagaggatgagcagctgctcttacgatttaaatattattctttcttcgacttgaatcctaaagtaagcaactttttctcttttgtctttctctttttaatatgaatgcatgaaaggataaaatggaggcatttgcttatgaaaattaggatgaatttatttgtgtgatcgcctgtttagccctgcagggtgagactgatacatggaccctggtctctgaatttttatcctttggtygctactgagcacagtaagctgctaccaaattagccggagtctctraggatctttgcgcctagcgtggcatgcactgcccccctccatttgcaggaatggtcaaacaagatgggagtggctcagagagctggagttcttttttttttttttttttttttggktgagacagagtcttgctctgtcacccaggctggagtgcagtggcacgatcttggctgactgcaacctccacctcccgggttcaagcgattcttttgcctcagcctcctgagtagctggaactacaggctcatgcaaccatgcccagctaatttttatgtttttagtaaagacggggtttcactatattggccaggttggtctcraactactgacctcatgatcctcccacctcggcctcccaaagtgctgggattacaggcatgagccatcgcatctggccagaactgaagttcttaatgctgaggaaggaaaggagttgtcagaggtcaggtttaaaggcaggttcccatgaacaagctaggatcacatgatggtgcacataggactccacactccagtgcttgcttactctttggaactgagggaaagggatcatctatgtaatgcctttttctcacctggtcacccagctggtcaccaattctattttcactgcacatctccccctgaagtctattagaataacaaatgaggggtgagataagtcctttgaacttctgcctcttccttscttctgatgagcccttttgaagagctgagagtcagcggtacaatggcccagtgtcgacgatataaactggatgactggtcctctgagtgcgcagggtcactgtgttgcaygctcccatcactgttttgtgcctgttgctcttttccatttactgccagacacttggaggagcttgccttggtcagcctttctgtacagaccctttctcatctacaccagcatttccacctcttgtaagaggcactgtcttcttcttggtcctgactttaggtctggtctgcaaaggctcacctcagcttccactgtttccccaactgccatcttcaaaacaaaycttgtcccttgtcatttctaaggagaggttcctgctcagtccttgatttttatcctgtggaccaagcttgtgtctggaatgcataagtgaatcatggcaaaagggcaaattttggcttttcttcgataaaatctccaggagaaattactgtactgcttctcctacrcaattggcttggcttttttttaactctactgtgaatttgcaactgtccaggttttttgtttttgtttttgttttttcattgcctgctaaaaccaaatccatacttttttgtgattttatatttaagcctcattcatgactcaactttagcatttccttgcttaactcttaatttaagctatcttgttgtatgccatctattctaataaactgccttacattttttctgaaaatagataacacatacataaaatatgcccatgcattttccagttactaagtcagtaatttggtcccatcttatctattcaaatctgtgccccatctgttgtttgtttgtgtgtttatttattgagcaactactgtaggccaagaactaagctgggtactgagaactcaaaactgttgtatattaaaataatgttttcaaattaatgagataaaatacataggactacaaaatgaaacasttatattaaactgtagtagccaaaccctttttgaaaatgtatatagtaatatatttttagttaattgaataaagaagatttgtagttctcataaccaccataatttcaaagtagtgatgtgggtgagccttgcttgaagacagcagcaacaactggcatacagaaggaacaaaatcttgattctggtggtcacagagtgacaagtactctgcaatgctgtggtttagcatcctgagaggaaatgctaaatttccattcgaagtcgatgcaattggagaggttgtgtttcctcatacaagcttgtggaccacctgataatcaaacttccaagtctgagaaccccagaatcagaaccctgctctgagaccacattcaggttccactctttccagaaaggagcttttctctactctcggtcacatgggcctttgccttctctgagccacagctgagtactgtacaatttcaggactcactcctctaatcacaccacatctgtggatttttttctacaaatagacaatcaagtccttggagacagagactgcatctggtactttctttgcccctcaccccacacgctgtgagtcaggctttcccagttcaggcacctgatggatgataggatcactcagcccaaggactcatagggtcyttggggacccttccagcagtttctttgccaagagactcccccgattcaatccsctgcttcagaactaagcttgagctaaaaagaatgcagctgagtcatctgccccctgaaaaaccattaggaacatgtaagtgacttcacagtcaaataagccagataatggcagatcattggtataaatatagaggagcagggttaaatatgtatttgtctaaaaagtggaagaaatcaaacgaatcgtactccaraaggggacaaggacactgaagctgagggtcacaagggctgttgtctctggctctttggcctccagcctctgcccgcttaattggtgaggagctccctcttcatagcctaaaaagtgaaaccgatttgaatctaacagccacacagaaactgtcaacccaaaggtgacaggaagactcaggatartgggacatggcattggaggacactgtgatcctcaaccactttagtacttatggcagtattcccttccccctctctcaaaattatgagtgctatagataaaatcaagtttaagactcctactctgtgctgcataaatagagggatatagaaattttagatgtaatttgtgttctcgtggcagctacaatcaaatctaagaagaagaaagarcacccatgaagccactgcaaatttacaaggcaccctacaagtagaaactaaaatctacagtgaggactagagagcttctctggctttcagagagattcakactggccacaggtccttagtaacaggtgctgattaaaatctcagatacgtaaaatgctagaattcaacatttcaaaaataatagactcagccgggcgcaggggctcatgcctgtaatcacagtactttgggaggctgaggcgggtggatcgcytgaggttagaagttcgagactagcctggccaacatggtgaaaccccatctctactaaaaatacaaaaattagccaggcatgatggcatgtgcctgcaatcccagctacttgggagaacgaggcaggagaatcacttgaacccgggaagcagaggttgcagtgagccgagatcatgctgttgcactacagcctgggcaatgagagcaaaactctgtctcaaaaaataaataaaataataataataataatagactcaaaaaatgaagaatccagaaaagattggtacattttaataaaaaatgaaaattktacatctggccaaaaaaaaaaaaaaaaactataacaaagtaaaagtctttacaacacatactacaaacaaaagatgaatttctctaatatgtaaagagctcctaaaaatcagtaataagaagaccaacaacccagaagactaatgagcaaaggatgtaaatatatagttcatagaaaatgaactacaatgctttacagtggcaaagatcaaaaagttacatactatcttggcaagagtgtcaggaaatgggctctgtcatagactgcttgcaggtcaaagtataaattagtctatagasggcaatttggcagtatcagaattacagttctacatagctttgattcagcaaatccactcctaggtgtttatagcacagttatactcacacatgcaaactgacatgtaggtatacaggggcggttattatattgttttaggaaaagactggaaaccacctaaatgtccatagctacagaattggttaaatacattatgatacattcataccatattgtttttaaaaagaatgaatcagctcttttttgatatgaaacagactccaggtgcattattaaaagatgcaaaacagcccatagagaaactaccatttccagggaacaaggtagagagggggactaactttttattgaacactcttttgtccctttcaaattcattcataatgaattcatttatcacayaccttttgcccctttttaaatgtgttcaaaatttgtgaattaaaaaaacacacattttagaactctgatagttcatagtattttagtgttcagtacaggaaaagcacatctgttctaaaaagaggcttggaagatactgaaagctgctcctgggccaatagagaatcttaaataattagatctaaatagtamccccttcttaagaaagagcaagaaaactatgctaagtaggttttgttatttatttktattgttggttgttggaatgatggacgagggtggagggtttactgaactgactagacagggagaaacagggattcaaggagtgaaggagtggagaggtggcagaactcatgtggtttccagcttgaggtttctattttcttttyttttttttttttttttttttttcttgagacacagtttcactctgtcacctaggctggggtacagtggcacgatcttggctcaatgcaacctctgcctcccaggttcaagcgattctcctgcctcagcctcccgagtagctgggactacaggcatgcaccaccacgcccagctaatttttgtatttttagtagagatggggtttcaccatgttggccaggctggtcccaaactcctgacctcaagagatcctcctgcctcagcctcccaaagtgctgggattacaggcttgagccaccgtgcccatctctattttcaattaagcaaagaaaagggccaaggagagggtatgagtagccaaccccaccaaggaaaaaatttgtttctaagtcactggagaacccactgaaagagttctcggggtgggggtattggggggaagtcctataggatgcctgtcaatgacctgtgaaagatctggaacattgtgatgcagcattgtctctggagaaatgggaacaggcctccagagagggaactcccagctactagggaggctgaggcaggagtattgctggagcccaggagttcgaggctgcagtgagctatgattgcaccactgcactacaccctgcatgacagggtgagaccgtgcctctaaaaaacagtaggcggatggttaagatggtaaatattatgttacatatattttaccacaattaaattaattttttaaaactcaaacatagggcgggcacagtggctcacgcctgtaatcccagcactttgggaggctgaggcaggtggattgtctgaggtcaggagtttgagaccagccttggcagcatggtgaaatcctgtctctactaaaaatacaaaaaaaattagcggagcatggaggcgggctcgtgtaatcccagctactcgggaagctgaggcaggagaatcacttgaacctgggaggcagaggttgcagtgagctgagatcgcgccattgcactccagcmtgggcaacagagcaagagtccatctcaaaaataaataaacaaacaaacataataagaaagaaattatttagagtaaaaatggaaaacagttctgtatcatgaccattctcctaagaggcagccacagttagcttcatgaccaaccatccttgcagacttgtttagacatgtttacaaacatatttttgaatagattttcaagactttgtgttccctagataagtaggatcatttgttttctctgtagcttgcttctttttacttcaaaacatatcatggctatctttcatgtcagtataagtaagtcagactcactttttttaaccactgaaaaaaaatcaaaggaaaggctaaataaactgtagtttatcaggacctaagtgtgctgaacattcttgtaaaagtatctcgcaagtgcttgcatttctttggaacagtaacactggatgtgcttatcaaagggcaaaacgatactaaaagcttaaagctttatgtcaccaaattacctttctactaacggcatctgtgaaagggytgatatccccacatcctcaccaacatcaaacattatcagtatttgtaatgtaggtagatgtgataggaaaatggaaattaggtcatcttgttttcgtttgaattctctagtaattagtgagattgagcatcttttccaatgtttttatggccattttgctttcttctgtgaactacctgtttatatatttgccacaaactctattaaattatttatatgtttcatatgatttataggagtactgtgtatatgatggacatcattttttatatttattacaaayttttttaattattcaaatatttcaaatattttttcaatctgtatcctatattttataaatttgtaaccttctttaggatattttttaccattaaaaatgtttaattttaggttgtcaagccagccttatgcatcacaacttttaggcctcttgtcttgcttagaatagacttccccatttaaagattacagaaagtattccctcatgtgtccatctaataatagtcatggtttttctgtttagctgttttataatagctttttgagayataatttacatgccatacatttacctgtttaatatgtacaattcagtggtttttagtatattcagagttgtgcaaccattaaccaccatctaatttcagaacattttcatcacygcagtaagaaactccatacccattagcggtcactccccagttccctcctaccctcccagccctgagtaatcatcagtctgttttctgtctctgtggatttgcctattctggaaacttcctataagtggaattacacaaaaygtggtactttatgaataatttttttcayttagcatagtattttcagaattcattcattcattcctattgtagcatgtatcatattttatgtctttttaatgctaactaatatttccttgtttatgtatactacattcattcatcaaycaatgaacatttggattgttttcactgtttgactattatgaataatactgccatgaatattcatgtatacatttgggattttttctttgacttttttattgtaaaatatacataatgtttatcattttaaccatttttagatgtacaattcagtagcattaaggatagtcacagtgttgtgcaactattaccactatccattttctctctyttttttttttttctgagatagtctctctctgtcacccaggctgtgatcatagctccctgtagcctcaaactcctgggctcaagcaatcctcccacctcagcctcctgagtagctggaacaagtgcatgccaccatgcctggataattttttttttttttttttttttagaaacagtgactcatcatgttgcctagggtggtcttgaattcctggcctcaggcaatcctcctgcctcaacctcccaagtcgctgggactagtgacaagagccacttttttaaaaaaatagagacaagagtcttgctacattgcccaggttgggccactgtccattttcaaaactttcttaccatcccaaaaagaaagtctgtacctattaaacaataattctccattgccttctctcttttgcccctggtaatctctattctactttctgtctttatgaatttgcctattctagatagtttatataagtgaagtcatccagtatttgtttttttgtatttggcttatttcacttagcatagcatcttcaagcttcattcatattgtatcaagtatcagaatttaattcctttttttttttttttcgagacagtctcactcttgttgcccaggctagagtgcagtgctgcaatcttggctcactgaaacctctgcctcccaggttcaagtgattctcccacctcaccctcccccaagtagctgggattacatgcacctgccaccatgcctggctaatttttgtatttttagtagagacggggtttcaccatgttggccaggcgtgtctcaaactcctgacctcaagtgatctgcccacctctgcctcccaaagtgctgggattacaggtgtgagccactgtgcccagccagaatttcattcctttttaaggctgaatagcrttctattgtatgtggacagcacattttatttatccattctgctgtttctaccttttggctattatgaatattgctgctgtaaacattgttgtacaagtatgtgtttggatgccactttcagtttgtttgggtgtacagctaggagtaggattgatggattatattctatgtttaactttttaaagaactgccaaacttttctacagaggctgcatcattttacacctagcagtgcacaagggctccaatttctccacagcctcaccaacactggttattacctgtcttttagataagagccattctagtaggtgtgaagtagtatcttattgtggttttatatgtttaaattatttaatccatctgtaatttatatttttggatagtgtaaagttattttttgtttcaatttgtgttccaagtggctaggcattttcaacactgtttatagtgttgaattcttccttcccctgctggtgtaaaatgtcatttttatattttaatataaaattaatattttatattaaatttatatacatatataagtctgtttctagataaggctttattgatactttatcaatcattacaccagtaccataccattttaattactgcaactttataataggttttaatatctgggaggagaagtgctttactcmacattgttctttttcaatttcttggcaatatttgaacattatgtcttccaccagcctcaacttgagaatcagcttgtataaagtttcatttaaaaaatcctatcggattctgcttgggattgcactgggcttgcagatcagcatggggatcccttctattacactgtttactwattacactgtttatcatataaaccatttttactatctattactaccaatatgtagtaataaaagagagagraaataatggaatcaaatttgggttgtgaagaagcagcagcagccctrgaagtaaaatgggccagagggccaggcgcagtggctcacgcctgtaattccagcactttgtggggctgagatgggtaggtcgtttgagcacaggagttygagaccagcctgggcaacatggcgaaaccatctctacaaaaaaacacaaacattagccaggtgtggtggcacatgcctgtagtcccagctacttgggaggctggggcacaagaattgcatgaacccaggaggcggacgttgcagtgagccaagattgcactactgtactccagcctaggcgacagagtgagaccctgtctcaaaaaaataaaaaattaaaaaaaaaaaaactttaaaaaaaaagtgctgagtatatggcacaatagaagtattcctttcacttacctgagctgaagtttgctgcatctgattaacagagaatggcctcagttgtttcagaatctttgtattgygggatataaatatacctcattacacacacacctctgtttttgtctctagtatgatgctgtccgaataaaccaactctatgagcaagccaggtgggccattctcttagaagaaattgattgcacagaggaagaaatgttgatctttgcagctctacaggtatgggaacttcagtaccttttctctggaaggagacaaaccaagtttgttctgcttgaagtttcatatgcttcatactggtttttttttgttctttgaagaaatatctgaaaataaggagagcaattgttttctgtattttttattttgctttcttcttcagaccagaacaaatttttaatttaaaatgctcctcataatccacacacgctcacatcctctgtaagacactagtcttgcaattattatctcttccctactgtkagcacaatcagtgatgagaaagagccagttgtaacatgactaaccatgaacctcagaacgattcaggttaaaatgtcattttccccacacgggaaggagacctctgtttaggagatgttcagtattccaagggaatagtcctcaaagaaaaaaatggctaatggattcatttatatttatracatttctgtttataacatttctaaaacgtctgttttcattttagtaccacattagcaaactgtcgttgtctgctgaaacacaggattttgcaggcgagtccgaggttgatgaaatagaagcggcgctttctaatttggaagtaaccctagaaggtggaaaagcrgacagccttttggtatgaactttttctgatcacccagaactgtggctttcttctgattgmcaagtataaatgaacttttctttattagaagagaatatttcatctgattttgaaaaaaaaaaaaaaaaaaagatgctcttcacctaacaagcttcaacctagtgaactaacttttcatgggttagctccacaaggkactatattttcatctctactaatgacaatacttttgtgttatatttcttcctagaggtaagttggcatggtgtgaaggagccactgctgagggctccacttcactagcatggaatgtggacttggtccctaaacttaagtctagaaaataccaccctgtctattacatggagcagctgtgagaatagaataaagaaaattgtttccttttttcttttttctgagacaakcagtagtgcaatcaaggctcactgcagcctcagcctcctgggctcaagcagtcctcccatctcagcctccrgagtagctgggactacagacacacactactgtgcctggctaatttttgtattttttgtagagacaaggtttgccatattccccaggctggtctctaactccagggctcaagygactctcccacctcagcatcccaaagtgttgmgattacaggcatgagccactgtgaccggccaagaaaattctttaccgataaaaaccttatttctatttacttggtcatccatttcaaccagacaagcttgaccaaagttgtggcctttttcyggaacattgcaaaaagtttctgaatgcttttgacttcaggagacaaacgaaaaccctccaataaaacaaagaaaactgttttgtcatctctttctccttatccatgaaaggtgaatgtcagctttataactgaaatgcccctcctgtttaattcactcatgaggtgccacacttttgtttaacttcggccatgggaataattattaatcacattgaatcagagaggtgggtccaccataattagatgtaagcagtaatcatggattagaattagttactatattcttctgcattcaatgtatgttctcttatcattaaatgtcctaaaataagaaactggtctcattcaggagcaaatacttcgtgcaaactaaacgccaagattctgtagagatgcagggccctgtgtcacgtttatagaagacataggccccatgaacttggagttctctgttgtctactttctccgctgaataaatacaacaggaaagtaattctttttagaataaataaaaagttatgtcctccctcccttaatagttttacgtgatgctaacaataggcttttcagtttgaaaacaggcaccagcctacattacagaatgaactttgaacaaggttcactttgaaagtttaatcagtgacctaggtgtagcaggagttacccactctwatataaaaattataaaatcttttgtttgcatataaaagtagtcatttctaattcagatttttaacttgaatgatagttatagggagtacttgatccactttttcatttttttcatctcgtttttcatttttgtaatctacgacacaaacagaaaagtgaaaaatacacatatgtacagcttaacaaattagtattcaattgtcacccaagtcaccacygaaatcaagaaacagaactttgccagccacctaggggacctcaacagggcccccattctcctcccaatcctccttactcccacacccagttaactatcagaaatgtagcgagtgtaaactgaagaactgagtttttcattttatttaatttgaattaattcaaatttaaataggcacatatagcaagggactgccatattagacagtgcaggttgagtatcagcatcacttatgaagttcctgcttttgaaactttatttgttttttcttaggaggacattactgatatccctaaacttgcagataatctcaaattatttaggtaagtaaacttttatggggaaaaggagttactcataacaaagtcttgaagataaagagtgcaggagtttaaattrtatatccctgaggcaggttcatggttcaaaggtaaaatgtgcgctttgccatsagacaaacaatgggttgagtcgtagctctaccacacacaccagctaggtgaccttgagcaatatattatgtctctgagcctccattttccaatctataaaatgggaatatacctccccttgggcttgttgggaggattcaatgaaataatgcatatgaagcactgagcgtggtacctggttcatagtacatgctcagtgaatggcagcgtgaaccctcagtgaatggctgggttcacatcagcaataataaacacatccgccatactagagcttctagyaggttccatctgggaggctcagtacgctgataccatttgaaggcttataatttaaaagccatttctctctagaactttgatcctgggctyacagagagtagtcaccttagtttatctacctgtttaagtacttctgataaactcctccatcacctcaggttgacctgaaactgctaaaaaggcagagaaggagttttatttttycatggaaataatgaactgccacctctgcaatggtgccagcgtatgttargttgaaagaaacaaggctctttgaagtcctgtcagttccttatttcactttrtggtttgttgacttttcttaaccaacgggcacttcactggggcagttggctttaaaggaaacacaagttgcttttgataacacatgatgcaaagaaagaattagaaagaatgagcaatgaagccggtataaatgacaaacaagtgtccaaaggtaacaatatttgtcactgggtttctacaggtatggttttggggatttcttactgtgattgtaggatgtggtcgcaaacaatagggtcattcttttttcytcttcttcttctttttttgagacagagtctcactctattacccaggctagagtgcaatggtgtgatctcagctcactgcaacctccayctcctgggttgaagcaattctcccaccttagcctcccgagtagctgggattacaggtgcccatcatcacgcctggctacattttgtatttttgtagagacaggatttcaccatgttggccaggctggttttgaactcctgacctcaggtgatccgcctgccttggcctcccaaagtgctgggattacaggcgtgagccaccacgcccggtcagggtcattcatttaacttccctggcataaatggttgtaaccacatttcactcatattgttataatcagagctacaggaaaaaagtaacaatttgaatccacaagtacatcttaataaagtattcataattgttccacaaaaaaatgagttgccacattctctgtagagggcaaatcaagcccctcatgaaccaaatggtgactgtagccttcctatagatgtttctgatgaagaaagtgatgctggagttgaatccatatcacttatgctaccctgaactgtcacaggctttcggtgtgacttatactctcaaaattgccctcatatttggccagtggatactatctaargtctcaagatgttgcattgaatatataatatagttcatggaaagaagaaacaaatgaaggaaggagagagagctcgtaggagggaagaggggagggagattcgagagtggaactctattcctggtaaggtgggacctctaataggcccttcatttccctagaccttctttcctcatcagtactaagagcattgaactaatcctttgatttttaagttctttctattacagtgaagctctttttttatttaaaaaaatctattaaatttatcatataaatagtggacttcagtttctagcaacagggtatcagctctaatgcaaactcttatcttgctatgaatacatatgcatgctagataaaataaaagaattataaatacagaattaatcatgaagtgaaacagaaatgccaacttacaggaaatgaggcaggaatctagttctacaaacgcagcatcagccacacagaggaatttagggaatagagacaggttgtcatggtttgaggctaggattttaattcccatgtagggatagaagatgaacctttcagtcctgtgtgaagcaggaagtgagaactgaagcgcctscctaaaggtggaaatgagcaaaggctgcccttctgttgaatgaaaaatagaaaaactacccattagccaaagaaagcagkaaggaagttcatccttgcatggggttctgtgtggaaatgaaaagtatctcttgagaaatcagagccaaggctgtgtcacacacagatgtagatataattttttttttttgagacaaagtctcgttctgtcacccaagatggagtgcagtgacgtgatcacagctcactgcagcctctacctcacaggctccagcggtcctcccacctcaaccctctgagtagctgggactacaggcatgtgccaccatgcctggttaatttttgtattttttgtagagacagagtttcaccatgttgcccaagctggtctcaaactcctggactcaagatcttccctttttggcctcccaaagtcctgggattccaggcatgagccaccatgcccagcctagatacaaatttaaatgtcttatgtgtttatgtaataagggaatcctgaaaacataaaatagaaactgatccgggatgacaaaacctatgaagccctaacatatgtagttgcaaaaatacctagaggggaatatccacaaccaactacaaaaattagccaggtggtagtggcacgcgcctgtaatcccagctactggggaggctgaggcaggagaatcgcttgagcctgggaagcagaggttgcaatgagccgagattgcaccactgcactccacccagtctgggcaacagagtgaaaccctgtctcaaaaaaaaaaaaaaaaattctaacgagagcctggagagcctgtctcgctcgttcttatgcasgtcattcaccacccagcatcgcctccgctgccccttcccctaccctgccccaggctttgctgcatagagcagcagcaatgattagctttgttaatgtgtcagaagcatcctgaaagatgacaaaacttccaggcaggagataggaggaggaacttgagatctcttgatactcttaaggtccaggtagaacagagaagtagggcctcattcttaatcctaaagagaaatatttagaggctgaagattaaaccaagacyttattacctgtatcttttggttaaaggtgctgtctttattattctgaaaatactattcattttggagaatctgagtattaaacaacaatatgttccttagaactgcctgggcatggaggctcatgcctgtaatcccagcactttgggaggccaaggtgggcggatcacttgagctctcaggagttcaagaccagtctagccaacatgatgaaaccccagctctactaaaaatacaaaaattagccggccgtggtggcacrtgcctgtaatcccagctacccgggaggctggggcatgaggaccgcttgaacccaagagacagaggctgcagtgagmcaagattgcgccactgcactccagcctgggtgacagagcaagacttcatctcaaaaaacaaaacaaaaaaaagaactgtcttaactacagccctcaacatgataaataccarttttttggtttttgtttgtttgtttgagacgaagtcttgctctgtcacccaagctggagtgcggtggcgtgatctcggctcactgcagcctccgcctcctgaattcaagcaatccttgtgcctcagcctccgggtagctgggactacaggtgcacgccaccacggccagctaatttttgtatttttagtagagccagggtttcaccatgttggccagactggtctcaaactcctgagctcaagtgatcagcctgcctcggcctcccaaagtgctgggattacagacacgagccaccgcacccagcaaataaatactattttaatacagtgttttttcttaatcctggaaatgttaagttcatataatgtttttcaaatttattttataaattatatgtaatattcttctgtaatacactgagggggttttgctgggtttttaaattttatttatttattttttagaaacaagtccttactctgtcacccagggtgatcatagctcactgcagcctcaacctcccaggcttaaccaatcctcccacatagctgggactatagacacaccaccacgcctggctaatttttctttttttgtagagatgtgatcttcctgtgttgcccaggctggtcctaaactcctggcctcaggcaattctctcacttcagctccccaaagtgctgagatgatggcactggcacccagcatatactttttttttttaatgtgcaacttctttcctatctttgtgttaaggataacatatgtttagctaaggaaagactagtactgacatgtttaaaaaaattgtcccagctgggcgtggtggctcatgcctgtaatcccagcactttgggaggccgaggcgggcagatcacaaggtcaggagatcgagaccatcctggccaacatagtgaaaccccatctctactaaaaatacaaaaattagccrggcatggtggcacatgcctgtaatcccagctactcaggaggcggaggcaggagaaccccttgaaccagggagttggaggttgcagtgagccgagatcgygccacagcactctagcctggcaacagagcgagactccgtctccaaaaaaaaaaattgccccaaattacatatgaatggttcctctcttctccaagaggaacaccaaggttcctttcttctcccattcttgatgcagaagtccgcccctctggcatgagataccctgatctgcccccacggccaggtttcttccacaaacygcatactaataatttcttttctctgcctatctccaacccctgtcctccccctagctcattctcacgtttcctattttgaatgacccaacctttaggcctgccactggcaccaccaaccttgtctagtccactgtataaagttytctggccccaacagataccaataccacagctggatacctttccccaaaatagtttttaataacagtagagtctatattgactagctgtagatatcgctgatttccatggttcactgagaattctcccatagtttctcttaagggtgaagaggaaactacagaaaatgctgctcatgtttatatctgacttgtatgtatggtaacctgaagcttgggctgtccatatcgacagctttttcaaatgcaaaaagtatgccgagattccaaatgtcaccagattcatgtcggttcctcacatacaccatcacagttaacacttcagttgcatcaggtgytgtgataagctcttcatgtagatgaactcattctgtcctcacaaaagccctgsgttcccagactacgacggtccccatcacacagaggcagtgcacgcagcccaggtaagtgcaggatctttcccaggacacacrtgtagacagtagcagagccaggtgtggccccaggtggaggcttagtgttaaaatctacatcacatatcagcatttcatttccagcgcttggaaattagcaatttgaaattatttttgaaaaaacaaagtgtgttttctttgacacaaacatctgatctgatctgcttgaaatctgcagcrtgttccacatttctgggtggtggtttaaacattcactatctttgaatttgcaggcccaagaagttaytaccaaaagctttcaaacaatattggtttatctttaaagacacatccatagcatactttaaaaataaggaacttgaacaaggagaaccactagaaaaactaaatcttagaggtaagagtaccctrtatcttgctgtggctcatcgtaagtcagggcagacrcggtggctcaaacctgtaatcccagcactttgggaggctgaggcgggyggatcacctgaggtcaggagttcgagaccagcctggccaagatggtgaaaccccmtctctactaaaaataccaaaattagccaggcgtggtggcacatgcctgtagtcccagctacttgggaggctgaggcaggaggaccacttgaagaggtgaaggttgcagtgagccgagatgatgccactgcactccagcctgggtgatagagtgagactctgtctccaaaaaaaaaaaaaaaaaaagaggtgagcagattaaagtcagggtttcgacaccatgaggcacggtttacttacttctagaggaaccaccagaaccagtgtcactgttttccaaatgacagcctggctgcagctgctcttccaagcatgagccttgaatgcrgtctagtaaacatgattatttgcattctgctgttccatctttctcagtgtgtccagagtttatgatgtggtggtaattcatgtccaagagtatagcacatgaggtgctgtaagatcctgaaaagttttctgtattccagaacagttatatttaattcagtgtcactttaatgcctattctaatttctgaaggtcactgtgagcrtcctgataaccatctattaattgaaatatttaattaaccagtacactcaactcacattattgtgrcaatcagagaattccttctgctttgatttattttaaagttcatatccacaattttttctatgagtttggagagccagcattaacctgaaaatgaactaaattgacttdttaagaaaactgtaaaagaaaagcatttttctttatctatgttaattgttcataagatttatctaattatccattaattaatgttatcagcttgctcctccatttttcaaaaccaaagcaaatctgaggggcttgtattcaaagtctttatttcagatacacacytgatgtttatctaacagatgcctcagaactcagttttgtctctgatctttgtcyttcaggctgcgaagttgtgcccgatgtaaatgtagcaggaagaaaatttggaatcaagttactaatccctgttgccgatggtatgaatgaaatgtatttgagatgtgaccatgtgagtaaaaccccaaaaatattaagtcacttcacctccactaagcctaagagcaaaacccaaaaatgttttcacaaatttagagcactattgtgtcactcagctattgytttgtaacaaacaatcacagtgtaacaaaatcacaatgacattctaacaataaacatttgccatgcagtggctcacacctgtaatcccagcactttgggaggccaaggtgggcagatcacctgaggtcaggagttcaagaccagtctggccaatatggtgaaacctcatctctactaaaaatacaaaaattggccaggcatggtggtgggtgcctgtaatcccagctacttgggaggctgaggcaggagaatcacttgaacccaggatgcagagtttgcagtgagccaagatggcaccaccgcactccagcctgggtgacagagcaagactctgttcccccagaaaaagaaaaacaataaacattgttttctgaaagatgtgctgaaaggtaggctggggattggatgatccaggatggtgtcagctggtcatatgggtttggagacacaggtttggtgggactgtgcctctggttgagctgattttatttattctgggtcccaggctgcctagggaaggtctcctcttggtgagggcagaagtgtgagagggcacgtagcaacacatgcacctcctaaagcttaggcatgaagttggcacactgtcacttccacccacattccattggccaaagcagaagacatgactgagcctgcagtcaagggatgggaattcctccctggtgggaggaactgtaaagttatatggcraaggttgtggatggcagtggtggggggtgtattagtccattctcacattgctataaagaactacctgagactgggagagaaaagaggtttaattgactcctagttccacaggctatacaggaggcatggctggggaggcctcaggaaacttacaatcttagcggaaggtgaargggaagcaagcacatcttcacattgtgacaggagagggagagagtgaagggggaagtgccacacacttttaaaccatcagatctcatgagaactcactcaatatcacaagaacagcgagaggtatatctgcccccatgatccaatcacttcccaccaggtccctcccccaacactgggaattacaattcaacatgagatttgggtggggacacagagccaaaccttatcaggggcagtgaagattgaggccagtaattcaacgttcctcacccactgttgcactgaagaacgcccctctttaactgtatcccttgcacttctgaggaccacccctgttcactccctgaagtcagaaataaaacacagaaattaaacagcaatagaagccaccactgacttgttaagatcccataatggccatgattgctaccttagagttagagtctttaccaaggatagaccaggatacaaataatataggaaatcagctaatttttttcatcattttcttttgggcgtagagaccagatgtgatatgaaaacagaaatacatatcaaggaaagctgacagtttgcggtttcaccacctatctgtgccccatggcacttctttgtgtccttggacctttttttttttttttgagatggagtctcgctctgtcaccaggctggagtgcagtggtgcaatctcggctcactgcaacytccacctcccaggttcaagtgattctcctgcctcagcctcccaagtagctgggactacaagtgcctgccaycaygcctggctaatttttttgtattttttagtacagayggggtttcaccatgttagccaggatggtcttgatctcctgacctcgtgatccacccgcctcggcctcccaaagtgctggaattacaagtgtcagccaccacacctggtattttttttttttgacaaagtattgttctgtcgcccaggctcgagtgcgttkgtgcaatcttggctcactgcaacctgcatctcctgagttcaagggatctcctgcttcagcctcccaagtagctgggattacaggcatctgccactacgcacagctaatttttgtatttttagtagacacagggtttcaccatgttggccagactggtctcgaactcctgacctcaggtgacccacccacctcaacctcccaaagttgaggatgacaggcatgagccaccgcacctggcccttggatcatctttaaatgcaaattccctgcatgcaatttatcaaagttgacattcctatcctctagcctcccagcatctagaaactcaacacaggactcaaaaactactgttaggtgttacattagctgatgagcagccactcacaacgtgtgccacttcacatcttgcttggaaggtgatggttttgcactgtaatggggtagaaagcccaagtccccctctgtgtgcagcagggggctttgcacttgagcttgcttctcaaccttctgtttgctgcaggagaatcaatacgcccaatggatggctgcctgcatgttggcatcgaagggcaaaaccatggcagacagctcctaccagccagaggtcctcaacatcctttcatttctgaggatgaaaaacaggaactctgcatctcaggtggcttccagtctcgaaaacatggatatgaacccagaatgttttgtgtcaccacggtgtgcaaararacacaaatccaaacaggtactgttaatcttgttagggcmattgtttgcagtaaattctttatgcaaacaraaataaaaggaggatttccggctgggcatggtggctcacacctgtaattccagcactttgggaggccaaggtgggtgggtcacttgaagttgggagttcaagaccagcctgggcaacacggtaaaatcccttctatactaaaaatacaaaatcagtcagacgtggtggtgcacacctgtaatcccagctacttgggaggctaaggcaggagaattgctcgagcccaggaggtggaggctgcagtgagctgagactgcaccactgcactctagccagggcracaaagcaagactgtgtctcagaaaaaaaaaaaaaaggagtaattccatctrattaagagtatcatcatgaaaaaatcagttgatgctgaaatttgactatgtcctgaatattagatgatgttatgaaattattgttaattttgttagaggtgactgtactgctgactaaacatgtaggtattcccagattgaacttatttagttctcacaaattaataattaaaattatgcttctataggagtgggttaaaagttgcacrgatgagctgattcatgtagaatcattgtctgtggacactccacagacctcagacagagggaccccagagctctccaactgcaccaactttagaagtttatgtgttgggtgatccttttcctgcttcttccagtgattgttgtatcttgtagaaaaagagagagaatgaatggatgagaatggattgtctttgtagagctgcagacggaccttgagtgtattgttcttatgggggatctggagctaacagggtgatcayagagcagccggtgcatgtrargagargttgatgtctgtttctrttcagctggccrcccggatcctggaggcgcaccagaacgtggcccakatgcccctggtcgaagccaagctgcggttcatccaggcrtggcagtcactgcctgagttyggcctcacctactaccttgtcaggtgattacaatgttcacttgtttctcacactttccattcaattttaagtggyttttggggagccccagttttctcatttarcatagaatatagaatgctttttatttgagaatattgcccttttataaatagycctgacactttgggctgctcataaacattttccataccttctgttctaagttccaatacccctgaaactcagctaaatgtgggaaaggaaattttaaaaggagggttttttttaggataactacatttccaaaaccagagggtaaacatcacatattgwttttatgaaatctgtaacttyttttcggtttttttttktttggtttttttttttaagagatcgggtgtggggagggtggccggggtgggggggtgtctcaytttgccrcccaggctggtctmgaactcctgatctcaagcaatcctcccacctcagcctcccaaagtgctgggtttacaggcatgagccaccacacctggctacgactttctttcatgtcagcttcctcctttttgtgtctcatagtgtctcgtggtgtggctttgcagaattgttaggtttttagagaggtccccgcaagctctgtcttatttctacccagstttatcaggtagcaaccctgttctcactgktctctgaagatttctgggtctgaaggatgcataggaggcccatctattgcccccagaaagacagcttaagtgacttgtccaagttcacccccagtccagggcacacttggcataaagccctgcatcctcatttgttatccccgcctagcactatggctctgccccactgtatacaayggatggtttcccaaaacatatccacaagcatgcttgtaaaycaaattacattcttcagttcagaaaaggagactgatgcttaagcaaaatctacccccaatcctacagtacascaagtactgtcactttctcatcttataatttcggggtgggataattggtttgtatttttaatcattggcagtttttgttttcttggccctttccaaagactccattcctccattacttctaacaggggagtctattcagactttccagctgggcgcggtggctcacgcctgtaatcctagcactttgggaggccaaagtggacggattgcctgagctcaagagttcaagaccactctgggcaaygtagcaaaaccccatctctactaaaaatacaaaaaaaaattagctgggcgtggtggtgtgcagctgtagtcccagctrctcaggaggctgaggcactagaattacttgaacctgggaggtggaggttgcagtgagctgagatcgcgccactgccctccagcctaggcgacacagtgagactgtctctaaaacaaaaacaaaacaacagaaaaaacagactttcctattcactgaaatatctcattgaayatcagtccycaacgtttgtcccaaacaagcaactccttctgctttacttaccccaacaaaggagtgaggaagsgcggagtcgtactggatacccactatgtgcgcgcatatgtgtccatgtgcggacacacacacactcacctgtaaccctgaagtcaaccccgcatagtgaaaaccacataaatacttgaactgaccaggcccagctttcagtctcacctctgcctctgctagctctgtgacccgggcatttttgctgcgctccccaagcrcagcttctccatgtgtccagtgggcwctccgaacctactgtgttgagagaatccagtgcagcctgcaagcaaagygcctgatacgtggtgaagcgtggtgtgggcctgaacaactttccggtgacaactcctcctttaccagctacttccccctgcacctccctctatctctaacacctgtttatggaggtgaggctttgaggcagtgggcccaggtgtagcgaagatctgctttttccaaggtcagtcagagtcaaagcctggagcagccatgctgtgtgtaggatgtctggcggaatcgggatctgcccacacccgagagacctaggtccttgcttcaccgctccctggatgatggagagcagcccagggaactcccataggttagagagaagcgggtggagtaagaagtgggttaatttgtgatattaagcattaaggtggtgaaatgaaggaataatgtggaaaacattccagaacaggggagtaaattttaaccaagggtgacatgcagaagataagaatgatgtgaaaagtgacatattcagctaggaattcttttaaaattatgcttttctgtctcctgcagcatcatttttcacatcagtttccccttcttgcaaccccctccagctgctctccccaagctctgccctamtttgcagtaaaacttcttgaatgtattgtacgtacctactacctccaattccttgcttccattctctcttgaaaccactccagttaggttttctctccctccctaccccactgcccctgctactttctgtcatcaaggtcacctcttggccacccatgaccttcacattgctgagtccattggtcgcctctcagtccttgcaccagctaccctctccgcagcatttgacacaatgagtcaccccttaccctttgccaacttgcatcacttgccttccaacacagctgactttcctggcttttctcctccctcactgaccagttcttttggtctccttggctggttctttctcatctttccaatctcttataataccagagtgcacagtcctcagttttttggttttttttttttttaattagaggcaggatctcactctgtcacagtggcacaatcatggctcactataacctcaaactcctgggctcatgtgatcctctcaccccagcctcccaagtagctgcgacttgtgagccaccacacctagctaactttcttttaggagatgggatctcactgtgttacccaggctgctctcaatctcttggcttcaagtaatccccttgcctcrgcctcccagagtgctgggatttcagatgtgaaycactgcacccagccaggcctcagttcttaaagcattcctcttctcaatctctactcaccytcttgggttcagccattcttttgacttcatttatatgccaattactctgaaatatatatcttgagcccagaactgtctcttgaactggagattcataaatccagtgacccttggatatctaatgarcatctcatctttacatgtccaaagttccggatcttccccctaaactggctccccgctacatacttcttcrtctcagtagaaggcaactcctcgccctagatgttcargccaaatcctttggagtcattcttgactctgctctttctcttacaccaacatcctgcccataggcaactcctagtgactctaccttcaaagtacacacagaatccgaccacttcttccgcctcctcctccaccaccaccatcacagagccggtccagagtgatcctgcttggtgttcctgcctctaccctgatcccactaaattttcaacttakcagccagagggatccttttaaaatctaaatcagattttgtgaagcctctgctcaaaaccatctgggacaggtgtgacrgcttatgcctgtaatcccagcactttgggaggcaaaggcaggaggattgcctaagttcgggagttcaagactagtctgggcaacataacaagaccctgtctctacaagacacacacacacacaaaatctgaaggatttcttatctcactcagagtaaaagccagatccttacagtggcctacaagacctttgctcttgaactcacatttctctcccctccttcactgtgtcagccacatgggcctcctggcaggtccttaagcacattaaaaaaaaaawttttttaagtggctgtgccctctgcctggaatactctttccccagatatccacgcggctcacatcctcatgcatatccattttttgatcaaatgtcaccttttcactgacctccctgtttcaaactgtaaccaccttattaccagtattccctgtagcccttccaactttattttccttcatcttatctggcatatgtacctcatacttatgatcttctccctcccacagtcagaaattttccatccgtttagtttactactatatctyccatgcctagaagggtgcccaacacagagtcagtaatcattttgaatgaatttatttgattccatcttatttttcttctctctgatgtcagttttacttaaagaccatctgcargatagccttcattcttttttcacrctgtctatatcccaataaaaatgcccccctgcagaaagttaattcttcattgtccattcctctgaaatgattcagaaatactggtagtatttttaagaagttatatgtgagtgaacattgtattataggaagcagttgcttctcttaactaatattatgattcttttcagatttaaaggaagcaaaaaagatgacattctgggagtttcatataacaggttgattaaaattgatgcagccaccgggattccagtgacaacatggagattcacaaatatcaaacagtggaatgtaaactgggaaacccggcaggtaaagtgaaagtttttgctcttcagtgttgagcctataaatgtgtgtccctcagaattgcagattattctgagttttaaaaggtgttcttctatttagacctaagaaaccacaagcatatggtaactgtctgtctgctaaaatcatcatatgcaattctgggcagcttcctaacaggcacaggccaaatgctcttgcattagcactgcaagttggcttagtctccatgcagactttcaatacagacaggttctgaaatcgctgagcagtttcattaattttcattgactcagcataggattatacaggatttagcttgatacttacttatgagaaactactggagatgtaactgctatgcaaaataaatccaaaaaaagcctcatctgactggctgccaagaaaccckatggaggactggaagattcagttgctcacctggagagcrttccaggcccaaaagggaaaaactgctgaagaagaaagtgaggtccatagtgatgactgagaaaagcttcacctcttaaaaccaggagccctcaaacccctagcctatgttacagcctcccatcatctcccatcctaggagctaagttcaggccaagcctgtatcatggaaaattccagatgaagttagaggcagcttagcatcctgccgctaatttaaaacattctgcccagtgctttgggaggccgagrtgggaargatcayttgaggctgggagttcgagaccagcctgggcaacataatgagaccctgtctcyacagaaaathaaaaaaamaaaaaacaaaaaaaaaaaaacgctgaactagccaggtgtgatggtgtgcacctgtagtttcagctactcagccagggatgatcagttgaggttcgaggttacagtgagcagtgactgtgccactgcactccagcctgggtaacaaagcaagaccctgtttcattcattcttgaattaattaaaacattcagatgttgctgatacagactcaatcttccctcattcctttggcattctcattttccaatagaaagtcactgacgtagagggatggtaagagacccacacatttgttaagaaccctgacttcctctcagcagtgttgataatcatctgggtgcttatttgtaaaatcaagttcagagattagatgacctctaaggcggtagctctaaagccttgatgcgtattaggatcacctggggagctttaaaacaccactgcctagaccacacccaaggccagttaaatctgaatctctgggaggaggaacgaaccattagtaatttttaaaggtccacaagtgatttcaatgggcagccaaggttgtgaaccagcaaagtctctaagtctttcttctagtgcttagagtttatgacttgcagctaggaaagggttcsgggcagtggctgtaggaaaattcaggcagacttttattcattaaagagcctgcaggccgggtgcagtggctcacgcctataatcccaacactttgggggtccgaggcatggatcacttgaggtcaggcgttcaagaccagcctggccaacatggtgaaacccccgtctctactgaaaatacaaaaattagccaggtgtggtggcacacacctgtaatcccaactacttgggaggctgaggcatgagaatcgcttgaacctgggaggcagaggttgcagtggcccgagatcgtgccactrtaccccagcctgggtgacagagagagactccatctcaaaaaaaaawwaaaaataaaaataaagtgcctgcgaagcaccctgcccctcaacacagggagacagagagtgcttgggcaaaatcyttgtatctaaactgtagacagaaaatgtgttgggagtttttttaaccagrcgtgcagcaaagtcgacaccaccagagggcgcaaagagagcaaagatgttttctggaagcgtttaatggaagtgatggttttctgtgtgttttagagggatatccatctgttatccacytcagcagccctcagctccaggggccagtccagcaaagcactttttttttcatcattccttgtcagagtttaagcttctctgtgccttccycttccaggtggtcatcgagtttgaccaaaaygtctttactgctttcacctgcctgagtgcagattgcaagattgtgcacgagtacattggcggctacattttcttgtccacccgctccaaggaccagaatgaaacactcgatgaggacttgttccacaaattgaccggcggtcaggattgaaacaagcacgcgtgctcggctcacaccaacaaggcaagccaaaggcgcccctccccagagggatccctaacktgcccagcatgtagattctggactaacagacaacatacattcaccgctggtcacccagatcctcattcaaacccactgctggcacatccctttccttactttgccctgtgctaccagccacggaaggagcctctcttgttttttctataaaatgggtaggcaggagaaaagcaggtgccctaagattgctctaaggcccagcatgtggttacagttctctgacttgcagaacctgccaggtgtatggctacaagttatcctcgtgctgatctgtctcattactaagtcaatggagaagacagaaaggtaaaaatcacgtgtagcaagaacaactcttatttcacaaactcaggtmtgaaacgaaacgcctgtccttcatggaactgcttttagctcctgtcttttcaaaatggcagagggagttcctacacacactttttccctggaggccaargtctaggggtagaaaggggaggggtggggctaccaggtagcagttgacaacccaaggtcagaggagtggccctcagtgtcatctgtccacagtgatacctgccaagatgaccactgacccacatctggtcttagtcattggtctcctcagatttctggggccacctgcaagccccattccattcctacagatctctcagccacctgtaagtcctttgtgaagatgtgggtgacacagggggacaggaaaacccatttctcaacccagatccatgtctccactgcttctactctgggttgggattcaggaagacaggcacagtcctctctgttcatagaaacacctgccagtgtcaaggattccagtcaggtgtctrtcccaactggtcagggagagaagggcagacccattctcaaagaccaccatgtccaaggtctgacagctccccactggctgcccccacaggggctttaggctggtctgggtcatggggaagcgtccctcttatcgctggtctgtgttctcctggatttggtatctatgttggtacgactcctggccttttatctaaaggaytttggcttttgtaaatcacaagccaataatagacttttttctccccctctgtyttttgctgtgtcatctctgccttgagactgccttgagacagtgcttgccttgagagagtgagccaattaacagctgcctgaattgtcattttccattttggtttgttagaggtgggaggggtgggttttgagaaggtcaaaagcaataccagaagtaaagggaaatatcagacaatattttattattttttcatagatgttctgccacacaaagaacttggggtgtaaggataaggcaaaagctccaatcccatttttcagttctcctaggatgcacccctcagggagcctggccagagttccgaggcycgtgagcgtcagctgttgctttattttccatcaaagccctctgagaagtgagacctcagcaattccgggagccacatagagacagacttggcaagggaccccctggttctgagccagtagctgccatctggaaattcctcttttagcctctccttagaggtgaatgtgaatgaagcctcccaggcacccgctgaatttctgaggccttgcttaaagctcrgaagtggtttaggcatttggaaaatctggttcacatcataaagaacttgatttgaaatgttttctatagaaacaagtgctaagtgtaccgtattatacttgatgttggtcatttctcagtcctatttctcagttctattattttagaacctagtcagttctttaagattataactggtcctacattaaaataatgcttctcgatgtcagattttacctgtttgctgctgagaacatctctgcctaatttaccaaagccagaccttcagttcaacatgcttccttagcttttcatagttgtctgacatttccatgaaaacaaaggaaccaactwtgttttaaccaaactttgtttggttacagttttcaggggagygtttcttccaygacacacagcaacatcccaaagaaataaacaagtgtgacaaaaaaaaaaaaaaacaaacctaaatgctactgttccaaagagcaacttgatggttttttttaatactgagtgcaaaaggtcacccaaattcctatgatgaaattttaaattaatgggcacctttcaacatcatttgcttccttatctacagttgattcagaaatctgcattttttattcttttatatgacttttaagtaaaagatttatatggatttgagtacggtcctgttgtgtcctctccaacctactgtctccaaaaaggtgactktttcctctcttatgaaaagggactgcaactctgaggtctaacatgtgtctctcctcacagcgccaagattccgggtcgttccctcccgtggtgtggggagtggcagattccaggggtcctcagagagccccttagaaacctcacttacccgctggtttcaactcctttctcactgacttggtcacagatttcctggcatatcctgccttatcatgagctcttttgtctctttccagttctatattaaaamacacacacacacacacaccagcaagcaaagatccccagcggcaatagaacagcagaagcctctgattctgatggctgagtgttgagggcactttgctttagtgacatgcagtttatagatatccctttgtgcaattctcctgtcagcccayagagggtagaaatggcttcctctacaaaggagaaaggttcagaaggtgaacttgcccagggtcacactgccaatgagcagtgtttgtcttgactccagaagccactaagcttaacccagcaaaccccacccttccttccccagccttgcccagccttgaaatgccccttaccctagctccagagcaggcgttcctgagctcaggctcataccagtaagagagaaccaggggcattaagagcagttagctgtgggaggagaggctggaccaaaaaggtctgggagccagagaaatgaggtgcttagagtgttgttgtttttttctttgttttaatttttgkttttgktttttgagatggagtttcactcttgttgcccaggctggagagcaatggcgtgatctcagctaaccacaacctccgcctcccaggttcaagcgattctcctgcctcagcctcccgagtagctgggactacaggcatgcaccaccacgcctggctaattttgtattttttttagtagagacggggtttctgcatgttagtcaggctagtcttgaactcctgacctcaggtgatccgcctgcctcggcctcccaaagtgctgggattacaggcgtgagccaccgtgcttaattttgggaaagtttcatttttagtcccacggtcagaaaagtaaggaaatgaggaagctttaatttgaaaactcatttaatacaagaagtcaagatattttataatatctgtcttctaaaatcactttaaaattttatttttaactcacaagatttatttttgggggctgggcatagtggctcaccttgtaatcccagcactttgggaggccaaggcaggaggcttayccgagcccaggagttcaagaccagcttgggcaacacagcaagaccccatctctacaaagattttwaaaaattagctgggcatggtggcacatgcctgtagtcctagctacttgggaggctgagatgagaggatcccttgagcyccaggagttcaaggtggcagtgagctatgatcatgccatcacactccagcctcagtgaccctgtctcaaaaaaaaaaaaaaaaattggcttctacatttagtatctctatattcattttaattattttctcacatagcgtgactttcctgcctctcccccttccactcctgtcaccccagaatctctcagtggtaggagacagaaagggaacattcctctttgttatttcacccatctttccttctcatgcaccctayagccaaggactcttgagtccaggaaatcatagctggaaaatctgaaaaactgaaaaagtgaagcccttggccctcacttgcttcaaagtttttccaattccttgaacctcactggagttgtgtggaaatattgagtgctatcagaaagaggggaggccgggcacggtggctcacgcctgtaatcccagcattttgggaggccgaggcaggaggatcacctgaggtcgggagttcgagaccagcctaaccaaaatggagaaaccccgtctctactaaaaatacaaaattagccaggtgtggtggcacctgcctgtaatcccagctactcrggaggctgaggcaggagaatcacttgaacctgggaggcagagattgcgatgagccgagatcacaccattgcactccagcttgggtgaaagagcgagactcctccatctcaaaaaaacaaaaacaaaacaarcaaaacaaacaaacaaacaaaaaccgaaaagaaaaagctatcctgacatttgcacacacatctcatgttgcatcaagactcagtgattggccgggtgtggtggctcacatctgtaatcccagcattttgggaagccaaggcggaaggattgcttgagcctaggagttcaagaccagcctgggcaacagcaagaccctgtctctatttaaaataatcataataatttttgtaaaggctcagttatctcagaggagtcccaatttttaaaaaacctgaatgagaatgctcctgactaacacctgtggggaagattctttccactaaaaggatttacctcttttctccaacttactctgtgagctccaaaaacacccataattccccatgtgctgcagtgtcttcagtcatcacagaggaaaagtcctatagccgcttctcccyagccactgcaaatgacaaaagctgcatggggacttaacaggatagtgtctctcttcttcacccctggaagttgggcggggaggcctctggctgccctctgacatccctcagttgcaaaagtggagcgtggagagaaggcagagccctgtgtgagaggagcagaggatctgggggagggaagggcccaacaccccaagcctgtgccctctgactcaagagatgtgttgatggacataaatggggccggtaacagggaaggcaaattaagttcaaaaatatagacagctatgactgcaccactgcactccagccsgggcgacaaagcacgaccctgagaaaattttattctctaaaaataaaattttaaaataaatatataaatatatatataatataaataaataaatatatatataaaactgtaaggaaagagtagggcttgcagcaaggcctggggtcagggctcagtgcataggctctattgctggtgatggggtagctggtttgggcccagcccctggctggtaggggaggctattggaagagagcaaagacctcttccaggcagtgctacagaggtcaggaggcagaactaatggtgggatattctgggaagccaggagggytggggatgaaggtctgaccaggtgcttacaaaggggccctgaatctctgtgctaccagcttaatttcctgaaatgtcactaaagaaccaacattattggcagccagcccagcccatgtgacccaatgttatttaaaaagaaaaagaaaaatgtagcagaaccactgttacctttctaggagttacagacatccaacttcaaaatagaaacaccctcattgctattgagggtgagataccacgcatgaaacccacgtggactgcaactcaaagtgtggtccttggcccagcagcatttgtcagaaaggcagaatctcacagggccaggactagggtggcacaggtgaggcatcccgggcacagcatttaargaggccytcactgtcagggtcgtacagggcacctcctcggctcaccctaatcccagctctgaggtccacccagacctttctgagtcagagtctgccttttaacaagactctcagcgatatgtatgcccagaggagtgtaagaagatctggccttagagatgtggcatggatttggcagggaggataccagacaccagaggaattgtcaagaaagagtgtagatgccataaattctgccagccagtgtactgagttaatggtgtccccccacattcacatctgcacagaacctgtgaatgtgaccttatgtgaaaatagggtctttgcagatgtaatcaagtaaagatgaggtcatactggattaaggtgagtcctaaattcaatatgactggtgtccttaaaaaaaggaaaaggtaggctgggggcagtggctcatgcctgtaatcccakcactttgggaggctgaggcaggcagagcacctgagatcagsagttcgaggccagcctgaccaacatggtgaaaccccatctctactaaaagtacaaaacttakccaggcaaggtgatgggcgcctgtaatcccagctactgggaatcgcttgaggcargggaatcgcttgaacctgggaggcagaggttgcagtgagccaagaccgtgccattgcactccagctgggcaacaagaacagaactctgtcttaaacaaacaaactaactaacaaaggaaaagagcaggaaaggccatgtgatgatggagacagagacaggggtgatgcaggtgcaggccaaggagtcccaaagryggccagcaaacaccagaagccaggaagaggcaaggacggatycatccctgcgcccttcagagacagcatggccctgccgccatcttgattttggacttmtaggctccagaactgtgggagaataaatttctgtttcaagccacaaggcttatggtaattttgttacaccagttctaggaaaataatgcagccagaatcttcacatctttaaaaatggggatgctacctttccactctatcactggaagaaacgtatgagagaatggtgcaaaaatgcttttaaaaccataatatgcaatacaaatgtaaagtattatttttaacaagaacatatttttaattagaaaaatagtttatcagcttattttcaaataagtgtgatggtttgtgtgacagtttggatcattgttcagcaaatattttctcccctctcctctcctaccatgggtggcayatactacctgcccacttactgttggacttggccgtttgacttcctttggyccagaggctgccactgtgcttttgcaatccttttgcactcctgcctccactgtgagaacaggattccccaggtcatcacytgagccactgaatrgaatccatgtagcagatctaaatggagtccacagcctggagccaagccgagctagatcagctgacccacagacaatttgtgtgggaacaaattcttgttattgtaagccactgagttctggagcagtgtgttaagcagcatcattgtggaatagctgactaatgcaggatgagatatccccaaaaaggagaataagaaatctatcccattctagcggtatcytaagacacagctgatggcatttcagagtgtgtctttctcatctttataccatcctgtctcctggtttttgtttttgtattttaataagctatctattaagccatttgaaattcrtggaaattggccaggcacagtggctcacgcctgtaatcccagcactttgggaggccaaggcaggtggatcacctgargtcaggagttcaagatcagcctgaccaacatggagaaaccccatctctactaaaaatacaaaaattagccaggcgaagtggagcgcacctgtaatcccagctacttgggaggctgagacaggagaatcacttgaacctgggaggtggaggttgcagtgagctgagaccatgccattgtagtcctccattgattacagtccatctccaccacaatcaggtcaagatatatccccgactcaggtgtaataatctgggacctttgtatcatgcatgtgttttcttcagagactccggtgtctctctgccaacacaaccccattattccggccatgccatcaggttaaataatttgctgaatttcagggtaggttgacaggttgccatagcagtcaaataggccccaggagcaacagggataccaaaatggtaagtggctttgcaaaccaatgatagagcaagtgaaatcagctcccacctctccaaaaagcagtctcaacaataatatagcaaacatttacatggctaaaagaattagaaaactcgtgtgtattaagggctatcacttttgtctcct

SEQ ID NO: 9906 - DNA, 824376 bp, Homo sapiens
ttctatgatgacagagtcattgacttttcccttcagtttataatctgtatcctataccttgatttactcagccttggctaaagcacatttttaatatcttagctgagctgacttgtaagcaggcaatattgatggggtcagggaaatagtccctttccagggttctggccacatggctgatattatgagacacttcatattttttgtttgtttgttttcaaatctcctatgtctgtgttgggtgttctatagacacccaaacctgggcagtttttatgaatctcagggagccactctgctgctgagctagcctcattcacacatttcatttatccacaataataagaatatcaataccttggatttatatagagccattcatccaaagaggtcaaagcattttaatttaattggatgttcccatggctttaagagcccctaggtatatttacaaatgtaatattaggaaacggtctgccctggtttagaaaacataaaacaagacctgcatatatactggttttagccaggcatggtggcatgtgcctgtaatcgcagctactcaggaggctgaggcaggagaatcacttgaacttgggaggtgaaggttgcagtgagtcgagatcgcgtcactccagcctgggcaacaagagcagaactccgtctgaaaaaaataaaataaaataaattaattaatttgggtgtgctaatttatttatcacttaattgtatttccattttgtgatgaaagtaggccattgtttctgacacttatccaattctcctttraaggaagtacttttgtgtatttctgcttataaaaagcaacacctggaaattttttttttttttttttttttttttagatggagtctccttctgtcacccaggctggagtgcagtggcacaatcttggctgactgcaacatccgcctccctggttcaagcaattctcctgcctcagcccccagagcagctgggattacaggagcttgccaacacgccccactagtttttatgtttttagtagagacggggttttgccatgttggccaggctggtctcgaactcctaacctcaggtgatccacctgcctcggcctcccaaagtgctgggattacaggcatgagccactgtgcccatcccggaaactttgtaaaacacagaaaagtgtaaaaaaaaaaaaaaaaattacccatgttattgacgctcaaaacaactttgcaataaccccagagatgtattttcaacaaaattagtaccatactttagtaataatagctgatatttaccaagtgctgataatgtatatctcacatattcttacaataactctctatgtgaagtacaatgaccacctgctttacagataaagraactgaggcagagtaaagttaagtaacttgtcctaggtaatctagccaggaagtggaaagctgggattgaatctaggccatcctgctacacaaactgcatttttttttaaggtgtggtgaaaaacacataacataaaatttatgacttttgactactttaaagtttataatttactgacctttaatacattcacaagctatgcaaccattgactgtagttccagaacatttcatcactccaaaatgaaactctgtatccattgagcagtcattcctcatttcttcctgccctgcagcccttggcaaccactgatctgctttctgtctctatgaatttgtctgttctggatatttcagataaatggggttatacacaatatggccttttgtgtctggcttttttctgttagcatgatttcaagatttatcaatattgtagcatatatcagtacttttttcatttttatgtgtsaataatattacattgtatggatatagcacattttgtttataccacactgatacagtcatattgttgcagttcattcattgttaaacatttggactgcttccacctttaggctattttgaatggtgcttttatgaatgtttgtatacaagttattttccgaacacttgttttcaattctcttgtgcatatacctatgagcggaattgctgggtcatatggtaactttatgtttagttttttaaggaaccaccaaattgttttctgcaatggctgaaccatttcacattcccaaaataaatgtacaagggttccagtttctccacatacttgccaacatttattttccattaaaaaaattgtaaccaacctagtgggtgtgaagtggtatctcattatggttttgcattttcctataatgattaatgatgtcgagcatctttttatgtgctttttggccatttgtgtatcttctttggagaaatgtctattcacatccattgcctaggttttaatttttatttccttttgtgttgagttgtaagagttcttcacatagtctagatacagaactcttaccagatactgtatgtgatttgcttttattctctcccatcctgtgcctgtcttttcactttcttgaaaagtgtactttgatgtatgagggtttttaattttaataaagcccaatatacctattttttcttttgttgcttatgcttttgatgtcatagctaagaatcatgaaaatttacccttgtattttgttctaagagttttatctcatatttaggtctttgatccacttttagttaatttttgcatattgtatgaggtagggtccatcttcacttttttgcttatgcttatccagttttcaacaccatctattgaggagactattctttccttattgaatggtactgtcagctttgttgaaaatcaattgactgtttgggtgcggtgggtcatgcctgtaatcccagcactttgggaggctgaggtgggcagatcacctgaggtcaggagttcaagaacagcctggccaacatggcaaaaccccgtgtctactacttggaaggctgaggcacaagaattgcttgaacctgggagtcagaggttacagtgagctgagattgagccactgcactccagcctgggtgacagaaagagacttcgtctaaaaaaaaaaaaaaagaaaatcaattgatcatagatgaataggcttatttctgtatggcttattctactatatttatctatgtgtttatttttatgcaagtaccatgctattttgattactgcggatttttagtaagttttgaaatcaggaagtgtgagacctccacattgatttttttttttttccaagattgctttggctatttggggctcttttaatttccgtatgaatttcaggatcagtttttctgtttctgcacaaaaagcctagtgaatttttatcggaattacattgaatttgtagatagctttgggagtttggccatcttaacaatattgagttttccaacccatgaacatggatgtctttccatttatttgagtcttcttgtatttcttgcagcaatgttttgtagctttcagtgtagcagtctttcactttcatggctaagtttattcgtaggcattttattctttttgctgctattggaaatggaattgttgtgtaaatttcctttttggatagtttattgccagtttacagaaataccactgattttctgttgctattgattttgtattctgcaactttgctgaatattttattagctctaatagttttttgtgtgtattctctaggatattctrtatataagatcatatcatccaaaaatagatattgttttatttcttcctttccaatctggatgacttattcatgttcttgcctcattgctctggctataacttgcagtactttgttgaatagaagtggcaaaaaaatggttatcctttttttgtgtctaatattagtgggaaggctttcagtttttcatcgactatgatgattgctgtgggttgttcataagtaccctttatagcctataagaagttcccttttatccctagttttctgagtgtttttattgtaagagtgttttggattttgacaaagcttttttctgcaacagttgagatgatcacacactttttatcctatgtcctacattcttttttttttttttttttttttttgagacagagtcttgctctgtcgcccaggctggagtgcagtggcgcgatctcgactcactgcaagctccacctcccgggttcacgccattctcctgactcaggctcccgagtagctgggactacaggcgcccgccaacacgcccggctaattttttgtatttttttttagtagatacagggtttcaccgtgttagccaggatggtcttgatctcctgacctcgtgatccgcccgcctcggcctcccaaagtgctgggattacaggcatgagccacccggcgcccggcctgtcctgcattcttaaccactaggcccaactgcctctccctttctctatgaattatttaattttatagcccagtttttgtacttataccataaaaatctttttttttttttttttttttgagacagagtttccctctgttgcccaggctggcgtgcagtgtgcagtggaacgatcttggctcactgcarcctccgccttctaggttcaagcaattctcatgcctcagcctcccaagcagctgggattacaggcacacaccaccacggtccggctaacttttgcatttttagtagagacggagtttcaccatgttggccaggcttgtcttaaactcctggcctcaagtggtctgctcggctctgcctctcaaaaagtgttgggattacaggygtgagccatcacacttggcccaaaaatcttattttctttaaaagccattaaaattatgatttccagaagctatatgttatttcctcatttgaatgttacataatttatttaattcttctgtgttatttaaaaaatgtcaatactctatatttctttaggaacaaagtccctagaactggaattattgggccaaaggttatgaatacttttaagttatcgtgtgtgtgtgtgtgtgtgtgttatcttcaactaatttttaaaaatgtgaacttctaccagctcgatgtctatttaataaaagtaattgatgtgttctgagcttgctgctcacaactccatgacctctgagttagtttgctttctattcctttaagttcttcaatctttattgctactgagcaggccacctccttccttacttttaaattattattattcttgttcctcagtctaaccactttccacgcacattctggtcttttttgttttgttttgttcatttggtcttatgaattaatgactaagccaacggaaccaaatgcaggaaatactaaaaacttaccggtaaaagtattaacacaaatgtgcattactactaagtatttcatttagcttgaaaaaaaaaaaaaaggaatctgcagtgtggtctgtttgtttttagcttatactgtcttttcttcatcaatattcatttattcctgtacgtgtggttttagaactatctggaaatataggaacattgggaaaaattgaactccacataaacctaatgtagaaacattagttttacagaatactaaagaaaagcatttctgcttatattcattttcgtattttattggattttttaaaaaatcacttgcacttaaggcaaaaacttcgcacatagacatccggcagagaacccctctttcatttaaatacaaaccctaacacattttggcatcatcagataaatttgatttaaagcctgacaaaattctaaaagcaaggaaactgaaaaaagctggaagtcagaataaagataaatgaagacactcattacaagacttaggaagttgcagctggtttagctttcctgcgcgcccaggagacggagaaggaaaactacgactcccagagtgcttagagagaacacgcgcgtcgtggcctcaaaacttgctcccttagtcccgcctcctcacttcagtgattggattttccacttccgcgcctctggaattctcttcacccattggtggagactcctgcggggtcaaatacagaatttacgcacccttggcttccttggagcctagcggctctccccgcgtccaagatggcggcagaagcagctggtgggaaatacagaagcacagtcagcaaaagcaaagacccctcggggctgctcatctctgtgatcaggtgagggaggcaggaggcagggtctggggactgggggcagcggctcgacctccgctttggaagggagaagggttagctgggtcccaccctgctctcccctttcctccttgcctcccgcagcccctccccagggctctaacccctccccagggccccagcaattcccccyccaccttttttttctggggttagctatagagagaggagccccgcctcagtcttttctttaggggcarcaccttctattacagtcycgggaccccaaagcacgctatttgggtttggtagagaaaaccaggtgtaaaggtgtgtttattgattcctaaaatgcttgtttattgtttgcctgtagcagcactcactgagaaaggcgtcttgtttcctggactttggggtgtaaggccttggagtccggagattcctgtcacgagttgcagatttgtgttttcacactctggatactttcaaccacctgtgcgtggccacagccacaaatacaagaatctgcagtgagctggtaggaggactgggtttgaaggcacacatcggttttcaattttttgccctgcctccgcattctggtccattccttaaaaaacagaaccaaaccaatttcaaattatcctccatgcactgcccctctgcacctcccagaagattagggtgggggtggagtgggagcggtggatcttttaggagcttttttttaaaaaagcgaaatatattgaggatgggggaaccctttcaagaatcttggatatgatgcaggtactgactaaaaccaatctaaataaaatttattatggcacgttttttacgttgttggcatttgaatttcaactcgtttatttttcataaacaaacactctatttttccycacctatactaaacttttgtttgagttcttgcaagtyttctggaatgtattgatcatcttttcaaaacccagggcccaacattatctggtaggtactaagcacttcaatgaatgcatgtatcaaaccattagaacagcttaccactcactgacaaagacacatcttatgggtcttayttaggaggctttaagattatggcctattaaatcattactttaattttcttttgggcttaagagaaaaacatctctgtgtggaaatgcttaatatacttggtaggccatacagaggaagtgctgttgtattgtgaatctataggcccacattctcgctgtgacaatacgcaggtagtgtagatgtatctcatgatactaaaattccaataagaatgtttgttgtttcccatctgaatttcctgtggaattagaataccaggacattatttggatccttttttgaacttgtttgttttttctaccttatagtyaacatttatttaaacaataggtatttagtgccagttgacagtatggcgtctggcacgtattacatattkaataatatttgttgacttaatgagtaaatgccctgagttttgcaaagatgaagcaggcacagtgttacccttgaggagagtatagtttacctgggggataaaacatgtcrgtaaaaatgatgacataagactacgagagagacatgaaatgttatggaaatccasgaggagtggctgtttctaatgaaagtgaaatgtgtcatctcatctgtgtacttttgattctccaggctgttcccatttcttttatgctatttgtattttcctcagggccagttgaatttactctaaatgtcatatttttgaaaacagcatgaaagccaacctaaagctttttttactaatgctaattcagaacatacattgcctttgcttgaccattccttaatattctccaggaggaaccccctactgcttgatggctaagattttgtggttatccatccatctcttatgccagtttattaatatatgaccttcattttatcactgtgatttaggcctaggtattttttactttgatctctgttgtgcattatattgcttttcttttcttttcttttctttttttttgagacagagtcttgctctgtccccaggctggagtgcagtggcgcgatctcggctcactgcaacctccgcctcccaggttcaagtgattcttctgcttcagcttcccgcatagctgggattataggcgtgcgccaccacacccacctaatttttgtatttttggtagatacagggtttcaccatattggccaggatggtctcgatcgcttgaccttgttgtctgcctgccttggcctcccaaaatgctgggattacaggcatgaaccaccgtgcccagccctcatttttctactttatccttgaccacctcagatcactgcataacacttttgtgatatagtttttacaagcatggtgtaagggaatgtctagacctagtatcctgggcaagtttattaaggcttgggatgcattgttatatatgaccttaagaccgaatggtgttggtgtttgtatttcaacatttctttgagtcacagggagattttggtgttggagtgaggatgttggtagctataacttcctgttatttccttcctaatatgcttttgaacatacccagtggtttaaattttataaacagtggtagtgaatgagaggacaatggaagtattactttggtgtttgggatggggaatggggggagagtcctgcgggtaagagaaccaggaatgtatgtttcttgttagtaaattgtgctgtcacttggaagttgcttcttgtatttctgttcaatttatgtcctttgtgtttcccttcttgcaacattgtattcattattcctttttttttttttgagacgtagtcctggagtctctctctgtcgcccaggctggagtgcagtggcgcaatcttggctcactgcaagctccgccttccgggttcacaccattctcctgcctcaacctcccgagtagctgggactacaggcatgcgccaccatacccgactaatgttttgtatttttagtagaggcagggtttcaccatgttagccaggatggttttgatctcctgaccttgtgatccacccgccttggcctcccaaagtgctgggattacaggcgtgagccaccgcgcctggtctgcattcattttttcttaattcctcatataaaactttgattatctcctcctatctttaacgttgttttcaaattctctcccaaaggctatagttttcctggttgctttggcaacaagccacaaaaaggaaaacccatgttaggctcgtgtttataaggtctgagcattcctaacatgtaccgggtacctgctagctcctttcatgtttccatggacttattttgtcacaaaataaattaccgacagttagagagtctactgtcttttgaaaagtttgatcagtttagctttttaaaaaatatctttttgtatcactgagtagtagtttttcttttttgaatagtgagtattaaaaatgctcctttaattctcttgctcagatgtgtaaaaatgtaatttctgtactacattatgtatcataaaattttgtattttttcaatgcttttcctaacagttggggtagcatttattgttagtcatttttaatattgtattcaaaaaactacaggtggataagggtttgacttaaggacagagtakgtgtaggcatggggaatatccgaatctcatcgctatttccagcccttgtactaaatagttaaataacgactctattttgctagtataaagtatttaaactttaaagcatttaaaagccaaaaataaagatgaagtatagtgtaattgtaatgcaagtattatatgattttttaagtgctttgagactcaaataaaaatgcttaattatttaaaaattatcgaataaaaatatttcagggcagtcagatgtttcaaagggtggacttccagggctttacagaagaggcccttaggcctgtgaggtggggcttaggtgaggggacagatagtggttgggattcagtttgtcggaggctactgccaactgcagcttttggttttaagtcttgccactggccctttaaaatggaactaacckggggggacagaatcctgattacgtgctgatgtgtgatgtatgatttggacagttttacacacacacagacacacacctacttttctgttgacctgctgatgtacaatttggatggtttacacacacgmacacacacacacacacacgtgcacacacacaatttttctacttttctgttgatttcctttgccaaccttttgtttggtgggaagtcagaggaggcagcctctctagatgggaaataagaaagatggcattttggagatattttatttctgtgagttcttgccagatttttaattgggaaatgtgtctgccacttactgttaggtgatttgctttccaattaaatgttgtgtcactttataacttggcctgtaataaccagtttaattgggaagacaaactttggttgtgacttcaggagaccttattgaaaccttggagcagagcttttgaagacacactctggttacagatgtcaaggaggtttgaaggcagtggaaggctcacattttcatcaacttttatgtcttcacagaagttgaaatttcaaaaacttagaaaatcctttactgtagacacctgttaaattcccttcctccttggagagtattttggtcagccctgtgtttaattcaaagtaaactttgttgaaggggtccaggctttgaccagggctttgaacgaacagctttgaggttcgtgacacagtttgtggcaggaaaggaaagtagtcactctgttctgagccgagtcttggaagttgggtgaggtgttaatgttctttccatcaccatctcttcttttcatttgagcccatcacataatggtgtttggtttctagctctctttgtaccctgggacatcttggccctactgatgctgtgttgtttgaaaattactactagaatacccagaaacagtgctttcaggaagtcctgggatgtctggcagyatatgtgaacgtaaggggcaacacaattaccgtactctggctcagaattagtgtcgtggacccatgtcttagtgtacctcgtgtaactgttaacactgggatttcctgaaggctttgaggcctgtagtattgatggtggtggtatggtcaggttttttcaagccattatttgtacatagatgtggtcacagcctgtggtgwgaattgctgtggttgtgtgttgtagttgaaacttgctgtattacctgtgtaaccttggaacagttacttaaaaccaccgcgtcttagtttcctcatttggaaagtgggctaatacaatctgtgtttttttggaacatcacatgagatgagrgtatataaaagtgcctagcacagtttggcacacggtaggcactcatatgttcatttcctcctttctaggatctgtagcctcttctgttaagaagattcttttgatattaataaatttgccggatagcaaccaggctataatgttaattttccaccagaaataaccttgacgcgttgactggagtgattccatttgtcaggatgttgtctttgtaaccaggaaatcttgtacagctgaattaagatagtaattatttggtaatttgagagtcagctgaagaagctagatttaaatgcatgtatggttatgtgtgtatgtaaaacatgtaaaatataaacacacataaaatataaaacatttattagattaaaagactgaaaagactataaacaagcaaatcaagggcccaatactctgttgagataatccttgttgtcctttataaaaaggacaacaatattgtgtattgtacaaatttgtaaagacgagtcataggaacattgtccagcaatctcatttcccaaaatattacctgtttttcaggttttcgtatggatcttgtccatgtatatacattttttaaaatattgctatacagtgttcatagttatatatgttttttaagtggaggaattaaacatacagaacagtagggaagaaaaaatcacccatagtttaatttcttttttttttttttttttgaggcagagtcttgctttgtcacctaggctggagtgcagtggcgccatctcagctctctgcagcctccgcctcctgggttcaagcgattctcctgcctcagcctcctgagtagctgggattacaggcaccatgcccagctaattgaatgtatttttagtagagacagggtttcaccatgttggccaggctggtctcaaactcctgaccttaggtgattggcctgcctcggcctcccaaagtgttgggattacagacgtgagccaccgtccccggcccacttgtattttcttcaccagcattatccactattaatacttttgcttccagtttaagaaaaaaaaaatcactctattgttttaaaaatagtactctcatgataaataattcaaacagtgaaaatgcagaaaaccgtgaagatgaaagtaagaaaaattatttcagattttatcctcctaaagttattatcattgatattagatgaacctaatcccagacccctcccttttctatgtgaatgtatgtgtgtatatgaaatgttgatggccagaaataattttttattaaatatgggatcttactctatatactaattttatttgtcctcctttttgaggtatacatgtatatgctagagtgcacaaatcttaagtatatggcttgatgaatttttacctgtgtaaccactgtccagctggaaatacagaacacttccagcatcccagctggagatacagaacacttccagcatcctagaatgatccttctctaccagttttttccagtacttttttttttgtgtgtgtaaggatatccatttccaacaccacttgttaaaaagactatcctttctgtatttgctttcttttgcaactttgtcaaaaaccaatttactttatatgtgtgggtttatttcttgactttctagtctgttccattcatgtttatattgataacaatactgcactgtcttgattactgctttttaaagttatgaagacatagtgtaagccctttaactgtttttttttttttgtttttttgagacagagtcttgctctgtcgcccatgctggagtgcaatggcaccatcttggctcactgcaacctctgactcccgggttcaaacaattctcctgcttcagcctcctgagtagctgggattataggcgtgcgccaccacacccggctaatttttgtatttttggtagagacaggatttcaccatgttggtcaggctggtcttgaactcctgacctcaagtgacccacttgcctcggcctcccaaagtgcagggattacaggtgtgaggcaccgcgcctggcccctttaactttattctactttttcaaagtagttttgggtcttctaggttgtttgcattttcttacaaattttagaataagctagtcagtttctgcaataaaacctgctgggattttgattgggattaatatatggaattgacatcttaatattgagtcttctgatccatggatggatggtatatgtctccatttaattcttcaattgatctcagcaattgtgtgtgtgtgtgtgtatagattttagtgtctaggtttatatgtctttggtcagatttctattttaggccacttcaagttgtgctacagttcatggaatgttgatgttcattaaaaaatgcattctttttctcttggtgttttgttttatatagtttgtgttgctatgctggttcactagtcttttctgctattcctaatctcttgytaatcctatctaatattatttttatcttagattatacttttcaatctaagatacagaagcttatcttctttatctggaagtttgctttgggtctttttcatgtctctgcttacatgttttaacttttcctgtagctttgtgaacaaatggaatataggtattataacagttttaatgtccttgtgtactaattttatcatctgtgtcatttctgggtttccattgattaatttttttttcmctcttcytttacatgccttgtagtttttttttttttttctttttgagacagagtctagctctcttgcccaggctggagcgcagtagtgtgatctctgctcactgcaacctctgcctcccaggctcaggtgatcctccccacttagcctcccaagttgctgagactatagttgtgtgccactgcgcccggctaattttcatatatatttttaggttttgctatgttgctcaggctggtcttgaattcctggcctcaagcaatccgcaggcctcagcctgtgagccaccacacccgggcaccttgtagtttttgagttgatgctagacattgtcagttttatcttgatggtggttggttttggatatttttgtattccactattcttgagctttgttctgagatgtggttaagttacttggaagcaatttggtcttctcaggccttgttttatgttttgctagttaggagcagagcaacatttagtctagggctaagtttgtctcactactgtgacaaaattcttttgagtattccactcagtaccctaagaattatgaaattttttcactctggcctgggggataggcactatttccagccctgtgtgagttcagatcattatttcctctaatcctttcaggttgttattttcctggccttgggtagttacctgtcacacgtgtgctgatcaatacccagctgatgaccctctacagatctgcagacttccgtgtgctgcagctctttcccatctccattactgccctgcagattctaaccaccttaatatgcagtgttttgaaacgggttttgtttatttgtttgttcgttactttgttagtccctgttgtttcttctgggcctaaagtagaagtccatcagtacttcttattttaaaaaaaatctctaaaagtactattttggattgcatcttctcagagaggaagaataagatattcagatgtgctgtttaaagcgatggcagctgggtgcagtgatatgtgcctgtagtcccaactacaggctgaggtgggaggattgcttgagctcaggagttcaagtcccattggggcagcatagtaagccatgaaataaattatgaccttggtccttatagtggccagtttttttttttttatgtgctaggggtttagctttgaaaaacataggtgtgtacagtttaacaggaagtaataagggaaaattcttgtattatatttgacactcttggtaagaaaataaaatatttcaagattcttaggagacccttttctgacttttatttattcttttaaaagtacagagtctttgtcaaaataaaatagaatataattaaagtgtttttccatttaaaacctattcattgtgctgaatattatgggagaattatactaaaaatatcacttgagagcttgttagaaatgcagaatctcaggtcctacctgacctacctgagctgaatctgcatttaaacaagattcccaggtgatttgaaagcacaataaagtttaggtagccttagaacaagaaaccccaggcttgaaatgttctcaacatatagaaatgataaatgttagtgacgatgaatatcctgaataccctgatggtttggctgtgtcctcacccaaatctcatcttgaattgtagctcccataatttccatgtgtcatgggagggacctggtaggaggtaatttaatcatgggggcaggtctttcctgtgctgttctcatgatagtgaataagtctcatgagatctgatggttttataaatgagagttcccctgcacaagctctctcttgcctgctgccatgtaaatgtgactttgctcctcattcgccttctgccatgattgtgaggcctcctcagccatgctgaactgtaagtcagttaaacctcttccctttataaattacctagtctcaggtatgtctttattggcatcttgagaacagactaatacacctgacttgatcattacacagtctgtgaatattacaaaatcacatgtgtgccataaatatgtacaaatattttgcattaattaaaagagatacaagaagccaattgtaattgttaaaatttttttttctgagataaacattatatagatatgttttttaaaaaagcattctttttttttttttttttttttttttgagacagggtctcactctgtcacccaagctggagtgcagtggtgtgatctcagctcacttcatcctctgcctcccaagctcaagcaattcttgtgcctcagcctccggagtagcgaggactacaggtgtgtgccaccatgcccagctagtttttgtattttttgtagacagggagtttcaccatgttggccaggctggtctcaaactcctggcctcaagcaatctgcctgccttggcctcccaaagtgctgggattacatgagccaccgtgcctggcctatttgacagatcttttaatttttgtacatggttgaaaattccataaaaatttatatgtgtgtgtgtgtttacatatgtatatgttggggggagggaagatggtgggaaacaggttgattgattgatgttttaatagattagtatattacagaagtgctatatattctttatgtcctcttccctctcccctagacactttaacaataacatattaaagtgtccctgatttctgcctttaagaaatctgcttcaatttgtataacccagaatttccaaaatttgaccacataacacctcttaattttttgtaaaacattgtttctgaggaactcaccagaaaagaagatcactgtggacaatgcttggagaaggatgtggggctgcaaaagaagtagaaaaagaggtagagttgggtgaagtaagagtagggggtagattttaagttgacttygtcaaccttgggctcagttttatgccttagtggggtgattttacttaatattagataatgacctttgttgcctaagagatttatagcttttggtccccagaagtgttctataactgagttaattgaactcttgaaaaactgtatgtgttgggtgtagtaattggccctaagtgctgtctgaagcaagacaccaatgaattttcaattgactttaaagcaaaaattgtttactgtcacttgatactaaatacatctctttgtattgttaggggatgttgtttttatgcatcagaaaactttttcagagggacttgtcattgtgaattgctatcaattgggatgggattatcttgtagtttgtgtgctctaataagacataattaagaaataagcaatcacaatgtataattgaatataataaaatgcgatttaaaagtgtaatgtagatttggttatgctttgagggaagccgtatcttatgtgattatatagtgatacacatcttggacatttctttaatgtgtaattttttacacattaaactcataattctgagtaactcagaattatgatgagggtctcttcttttcataattcactggaagcatttatagactatttgtcatatacaaaatgttctgcttagaataataggcttggaaaacttatttcttaacttgtttctttagtgcttatattcttaactatctcttttcctcttcagtttgtactttcrctctattcatacttaggacaggcttttgtttccctgatgacataataggtatatggtactgtcagccatttctcagattggccctttagtattttaaaggcaaagagaaactgactgtcatactgtgaaattagggctgaatagatataataacttaatctaatgtcttctggttaaaagcagtttgggaaagaaaacaggatttatgttgtaaagaatcacatcagctctagactctttttttcttgcatcgggatgagtagcaacaggaatattatgttctggaaagatcagtaagctaataattacctttttttccatctcggagtgaggttctgaaactagtgaactcttcagcatttgttgagagtttatgcttagtttttgccttaygataatgtgtttgaatattttgtaactaaatcaggataaccccttctctatctagtactctttccattatgtagtttaagaaatttcactggggccaagatcgcgccactgcactccagcctgagtgacagagctagactctgtctaaaaaaaaaaaaaawttcactggaattgtcccaacaagagagaaggtagcacggattgggtggttcaggtgcttgatgagtagaaaaggcagggattcggtgacatagtttatccacttaggggcccattttgagtacttttaagaggggtcactgagatttgattcttattgtagattgtgctctgtagagctgttgcttcctgataagtgatttttggatatgtgaagctctacttgtaattagtttttctgagttgcttgaagggatttccattcattgttttgttcatctttattattcctggaggagaagtcactggatgccaacaaggaatgtctttagtagacaattaagccgattaactgttttcagaaagcatgacttaatgctaactattctgcaggtgtcgccaaaattcaggtgtattacattaaatatttcttatagccagttaattagtttagttatctggggctgtattaggcagctaattcttgtggatttgccaagaatctgtgttgcttctgactaaggagagtgactgataacatttatcttgaaaaattaaccaaccaaaatgacactgcctgtgttttaaagtttggtatattagtctgcttgggctgccataacaaaacaccaaatactaggtgactaaagcaatagaaatgtattttctcacagttctggaggctacaagttcaagatcaacctaccagggctggtttctagagaagcctctcactctgcttgtaaatggctcccttgctctgctgtcacatggcctttgctgtgtaaatgtgtggagagggcttctccttccttttcctttcttctaagcacatcagtccttttggattaaggcccacccttataacctcacttaacctttattaccttctttgtaggctgtgtatccaaatacagtaacagtgagagtcagagattcaacatttgaatttgggagggacacagttcaatttgtaacaggtggtaccctgggcactcttattattttgataaaatatcctaaactgcttctagagtgagaatctctcatcacctacagatagtcttgaggctcgggcaagagccctggtcaagctgttaatttttcacaattgtttgtcaatcttactgcatgcttttctggcttatattaaaattaataaaacataatttgatctatttagtcctgtaagttcctgaaattctagacttaaattaaaatgaattgttggaaaactttgtacctgggctgtattcagatctttcaaaatctctaggcctgaattgagttttaatgttatgttcttgaaggaacttacaagaaatggccatgtaagatttgtgactttgtctgttttcagaagattgttaaggacatcttttactatattaggtcttccatgttttttaagtgaaagatttcttttagaatttaggactagttcaaaatttgcttccttaaaggaactggagtccatattttttgagaatgagaattatatcatgtgatgtgtctccttttgcctgggctgctaggaagctcagatttagtttgggggctcacttcatattaactttgcttgcccatatgatctgcatagttgtcttttacatttatttggtggtgtttagccctgcatctctttagtcccactttctcatttgtattttactttttattgtttatattcttgcacaagccatctcacatcttttttgggaagaggtgggatataattaaaatgaaacttgaatgtagatattgttactcagtttcacaattaaatactggttgaaaggttatcaggctttggctgggtgctcttccccgagtagtttcatagaacactcagagtaaaagctcacaaagttgggcctggtctggctcccagttttctccttgattcatttcctgtcactgtcactctttctcaagtctctaaagccacattgacctccttgccattccatgttccttgagcaggctaaacacaccctgtttcagggtctgttctctctggaatcagcttcccagatagtgccctttctctctcactttctagtaagctgtattcaaatgccatctttatccgagaggccctccctggcctccttatgtgaagtagcctccttcctccttgcctgtcttggcttttgcgtagctgttacctcccagctcccctcactagaacataagcttcatgagggagggattggttttgttcattgctgttatgtatctctaggcccttagaactgtgcctggtaagtaatagatacttagtgaatatttgttgaatgaataagtgaattaaatagggtcacgagcaactatttgttcttttctacagatttttgagcatgcatttcatgtgagacaatttagttgcaattgtttcttaaggctgggaactgtcctccatgacctctctagatcctgcatcgcactgctgctcattacttagcttttactaagcacttaatgtaccaggcactgtaagaatrtagagaaaaggtctgatctcagttcagaaataaatatcctcaggaactttagaaagggataggctttaggggatttgggctaacaatgttgtgattcatagattatttattttgttcccaataatatatcagacaacacttccgtcacactttatattttcaaagcacattcacacatttctccagtcctaacaatatcctggcaaggcgggtattcttattgtcttacctgttttacaaagaaaaaaacagacccagaaaagttaagtcacttaccaaaggtcaagcaacttgaaagttgcagagstccgtttgaatctgggtgttttaaaattccagagcctgtgttcctttaatgtgtatgtggatggctcttgtttgatatagttgatgaggtagtaagagactttcttggtrtattcctaatggtagtattctagatttgggtttttctttttgcatccttttattccacttgagtgatgaatcacttttggtgactgaccttattttcacaggtgtgctttttcctttatttgatctttcttttgtctttaagaacaatactgacttttatgtattttctcctgtccggactccattactctattaagaccaaagtgaaagcaaaattgctccacagaaggaaccagtgatggtgactgattattttcctttcaaaacatttgatcgtctacactgaaatacagaggctagtatgaaaatgggaaacagacaaattcagttttagatctccagttatttaccctgggttttaatgcttgtttatgggactcacttggagctcatggttgtgaatccactagaacttaataacatatttgttcctactagatgttgttaacagtagctttacatgtgtaccgtggtccttttagccctttaggtaaataaattccttcctgggaattaattagtcatggttaagatgtaattcatcatgcaaaatatcagagctgtcttaatgaaaaattcttaatgatccagaaatgtctttgtgwccagcttaactggaatctagtttattcttttatgttcctccatgaacttgacaataatttataagtcataatcattttgagaataggaatggaaaaaaaaatctagagtgattcaataacttgaatacatcttgggttggcaactttatgccatttgtcctttgatcatgtcttttatttagctcatgcttttaaatcttgcccagattcaagactgttattactaaaaaagctgcttggtgctctctttccatccctaactgtctgctgttctctttacatatgaactgtggcttgatgagagtatgtgtcctgcagctcaggagttgaaggcaggaaagataggattttgtaacatgtatagtagaaagagcatggattttggagtcaaatatacttagctttaatttcaactctgatattaactatgtgcatgtgtatattttactttacctctgtgagcctctgattccttatctgtaaaaaggctggtgataatattttattatactagactgctttgaggattgtcttagattaggtatgcaaaataaccactgtattgcctggtgtattatagatgctcagtagtttttatcctgtgtctcactttcaccttcctttccaaacatgtagaacacagggatgcatgtaaatttctgcatttagttttaaaatttcacaagtggaggatgagtgagagttgacttgtcagcacttactgtcaaagggatcttggataatttttggactatatttttaaaaatggaatgtagttttaggctatattattagaaagatagtgttcatgttgtgggatataaaacctctttcygtttggaagtatgttgtattcacttctcagcacatctgagaggcaggttagtgaagccattaagagccatatggcccaggtttgaggtcagactctgctccttaaagactgtgccttgaataaaaaactccatctctttatctctacaaagagggataagtatggtactgatatggtttggctgtgtccccatccacatctcatcttgaattttaactcccacaattcccgcgtgtcgtgggagcaactcagtaggaggtgattgaattatgggggtgggtctctcctgcgctgcactgttctcgtgatagtgaatgagtttcaccagatctgatggttttagacagggtagtccctgcacaagctctattctcttgtctgctgccacgtgagatgtgcctttcaccttctgccatgattatgaggcctccccmsccatgtggaattgtaagtccagtaaacctctttcttttgtaaattgcccagtcttgggtatgtttttatcggcagcatgaaaatggattaatacaggtacctacctcataaggatgtttttgcaataaattaattattatgtgtaagccacttagattaatgcctggcacatagtaagttctatgtgagtgttacctgtttttgaggggacttcagatgaaagcaaaaaagatggtgggctgctggaagtcatggtgtggaagaaacagttgaagaaactggaggtgtttaacccaagaaagaactattgaaagtcctttaccatttaaagggaaattttatggaagaaggaatagacatttttttgtgttacagaaaaagatgagactaggatcaatgggtagaaattagaaagaggctgattttattttattttaatggaaggctttataataagtaaagctgttcaaaattgcagtgaattgctttgtcagctggtagagctctgcattacacagaggcttagaaggctgaagagaggttcatgacctggctggtggggtgagctcaatgacaagtgttgtcttctgcactgctatctgttcaggttaagggactagtgataatcccacactgaaatttgctgggatttgctagcatgtgtgagaactttctccctggaattagtcagctctttcatgctttgctttttttttttttttttgagatggagtctctctctgttgcccaggctgaagtgcagtggcacgatctcggctcactgcaacctccgcctcctgggttcaagtgattctcttgcctcagcctcccgaataactgggacaacaggcacgggccattgcgcctggctaattttttatatttttagtagagacagggtttcaccatattggccaggctggtctcgaactcctgaccttgtgatctgcccgccccggcctcccaaaatgctgggattacaggtatgaaccactgcgcctggcctctttcatgcttttatggtctatcatttattaatttttattgaatatttatctcagacaaayatttattgtctgagacattgtatttctggtctcatattgcagaaaagaaaacagaacttggaaataaatgttcaccgcctaccattgcttggcatcatgcattcaatccttgaaggaacccaatgacttagattttattattgttggragaccattctcctcagggctcttgtgtttctgaagttcttgtgagccaagcactgattgccctaagttttaggttattttgccaaggatgtttgtttagcaaacagcgttggaagatagagatggtctctcactccagagcaaggggcagatgtgtttccagtccagtctctgagcttagattcggttttcggagctcggagttcttctccaggagctgcctatgtgggcaggcttctctttgggcccatctgcctaacccttgtgggacttgggggcaaggggaactgatgtgaacatgctgcgcttacgccgcttgctgtgctgtgagtgtgatcaagtcttttggacttsaggagctctaggagttttgtgtcttctgccagcacctgtgaaactgtggctaacctcttagctttcgagtagaataaaatctcagccttcaccattcttgacattaaggaggaataaggtgacaatcagagagtttaaacctaatgcccagagttaagtgatctagtatttgggggcggtgggattttaacttttgtcttcagagggtgtactttttattatgttatggaaaaacgctactgtctttgctgctgccattactactgttattactggaacaataatagctaacgacaacaaccaacatttgttgagtgctagtgacataccaggccttgtttgatctcatttaattctcactaacaaccctatgtggaaggtatcttagtattttcactttatagatgagcaaaatgagatgccattactaaggtcatgagtagtcagtagggtggagccacaattctaacccaggcagctttactctgcctgaagagaccccactctgtagctgttaggagtgcaatctgaaagcagaccaacctgagttttaaatccccgtactattcctaaccttcattgtgtgaggtggtgtaaattaattcaacgtctttaaatctcagctgtttcatctgtaaaaagaggggagggaataataataggacctactccaaaggcctgttatgaggattaaacatacattctataaaatgtgcaacacagctggctcctggcagctagtaagcctctctaaatattaggggctattattatttttattatccttgctgccttccttttctctaattaaaaaaaaaaagctttaatggttttgcactctgagttctataatgtaaatatttttcactaaagacaaaatattcatcctagtttacatcaagaggatacattttaaatatggggcaaagctggcacagggtatttcttacataaatattttcttgaaaaaggaaaataggaggcagaacccccagtaggcccaatttcctctctaatcttcattttagtaaccctttctattcccyaaataactcctaatgatccagtaatgtgttaacagtgacagctgatgccagaaaaggtgttctctctgggcctgacattttccttaatggtaattctaactagttaaggtaaacaatgtgaaatgtttggcatattttttccacaaatggtagtggagcggaaatcatgaaaagccttgtaaagatggcaaaccgatctagtgtagctttgacaattctgtgactgctgttacaaggggaaataatagagttaaacatctaggaacccttacctttgggacagttgataaattgaaggcattttctgattgtgctttactttagattaacagtctggaagttttcagatttaaagagcaaagttgtgtatcattaaaacaacaagaagacatgatacatgctaagctgctctgtacccaaatattgcaagtaatcttggtagctctatctttgaagcccagtttcgtttacattctccactctgatttactttaatagtcaaacacttgggtggtattctctacctgcaagaaaccttggaagtagtctggtttagggtcaccagtttacagatgaggaaacaggatctctcatgtaaaggctttaaatcaagtcttgtggttcccagtagtgttcctttcctgagcatcccacgctgtcctgagtggcttttgcccttcccttcattgcctttgttcctgccatccccctacccgtattcatgatatagctgatcttttggcattcctaacacctaacaaaaagaattgtaaaattctttttggaggttagattgaagtcaaagactggcctgaatttccctataaattggaaaagaagttttatatactgtgtggctcatgaattaagatcctttgctctaaatgacagttcagagcagactattgtacagtattttgcttgcaaatatctagaagtggatatgtgattaatttgctgacagaccatctctgaaagcagttctaatgatggacttataattgatggcatccatcattgagaacctaaaatatccccctccctaaattaaaaaagataaatgaaataaactaggctgaatgtataagctgacaaatctgagggaatttaatgaaactctaaattaccacagccaacagataagaggaaaaggttcctttgttactgattataatactaaattaaaaaaaaattatccaagaaagatagtgggggaaacaaagatctgtggtccatgtatcaaacgaagttattgaaatatttttaataagtatatctatctcattccctggttattgttgattcatatcaatcttgttagtgctgttcgaagactagtaaatgcgggaaccgtcctgtaggatagcttagatgactgctgttgtaagagattttagaattaatatgaccttatttccagactgctgggggctccataccaaattcaggtcattcaaatgagcttttcggaaggtggttcctcagtgtataagtaattgtatcagttactgtgctttcagctatgtatgaaaaagaccaactgaaagtgacttaaacaatggatatttattatctcccctaacaagaagtcctgaagtaaggcagctgcagggctggctgctttggtggccaaggacatagtggtagcttggcattcctccttgtttttccttccatggttgtaacatggctgaagtgtcttaagtatcttatctttgtacagtgatacctagggttgggaaaggcaccttttcttgttactattcttgcagaaaattgttcctagtacttccttagttttgtctcattgatcagacttgtcactgataaggagaatggaacagttcactcaaatcaagagttacccagtctcttgaacagttcatgcctgcctgctgtctgattaaaatcagttctaatgccaatgacagaagagaagggccccttggataggcaactacaaatccacttagatgggctattgaaatttactgtgaaggaagttttgtgttttctgtttgtaacttatttcatttcctagttaataagatgaatgtgcttcaccttccttttgcattttactttctgcttcacctttcttttgcattttactttcaagttttacttagcttgatatactctctgccttcaccaggactctgtctactagtgacgatgtcgaagacagggaaaatgaaaagggtcgccttgaagaagcctacgagaaatgtgaccgtgacctggatgaattgattgtacagcactacacagaattgacgacagccattcgcacataccagagcatcacagagcgcatcactaactcccgaaataaaataaagcaggtattcctcctttctggtctgatggtggcagcacttcccatcactataggtgttgcagcttggagaggagccatggtagtggctaatggtccttaacaaagtgattcaaaatgccacttttcaggagttctgcaggtgtctggaaaggctggytgggaaagatcacagaaggcatcctcggctgatttctcccctcccctgtgtcttatccttggttctgccattatttctcactgcagtgtggaatgagacaagcaagatggcctccatttgcttgtgtcttacgatccatccctaacaaaccagaaggcatactggcccttgtattctccattctcattctagcagttattcttgtatttcacacatctaaacaataaagcataatattctgactgttgattcaatgcctattctgaatcttagtggctgacctattgacactcacatgaattggagggcagccagtcgaatacccttttatctgaatccaaaccacagaagcgagaatgtctcctacattgaagttggttgtgacttgcctgcatttattgtgcattcttggtattttttgtgaagtgaagaaaatttaacctacaaattatttaaacataaaatgaaatgtttatgagaacaatttttttcttttttttttttttagagttggagccttgctctgttgcctaggctggaatgcagtggtgcatcactgaagccttgaattcctgggctcaagcaatcctcctgcctgagtctcccaaagtgctgggattataggtgtgacccaccatgcctggcaaaaaaccaaaattcttgaatatcatgctttaattgtgactaatgtgtattaagttttattttgtagttttcatgttttggaacagtttttcttttatttgttatttttctctctttttctcttccttcctttcttccttcccccacgttctttctccctgtctctctcttctcctacccctcctttctcccctactttcttccttttgctgtaggtccttgagaaaactcttggttcttgggtctatgcctttagtacctaaaggataaaatgggtttgtaaggagtattttcataattggccaaaggatgaactgatcaaataagggttatgtagtataacattatagttatgtggtttttagctgtatttttgagatcactcctttaataccatttagtactactctgtgataaataacaataattgccaccacttattgaacactgattctttgcaagggatgattatgtccaatcatctcaatgaatttagaatttaaactctaatctcccagattctaaagccgttgttgctgatttycaggcatttttaaagcagcagaaacttttttttttaatgtgatattttgcagaataccagcatgtcagtcattaagagaggcagtgctctcctcttctttggttttggggtgagaggtccaaagcatcatacttggttccccccaccactgtgggactgagtgatgcatagactatggtttaaaattcactgccctgtgctatgagattggttaggggactggctggcctgtatctgcccagtaacagctgtgcatatggcatcttcatgttttgttttctgtccattagacttatattatgattttgtaagcagatacataaattatgcttctacaaatactgatgatatatgactttcagcttctaagagtttagttccagaatcagtatgctcttaacctttttggaagccatgtgttgacctctttatattttaaaattaactgggcatttttttttttttgagacrgagtttaattcttgttgcccaggctggagtgcaatggcgcgatctaagctcactgcagcctccgcctcccgggttcaagcgattctcctgcctcagcctcccgagtagctgggattacaggcatgcgccaccacgcctggctataactgggcatttttgaaaggaatactataattctttgcctttacaagtgctgagttcatcctatggatttatctgtgaaactagttaaagttatagatcacttgctctagatttaaagtaaactgtagtccattttgacccaatatactaagctcaagaggggtcaatgaatgtatagagctgctgaccttctggctttgcctcaggtaataacagcaaaggtgaaggacctcatggtatttgtattttctgattagtctggttgactgaaaagactttgtcctaatctcatgggcatgggaagcaccagcagtgatttctgctttgcttcccatcattctgagtcgataacatcttagccgctaacaaagaatgttcgcctgatattgaaaaagagccttgtcttgatcatttcacatttgttttagtagccacgtttcttaccatcctcattttcagtatgccagagttttgagcaaaagaaaataacaatgaaaactttattatatctgataattgtcacgaaagtaaatgtcatattattctgggttatgaattagcttcaatattgggtagagaaataaagggtcagagctcttttcaaaagagcctttaataattgattaatgggaaaataaaaggggggagaatgaaaatgaatttgtttttgacaattttgtaccatgacagtccatttcttgtcaccaaggaaacactgatgttttctcactaatcttttcctgtcatttttggcttttaattacactttggattatatatgaaatataggtgtgtattttttttaaagtgaaaacatggatgattcagtaacgattgggctacgttatctcagagccaagcaaaatgttgagaatgtgtagatctgagttgaaattttctttctattttctgccaaaagaataaggattcatgcagcaaatatctgttgagtgcccgctatgttgctgattgtgttttaggtgctagggctgcacaaatgggaaacaccagttcctgtcctcagggagcttatgtgcaaatgagaggatagaaaacgaacaaatagataacgttgaacaacatttrtgtagtctctatgtatcgagtgtctgctttgtgctgaggattgttctagattttcaggtgtagaagtgaagaaaacataaacatttctgtccttgtggagttaaattctaatcaggggagacagactacagactataagtgaatatataagtaaagtgtggtatagcagatggtaagaagtgctacacacacccccacccactcaccagggaggggagactagggacttgctgttttagctgggttggccagaaagggcttcactgagggcccatatgagccaacacctgaaggaggttaggaagagtgtcaggaagagcattccaggaagaaaggaagcaggtgcccagatcccaagtcaggggcatgattggaggtttggagcagcagcaaggtggttgatgaggctgaagcaaaatgaggcatggggagagtggcaggagagagatgagagagctagggcatgtggtgtggtgggtgggtgtagggaagtcacgtagggtcttgtaggtcactggaaagacattgattttaactatcggtataatgggagaaatgattgtaatgctttgagcacaggaataacatgatgtggctaacatcttttttttactattattatactttaagttttaggktacatgtgcacaaygtgcaggtttgttacatatgtatacatgtgccatgttggtgtgctgcacccattaactcgtcatttagcattagktatatmtcctaatgctatccctccccactccccccaccccacaacagtscccagtgtgtgatgttccccttcctgtgtccatgtgttctcattgttcaattcccacctatgagtgagaacatgtggtgtttggttttttgtccttgcgatagtttgctragaatgatggtttccagcttcatccatgtccctacaaaggacatgaacycatcattttttatggctgcatagtattccmtggtatagatgtgccacattttcttaatccagactatcattgttgggcatttgggttggttccaagtctttgctattgtgaatagtgccgcaataaacatacgtgtgcatgtgtctttatagcagcatgatttataatcctttgggtagatacccagtaatgggatggctggtcaaatggtatttctagttctagatccctgaggaatcatgatgtggctaacatcttaaaaggcccactctagctgctgtgctgggaatagatttcattggagaccaaggcagatgaagatgttcatatttgtgcattgtcaccttttaaagcttgagaccacagaactgtttatgcttgccatttgagagagggtctctctccatcacccgggctggagtgcagtagcactatcatgaatcgccatagcctcgacctcccacactcaggtgatcctcttgccttagcctcctgagtagttgggaccataggtacattccaccatgcctggctaatatttgatttttttgcagagactgggtctccctatgttacccaggatggtctcaaactcctggcctcaagtgatcctcctgccttggtctcctaaagtgctgggattataggcgtgagccgctgtgcctggcctacatgtctcattttttgacattactttcatatattgatttacattatattggtagattctatgtttttgaggataaaagtgagctgacagatggatttaactttcttccctgatggtccaagcttttttaaaaaaattaattattgatttattttagagatagggtttcactctgttgtccaggttggagtgcagtggtgccatcatagctcactgcagcctcaaactcctgggctcaagggatcctcctgcctcagcctcttgagtaggtggtattacaggcactcacaaccatgcctagctaatttaaaaaaattttttatagagacgaggtctcaacagaaggctcataggctcagccttgataccatgtacaattgatcaggtcaagtaatgtggacaataagcaaaataactgggcagttctattacttttgaatgcattgtacaattgctcaaaatgagatgttattgcattggtaaacctccagttccataggttctgccagtgtctctcataataacaactgatgggcttattgtagcagcagcaccaaaagaaatggatacgagttgatacaaattggggagttgggccaaatgaattggtatgtttctctgtggtgtactaggtgaatgagatgacctcagatttctttaaagttacaaagtagtctaatgcttatcactggaacagggtaggttgaagggagatacttggctttgttgagatgtgcacacaaacacttaacatttcatcccaattttgaccaccctattggtgctagatcaagctctgaatctcattttttttgcctataatgagaaataagggtacacgattattcaagtgaagttgttagggcttaatcattgagtaatgaaacattcattatttggtagatacctaaaataattctggcttttaaatgcgattataccttgaaaggtagaattagaacgaggaataaccttaatataaaaaaatgtcctagtagaacaacatggtttgctaggaagttatttacagcccaaatataagatgctgcttgtatgagaaagggaagaaggcctttggtttctagaaatggacatgctaaacagtgggtaataatgagatataattttaaatgcgtgcagcactctagagcacattaatgcagttgctggaaccatgaggtgatctttccattaagttcaggtgtgtgtgtatttgtgtaaaggaaggtattggaaagtgttgaggggagcctctcagaatttcagaacttagagtggcagctgaaaaaacccggggaaagaaagcacagacagtacaagtttgaaggtaatttaaagatgatttgtagttctaaaaggcttttaaacagaacaatgagtggtatttccaaggttcgttctttccaggtgctttctaactaacctgcacaatgtgcacatgtaccctaaaacttaaagtgtaataataaaaaawaaataaataaataaataaaaagaaaattcaataaaatacataataaaaatgtatcattaaaagtccagaaaaaaaaaaaagactccatggaaaaaattgggttggtctcttacggcaggagaaaacctatgatagtacttatatgtagatttactttcgccaacaaaattcaacaaaaacaaagaagacatctcagtattttatacttttaaaattaagaatgatgtcgacacattaattttcatttactayccttgactcatagataactttttaggatatttctagtctgtagtttcaatgagttgtttgcacattgttgtattctattacagataatatgcatgctcagaggcatttcctcccttctttatcttttccttgatccaaattcagtacttttcttttctattttttttttttttttggaaagagtctcgctctgttgcccaagctggagggcaatgatatgatctcggcttactgcaaccttcgcctcccgggttcaagtgattctcctgcctcaccctcccaagtagctaggattataggtacccaccaccacacctggctaatatttctattttttagtagagatggggtttcaccatgttggccaggctagtcttgaactcctgacttcaggtaatctgcccaacttggcctcccaaagttctgggattacaggcgagagcgatcacgcccagacaaattcagtacttttctgattttatgacttaaaagttatggtcttccccaggcctgtgtccataagcccctctcactatatagatctctggtcttcctctcacaaatgctaaggcagttttattcaaagccccacttagcttttctcacccctttatcttttccaaaagagrgctgcaaaaatttcaacttctctgccgtctgtatcatctcacatttctattcacagtagcctcttgggccctgttttctttcttttctctttttctaatagcctctagttagggtgacttgcagattttgtgaaattgtagctattgctgaataggtgattatgagcaactgtgaagttactaaaactctgagaaagcaaaggaaatttgtctctgacttgatatcatggtttgaacaaccttttcacccatttgttttaggaagaaacagagtaacataatttttcaatcttaattatacttataaattaaatagaatgaaatgaaaatactgtcatcacatttataaaagtagaacagagttttgagaaataaatgtttcagtgtaatttgatacttttctaacatttgaatgttattcattgatgggtatagccctgttcctattaaaaaaacctttttttttaatttttaaaaattgacaaataaaaattacatatgtttgtagtagagagcatgatgttttgaaatatgtatacactgtggaatggctaaaccaagctaattaacatatacttcacctcacatgcttatcagttatttgtggtgagaatacttagaatctaccttttcatcaattttcaggcatacaatacattgttattaactgtagtcaccatgttgtgcaatgggtttcttgaacttacttctcttgtctaactgaagtattgtatcctttgaccaacatcttctcaacccgtcctctcaccctgagcccctggtaactactgctctactttatgcttctatgagtttgactttcttagattctacatgtaagggagataatgccaatattcatctttctgtgtctggctgatttcacttaacataatgtcctccaggttcatatgtgttgttgcaaatgacaagagttccttttatttttgagacagggtcgcactctgttgtccaggctggagtaaatggtgcagtcggctcactgtagcctcgacttactgagctcaggcgatcctcccacctcagtctctctgctatctgggaccacagatacttttttgtggagatgggttttcaccaggttgcccaggctggtttcaaacccctgggctcaagtgatctacccacctcaggctcccaaagtggtgggattacaggtgtgagccaccatgcccaaacagatttccttctttttaaatgctgaatggtattccattgtgcttataccacattttctttatccattcgtctgttgatggacacttacgctgcaktgatcatgggagtgcagatatctttttgacatattgacttcaattccttttgatatagaccctgtagtgagattgttggatcatatggtagttctattttttaattttttgaggaaactccatactattttccacagtggctgtattttccatctttattgaggtatagtttacgtacagtaaaatgccatattttcagagtgcagtgcaatgagttttggcaaaggtatatatcactgaatgtgttaccatcaccccagagctctctcctgcctttttgcggtcagttctctctcacatcctgctccaagcaactgctgatttgaattctggcactactgattagttttccctattccggaacttcgtacattattccctcttttgtgtctagttttttttgcttgccataatgtttttgagattcttcattgtttcttcctttttgtggctgactgaccctatcccccaagttctaaaataacatttttcatgactgtgactttctaatcataaagcagaaggctcagggcaatttagtattaaaagttcctgtagtttctttggtctgtagctttgttacctcggtttagagaattttggtgtggtcattttctacacagcctgatgctaattttttatcccccacaaattctatttcgcttttccttccatgtagtaagcaaaagtgagaagtgagctgattacattgcacatatsctagtgtgaagtgacacaattgtctttttccaatcagataggagtttgccaagctttactgacaccctgtaagtttgtccctgactcttgatcaggagcctagttgggtgttgtataacataagatttatttttaactgtttccatagtaaccgttacacatagaggaaaaagctgagaactatagtagcaaggtgatataagtaggatatcagaaatcagattctaacagatttgaactaagatttaaaatggaatgatttaatagctggagtccttaactcagagactaagaactccagtggaatttaggaatggctttgagagatatgttttattttattttattttatttttttgtgagacggagtgtcgctctgtcgcccaggctggagtgcagtggcccgatctcggctcactgcaagctccgcctcctggattcatgcaattctcctgccttagcctcccgagtagctgggactacaggtgcccgccaccatgcctggctaattttatttttgtatttttagtagagatggggtttcactgtgttagccaggatagtcttgatctcctgacctcgtgatctgcttgcctcggcctcccgaggtgctgggattacaggcgtgagccaccgtgcccggcctgagagatatgtttaaaagtcaaataaagccacaaatgatgataaaagactggactctcctacctcatcctaccccggtcccagttccaacatctcagagatgctgacttttactcttttagtttttcttttttaggtatttctatttctaatagtatgcttgtgctgtgttttttattttgaatgttatatattaacttccaactatggaagatgaggacttagcccccttcccaatctctccccatcccactacatcctcttccttcatcctctctatatagttgtattctagttttggttaaatagatgatcagtgcttacctttttataactacactaatatgtacatctaagccatacagcatactgtgattatgttttgtgccattgcgttgttgttttcctggagttactgattggatagtcctgttgcctttcttctgtattgtatttcctggatcccttgtttcttctcttctgttttctcttgtagtggtggaacacattcttcagtagtttgctgagatatggtgcatataaaattgagtttttgagagcttgcaaacctgaaaatatctttattctttcctcatacttgattgatagttcttctgggaaatacttatctcttaaaattttgaaggtatatcattcctttgtcttctagcttttaatgttgctgctgagagaaatccgatgtcattctgattcacaaggctttgtataggtcctgttttttcctttttttctttgacagcttttatgattgtctctttatcccttgtgttcttacatgtcagaatagtgtgtcttggcttgggtctttttgacttccattttcttgagcacttggtgtgccttttcaatctgaaaactcatgttttggcatgttctggccttttttttctttcttcttcttttttgtttttttttttcaaaagagctggagtcttgcttttgttgtccaggctggatgcagtggcactatcatgcctctctgcagtctcaacctcctgggctccagtaatcctactgactcagcctcttgaatagttgggactacaggcatgtgccactataccyggctrattttttaatttatggtggagacagtgtctccctgtgttgccaaggttggtcttgaactcctgagctccagcagccctccaccttggcctcccaaagtactaggattatagtaagacactgcactgagcaggcagttttttaaaaaaattatttaattattttttaactatttttctctactccatttgtttcgcttttccttccttggaactcctatctggtaagtgttggaccttttggatcaatcctcttgctttgttttacctcctatctcattttttggtgttttcctgtttggagatttcctcaaggataccttctaacctttctattggagttttaaaatttctattttaatttctaatagttgtttttcatttcttgaaaatgtttatatcgtcctgtccttggttaattgatgtaatagcttctgttatttttcctaaggatgttaattatagtttaacaaaattctgtttcctgcatagtttctgttcccccgtgtcctgcttcagtaattttctctgttttgatgcctgccattccattctgcaggctttctgtgcatgtctgatgatccttggctaaccatttgtgtgtaagaggcaggcactacaaacctgaytggaagctcagaacatgttatggagcttgtccataatgattgggtagggactcagcagtttcttcagtgaaacctcaaatgtcactatctgtataggtcttcacttggaccagttcactttcccaagggagaagccatatgtctcttgtgttggggtgaaaagtcaagctgtcagtgttttggagcctaactattgacggagaccgagggtccatgggggctttggatcgtactgtttaatatgtcccactttgacttcatcctcctgttttctgtgcagtgtctcatgcctccctctcaaccatgcctggcatttccttgtctagatcctgtccaattcagttgctcccaatttggccaatgctgtgggggaggaaattacccatgtgtgtggcttgatggggatttggggctcagaatactcctatagaaacttttaactcagtacccctgccattagtatacttggtgcctcctttttggtgttagtaaatcctactccaggctaaggttttcagatttctctggcctgctaatttagttgcctactgtccatcttcttgctagcttccacagttttgttaccatcccttatttgctgttcttcctctctgttctctctttatgcttcaaaaaatttctttggtattaccttggtgggattgcaggaaggagtagaaataattggaatcatcttcatcagatttacaaagaggtctatgaccccccaaattaataatcagtctattatatatatatrtgtatwtttttttttgagacggagtcttgctctgtcgcccaggctggagtgcagtggcacgatctcggctcactgcaagctctgcctcccaggttcatgccattcttctgcttcagcctcccaagtagctgggactataggcacccgccaccatgcccagctaattttctgtgttttgtttagtagagagagggtttcaccgtgttagccaggatggtctcgatctcctgacctcgtgatccacccgcctcggcctcccaaagtgctgggattacaggcatgagccactgcgcctggcctactatacttattaagagaggttacaaggtcttcttattaaagacttttttttaacatgggagactttcatagaagcatgatttaggtgttgtcatgaagtcgtaggaagggattagatgctttctcaagaaatcttttaatcttakcattttgtcctcatattttccgtacttgttggatgaatgttgaaatttagttttgtaatcaccggaggcatagtgtcagtgaatattttcatcaccacaccaagtcttgtagaagaacaatacagattttcagttaccaaaaatacggtagactctttgcactgatggacatgtcccatgtattgatgaaggtttggattatacaggtgggcgcatttgccaaaacttaccacgtggtacacttgagatgcattcatgggtaaattttacctcaaacagaagccagaaacaaaactgtaaagaaatattaaactcaaatttaaataaaaatacatgtgaggactatcaaaaatatatgaaagtagttctgtgaattttgaaagatcatggtttttaaaatttttccatgttgaaaaaatggaaaattttcaattaggggagcaaataaaaacttattcctatcacatgcatcacagctacctcctccattcttctcctctcccttttattttgtcatgttttgcctatgctagtcactatactatgcagatctacaggtggtggagattgtcttatttaatatctaatattcagaatgcaaggcaaaaaagccttggtatgtccttttattttcagattatctctggatgtgcctactttcttttggaagctggggttacttttattttagttaggttgagcacyctgtttcttggttttaaactttagctggagttctagagctagaagcttggaccaagtgacctatcagctggataggaaatttgcaagcattggggaaggtataatagcatggactctcacattgatcattctccttttagatatattaatatttatgaggtacttcatattttcagagtgctttctctttagtaatgttttctagattcactcaaaggtaggttgggagtagttttctcatttcatgggagtgaaattagagagaggtggagatgtgcccaagtgagtctatgtcagaaccagrattagaattttggaggcagaccaaggagaataagtggcagtgggaattaggaactgctgcatacagtagtaccagtgaagactactaaccagattataggtttagactggcaagactttggactgacccaagaccgaatctgttttattgtaggtaaaagagaacctgctttcatgcaagatgctgctgcactgcaaacgggatgagcttcggaaactgtggattgaaggaattgagcataagcatgtcctgaacttgttggatgaaattgagaatatcaagcaagtgcctcaaaagctggaacagtgcatggccagcaagcactatctcagtgccactgacatgttggtaagagaacagcctgtgctaagggtcatttttgttaagatgtaaaagcactctcttttattctctctgaatcctgtaatgcatgtagcacattacaaactgccctcttgggattcatgagcccttgaaggtgaagcctggstatttctctaattccagtgtttgaaatggtaggtaattattatttatgtattatctgtctttgtaacaatggcaagaaatataatagtaagaaaccagtacttaaatcaggttagaatggtaatgagaggtgttttttagcttcagaggaagatagttaatgaatcccattttaaacaatgaaatctacatgagacagaacttctgaagatttatagactagtgttccacacattttttgaaggaatttttacattagggctttgttcttttccttgaaattgataagaaataaaattttgggrgactaatactggaagcaactttattgaccaagagtactccacaatctagcctttagcctccatcttagtccattgtgtgtgctcctttttgaattgctgaaagttcccagaaggatgcaattggtggttcatgtggctgagcgtcaagaagatgaataaaaagtagaaatacagagtttgctccctaataatcctctttcccaaggcctgtggctcttagagagggctgctctttctcccttcccttttacccacccagtcccacttccatctcattcagagttggttaaggaagctctctataggagctctgagcagcagatgggctgtatttgaattgttgttttttccttccccacagtaggtgaaagtcctttacctttgtttcaccaaattagattggctttaacactggaaaaaacactgaggggaattggtagggacacagattaaatgctctaagtggttctaattcattcagacttccaagaagaattttgctaaaagtccttcataagaagctttttaaaggaaatttggtaaccaaggagtgagaagtgccatgatattctatcagatattaaaacctggttatgtgataagactgaatggtcaatttccacagtggaaggagattaataatggttggcccttggctgggagtttaaggctgcagtgagtcatgatcaggtcactgtactccagcctgggcgatagagcaagactctgtctcaaaaagaaccccaataaacaacaaaaaaagattgactcttgggaatgacaaaagaattggttattttcagcatcttattcaaagtggcagcttctttaataataatgactatagggtgtctgatagaaaaaaattacttttcacctttagtgttgatttatgcattatgaatgcatacttgtcctatattctcaagattcagcaatcagaatagataagcaagtatacatttgtgtagcaaatatacatctatttgaatcatgattttttggagtgggcttgcttttaagtaagtgccacagattaaaataggttgttagaatttatttctgtgttaattatgttcatattaggatttcagatttttgtgttacggtctttgttcttaagggctaatttatttacttaagggctaatcaataatgaatactgtccctttttttctgacatattttcctcaagactcattaaataacttctttaaattcttggttgtaagttacagaaattcaactctagctagcttaagtaaaaataattgtttgactcatgtaaccagtctgccaaaggaataggcatgtatgtggaatgtcacctgtgtgttttctctgcatgccctcttcattgttctgctgaagactggtctcttcatgtgtgagggaggaggttgggtattgagggaaaacagggggcataggctatgtctacatctttccacctttacagaagaaaataatctttttttttttcataattcagaaatctagggttaggagctagattgagccaggttgggtatgataatcatcaataaaactatctggttggggcagggggcgtggtatagggaggaagaacagtcatgtccagaaaagagtgagtttgtaagacacattttccggaggttttgtttcgttttctgtttggttgtttatatattctagatattaattcttcttgtctgttagatatcttctcccaattggggatttgtctttttcctttgtttatagtgtctttgttataaagaaattaaaaatcgtaatgcaaaacaatttctcaatttctcagtattttttgttatgtgattttttttttttttttttgagacaggctcactctgttttccaggctggagtgcagtggtgtgatctcagctcaccacaacctttgcctcctaggttcaagtgagtctcctgcctcagcctcccaagtacctgggattacaggtgtgtgccaccacacctggctaatttttgcatttttagtagagatggsttttcaccatgttgggtcaggctggtctggaattcctgacctcaagtgatctgcctgccttggcctcccaaagtgctgggattacagccgtgagctactctgcccggcctgttatgtgatttttgatgcaagaaaattttttttccatcccagtgttctaagagaatctcctatgttttcttctttaacccgtcraaagtccatttttatatatggtattaactgaggatctaattttatctttcttctatatagtctgttggctcaggctgtttattgaatcctttttctactgattcatgatgctattttggtcacacagcaacttatcacatatgcatggatctgtttctgagctctttattttgttttaatggtgttatttgtacctgcacccaaaccatgctgttttaactcctgtaactttataatacatcttgataggaggtgaagagattctctcatcttgctattcaaaattgtctttgtggccaggcatggtggcccacgcctgtaatcccagcactttgggaggctgaggtgggcagatcacgtgaggtcaggagattgacaccatcctggccaacatggtgaaactccatctctactaaaaatacaaaattagatgggtgtggtggtgcatgcctgtaatcccagctagctcagaggctgaggctggagaatcacttgaaccttcaatagctaattgattgaatttaagagaattatctttgcaatgttgtgttcttatctgtgaacctaatattcctttcatttattaaaatcttcatttgtgtcctttgataatgcttagcaatatatatagtccttagaggtatcatatgtattttgttagatttatttctgggtatttcatttttttgttgttgtcttttaaaacagtagctatttatttattaaggtttctagttactggttgctggtgcataaggatgtgatgtatttttcttttttaattgaccttgtatttccctgaactgattcccaatactgtctgcctggaaagtgatgacttcttttttaagacctggctcaaatttcatcaactctctgaatgtcccagatattcagatagctaggtgcttttctttatgtttccataagctcatatgtttcattttaatataattccttttgtttgtgtggtaggtcattgaggatagtggttgtgtcttacctatttttgtctgccctgttcccagcatagtgtagctcatacagtcagagttcacaaatcattagctaaatgggtgactatgtggaagactgtaataccactacagagagaaaaaggtatttcttttgtgggagctttgttctgttttttcttctctggttatttatttgtttatttatttcttaatggcaaggttctctagtgtctaaccttcccttttcgtagtaattaaatgaatgacaatgataacaatagctaatatgtattgagcacttactatgtcctggtactatttgaaatatgttacatttgttagcttatttctttcaacaactccacttctgatattaccattttataactttgcatgttctgaggagttggcatatcccaataaacaatgatttgtatatcccaatatgcaaaaatttcgtggaggtaggatttaaagtgcacttaaaaggttggagatatcttcaacttggtcttttgtatataagattgagtagtaagctctataattgctctttcattggacttcacatgaaaaacaatcacattttctttctccatggttatgtactgttagaagtaaaatctaaggcatctcaagggtccaaatcgaaatctttgctaaaagacatcagaggaaagtgaagacaaaacaatctagtccttcaaaaccccctgatttccttggatttgtttgtcagaagattttgcatttctattttaaggcagatgcagatgcttagtaatttaatccctactcagaatagattaataaatccagagtaaataactccatggtgacccattgctcttggcagctcctgctattcctactgcaccatcagactggtctggtagctataggcttggcttttaggtgagatatttgtttcttcttttgatatgataaccgagtattgcataaaataattaaattgtcatgacagggaatgtctgcaaataggtctggccttttgtttctttcttcaaggtaaacagctgctgttggcttatgaaaagctaaaaatgatccaacaagaagcctgtatccgtcacattgaaatcagagacttgattaatattgtagcctgtagctttgtgatatgtacggtttaaattagacctttgcagtcattrtgctgggttgatgcaagcacattaatgacataatttctggttgcagcatcacatttctgcagtctgtcctttgtattccactcacattaattgaagtaattttgccagtgaagcgtgtttcaaacctctgcatttaaattgaaattttaattcccttattgtcttgaaaagacggctgaagatgccttgttacaggtttcattatcactcaaaacactccagctgctggttctaatgtacaaagagtgattaattctgggaagaattattaatataagaatagcagcttcttcccagtggcatgagccaaccaggaaggtatttcatgatagttaatattttcataaactttttttaagggaaaatgtgtgtagaagtctgcatcaaactaaaattgcacagatgagctttgaaaaccacttacacaagttctgatttatcatcccatagaagtcaattcataattgcattcaatcagtggaaaccaagccagtgcaaatagttttgaagcactttakctgacagtcacaaggcttgtgactaaaataatttcatttctaagccttcctgagattgtagagattttgaatgtctcttaatcattttgtctgtctttatttatatgccttttaaaaagaatccatagctgtatagtcagataagggttattatgataattataataacaacttatatttatatatctgccttcttcccagaggatcccagagtgctttgctgagagaatggtgtaatgaaattatttcacttacactgtgtaaatgtggccatatctgggataaagaaattagggcagctatttaattgaatagttttctaagatcttatgtaataaaataaatatatttgtagtatttttagttaacaagatcctttggaattggataacatggtgggttgtgaatgtcagcatgggtcttaatttgggttaggtcgtctgatgcttgaatcccagctttgactcttagtagctggatgacttatggttagtaaattatctttgctgaaagctggagttaagaataatatgtatctccaagggttgtcgaatggattaagtgagatattaaactgtgtacataaagtatatgcagtataaagtttttgaaatgttatttataatcgataaattttactgatattgtaggaaatgatatgatgattgctyccatgttataatctcaaaaactgcctttgaggtggacttcttttgagctagtaaaagttgaagtagggttggattaagcagttttgattccttttcttcttggcctaacatggatgtacctaaatgaaaaaccagcccaccttttttaaaggtaaaggaactcttgtgggtggatagggtttttctcagaaagcaattctagtcttctctaacaattctgtgttacatttctaggatttggcatggacaaatttcagattatgtgttatcaattacttactcggcttacattaaaaatatgttcatagggtacccattgattgtataattctgagcaatgtaatttgttggtaaagtatccaagatgagcttgtaaaatctacttttaggtaagtaaatatgttaatccactgggtatcatcactagataaaagccagatcagtactggaagatgtttgtcgtcagaacattttagtgttagaagagttggtgttaagctgttgtttctgtgagtgcttagatagcaggaccagtggaccagtgaggttgcttctatttgtgtcagtaaagctgtgtcattagcaaatagactgatcttattttctcttctttatgcgcaaggaatgggtgatcatgcatccactgagaaatgattaatgtgcaagcaagaaaaaagggagccaaaacatacatacatcccttttatctggcttgaaagtttctgagatctcacagaactgttttttcttattactctgggaaaagtatcgatgtgaaagctctgtagataacaggagctggaatattctagtgagcttattggactaaacctgaaagtggttcagtgactgtaaaacaatgttccagtattccgtatggattttccacaacatgataaaaatatatcagtgatcaataatgaaatagccattactaaaacccatctgttcctagtgtagaagagcagcttgaaagactgaggccaatattctaagctaataatttatcaggaaagaatctggcacatattttgataaagagacaaatgattgggtctttaacatgtgataatgccattgttgataacttctgttgtttgtatgtgtatgtgtgaaggtggccttaaccttggaggatattacttgctagtgggaagagacagatggtgaacaaatagtgtctctcatattatgttaagtactatggagaaagctacaataagacagggagactgggagtattgggatttggggtagggatagtgtggtttgctatttaaataggggtggtcagctgtagctgcttttagccgcatttgagaccccccttcattcttctcttgccttcaaaaagatttaggaaaagctgaaaacaaaatgagtaattttgtttttttatatctacaattaagtgagtaggtttgtgacagttttatttttctcttatagagtagaagtgcaggggtttgtggtagctgtttttcatgctgctcaaggccctttttatttatatttgtttttgaaggctggggtttttagaaactagattgtttgataggcacctggttattgtattagttttcctttttttttaaattttgcttttttatctgctattcatttgcctcttttaaagccaatggaaattctgttttattgcactaaagcctacgaggttcagcaatttccatttggcttgcttggctatggggcagtgattcccacactgcacattaggggatcttgcaagaattctaaattcaggtcacatcccagaccggttaaataaaagtctctaggggtgggccactgacttcagttattgacattctccaggtaatgccaatatgcaggcaacattggaactattggtgtagggtatagcttgttctgtggaattcagcaaaacttattgtccttgtcttcatttagcaacagtggtaagtagttggaaaccaagtatttatgtaagacacacatcacatggtgatactcacatttatgtagaagtttattgtttgaagttgctttgtggccatactttattgtagttttgggatacagctaatgagtatttggcttttattctgattttatagtctgattatttggtcaaatcggtttagtagttaaatgagatgatttagtagttaactcacttagtttttaaatgagatgattctccatgtttggactgacttgcactctttagaactgtcattttgttgctctgatttgtgcatctttgctgtgggtcctgatatgacctactgcagggatttaatggattgaaattagagaatatgtttattaatttacaagtggtgactatgtatagtgtgtcatagtggaaacaaagtggatttaaaagcaagaagttcttaattctagtcctgattcaacaacttaccagttccttgagcttagataaataaattacattatctctctgttttagtatccttatctgtagaacagataaacagatacttacctgtctactttatagaatggttatgagaataaaagtgaaatatagtacaggaaaagtgctttgtaggatataaagcagtataaaaatttaaaatggtgtaggtatcatcgtcgtcatttccccatgccaggtaaaaagaaaatgcaggagtctgggcttgtttacactgagcagcatttctattctggtgctaccatcattaatgcataccggttttaatcagataaaccaagtgtgactgtgtttgcacacttgagtgtacaggaagaatgctctaagtcgagaataatacctaagtcgtttgctgccatcctccatcatatttctggtttcaacctcacatacgacctttcttgaacagatttttgattggtcagtctgtggccagatgggaactagatgtttgtgtaaattgcagctgatgacaacccatgttgttgataggggacttcagtctgaacttgatgatggtctgagaatgctaatgagtagcttttgcttggcttgacaagataggaggagcttgttaaagaagtctattttctctgagattcatcccaatactaattacttgtggttgcctagctcttgaaatgaaaaacgccatattcctctatcattcctttgtgggattttaatagttcacgttagtaaagagctgtgtaagtgctgagcatttctaatggatttggggctcttgcagagtgtgggcgaaattgtcttgattgaagtgcgagcctgaagtgattctgagacctcctttgccaactcttaaaaagagagttgttctgtaactttttcttgtcccagagtaacaaataacatgacatggtgagtgactttagsacgcttgttaaaagagaatggcttttctagtggtctcttctattggattttgtagtagaaacctaggttttaatgctctcttacagagcactgatgggaactgggaattgaagggaccatgaggttaggaacaaaagaggttttttttctaagctttcctatgagcagtttacaattatctttctcttaccgtgttacgtatagtttaatttcttcaggaaggtaattgtgaacagatctgttacaaggccttttagaagaaataaggctctcaatgtggaattatgcatcagaacccctagaactatgcatagcttaggacttgagatctacttctagaattttattttaaagaaagaattaagaattataactgttttgtgttacaaatatgtatacaaggatacttatcacagtaagatctatgaaagtaaaaagattagcaatgacttaaatatggggaattggtttaagtcattgtatagtcatactcatggactagtatgaaaatactaaatataatgtttagggataggcacatgctcccagtgtattgccaaatggaaaaaacatgtttaaaaacaagtatttttgcaaacactttgcatggaaaaatgattggaaagaactaggttaaaatattatatattattgcatcagatgagtgacaatatgatgatmtttttcttttgtaattttctrtgtttttcaagttttcttggttgagtaggtattatttttgtaatttgggagaaatgccaagcttaagaaaaaaataccattctaggcctgacttttttttaatctgtgaaattagggtgggaccccagtcttgaaaacctttaaaggtctctttcaatagaaagttcttagttttcatctctcagatactgccgttctgtgaggctcaggctgatagggtatgttagaagacttggctgttgctactttaggaggggaaaaaaaagattactttcgctttaataaaatatgggaattatttgtggcagaatgcactgatgtttaagggggaaaaacaaaaaactaacaacaaaagagggaaccctgaagaatgcttaagaatagcttaataaaatggtatgcttttagaacaagtccgcatttcatggtagtaatagggtgaaatctttcatgaaggaagaagtcacatttgatcctgttttcgagttttattttccgagatagatctgaagatactttaaagaataaattcacaagtaaagggccttttctttgacagcactttatcttgcaggcccccctcccttcattcacttatcaataacttcatctaatttgccttatcctgtaaattccattatctccctggcagtctattgcattaagcccttagtacctaatatcgcctcatttacattgacatatgcttgacctcagtccttctcctctctttgttaatgcaccaacaagcactgatatctctctggagcattatcatttgctgttagctcaactaataacaacccctcatttgagctgatgaaggtttattaaataaaaacatgcagtaaccctggcagtaatgaagggagaagggaggtagacaacatcctttttttaatggtgagagtacaccaagtctgctttataggtattgggtttcctaagggagatagggcacctgaatgggtctgatcaatattattttatcagggtgatttaagaatgggcatttttgattgtcttacttgatcactgttgattagcatataggctgaggagttaggagaaaaaagtattcttgctccaggcacttggccttgctcctgatgcagctgtctttggaactctgtcttcagtaccagactgtcaataaccctgcagctttcaggcagtggcaaagcttggccatagggagccagacacatcatcttagtcttctccagtgaaactgaaatcagaggttgtttttcccatagatcccgcaagagtccctgaaatcttcacaatagccctgacccttgaatgaatcccctttattttccctttcacgtcccatactcttattcccccgaccaccatttgtacatgaagtccggtctactggtgtcatgctgtaaacaaaagttacgtggatgctgttattaggtttgtattaacagttgggaattttgggttcacttgcttgcacatttatgtcacatacatatatattgtggtatattctactagtaaaattgttcctagtttatctgatgcagttaaatacatagagttctataaaggctacaatgtactgcaaagagtgctgtgatgtcccagatctatcaaagctttcagacttgctgctacagctgttaggttggaccataggaaataaccaatatttgatcatttttaacttgtaaaaacagtattttcttatggttcaagttaataatatgatagataccattttttttttctaagcttcattgtttgttttactagtttctgtctgataaagataaaaatttccgacttgggaaaaataagatgtagcaatgtagaaatagttggtgaatgaatgatctgggattcttggctcctgtgtgataaatatcttcgctgcttgcttagacgtgagtcggaatcattccacattcactgggagacctggaggcttcttgtgcccacccaggactccctgatcctgaaggtggacacttgagggtggagggccctctaggggagcaggccctaaaaccgctggaggttgccttccagcagtgcaggggcaggcagcggcaggtaggtgacctgggcactaagtaaatctaggcttcagggcatgtttcttttgttcatacagagattttgtgatgttcttatttattgaatagttgagactgctcaaaaagtttgtttaactgtgtcttatgtatatgtaggaagggggaaggtatcaattctctggagtagcctaattttatatctttttactgcaactccaaggtagaccatggcaacattttcagaatggttatgttgtcttgctagaaaaatgcttccttaagggagatttactgacctagtgaaaagtgataaaacattttagaaccatataattttcagagtcctcaaagaaatatttgttttggattcaacaatggcaatacatttgctttccttagggaacagtgttgccaaaataagcattttcgttagctaccagatggtttagttatcagttttgttttttgtttatacagcagtttttcttctttttttggcttgaaccttatttctattcacaaacagttactgatgtcgtttatctttgtgtgtcttactcacctcaactagaaaaataaaaagatcaatagtttcttttacaacatttcttcaacaaagcagctgctgagaatggccaagtttagtgttcctccaaaatatttacagtggttcatgtcagaacacaaaactagatctttttacatgataagcgtgattaagattggctaaagacaagcattaactaggaaataattatttcctgtattttacactaaaatgaagttgagaaatagacattgggaaagaaaatttaagggtatggtggttcctaattgcaaagattttcctttgttgtagacttatatctcaactcaggcaaatttttttgaattcttgattatatacattttaactgtgtgttcaagctattcttttagttatagaaacattttttagaatttttgttttcatacatggataggtttctaatagcaaaacatgctttcctgttcaatatcatgtgataaaacatttggaaaaggtttgcttatcttcataatcctaaaggaaatatttattttcaattctaaaacagatttctattgtctatctgagcagtttccaactgtgttgactagaacattaatattctgttagatggtaataggtgttcggtgaaaaaattcactggtagtcatatctgttttcctccaaaatgcatttaaaaatacttatatctgtctatatatatgaagaattctaaatacatttaggtgactcattattatatagtaatctaacttaaagaaactgtgagatatacctgataattctaggaggtcatattagagatcatttggcacatgaatgcgtggtgtttgatttgtgaataggggaatagacagcatttaccaattcactgtactgtggatgttgtctgtttagtctttcatctgctatgttttatcctgtaattttaatatatatttgtgacattattcagtgttgcgtgtcacacttatgaacctgtttttttttrtaatttcttatagcagctacctaccctgtgagactgtcttgttgctgtctrcattaatccaactgtgtctctttaatttctgttaatctttcatcagtgtgttatttaaaatgtactctgtagtcattacatttggaaaagtgcagtaatttatacaatgaccacttcccatacattaaaacaatctttttatcattaattatgcacattcctaaatacagacgattattttattatttctagtaaatctcaaatcttagtaaatacctggaaaccgtacctccccagtacaacagaattgactgtcagcggtagtctgttgggttgactgctgcctcactaacttttcctttgtgtgtaaaatttatgtttcaaactccttaaaaccagataagattaatgttagggctgggcgcagtggctcatgcctgtaatcccagcactttgagaggccaaggtgggtggatcacaaggtcaggagtttgagaccagcctggccaacatggtgaaactctgtctttactaaagatacaaaaaattagctgggcatgggggcaggcatctgtaatcccagctcctcgggaggctgaggcaggagaatcgcttgaacttaggaggtggaggttgcagtgasccatgattgtgccattgcactctagcctgggcaacacggcaagactccatctcaaaaaaacaaaaaaaagataaatgttaggtttctaaacatatattctagagagcaaatgttgcattgacaactattttctttaaattggtttgagtaccacttagtatggttagagtaagggaagacagtggccttgtccagcttccataattatagctttataaatagactatgaataagtgaaggccagaaaataaaacacagtgttttcttatagaaataagagactattctctttcctcttttgtggtaaggttttcaaatttttgaagttctgagactacctttgataatatatgttattatgttatcttgtattttgggtcaaggaaatatattcaaagtttgtcatttaaacagttacaatggctcaaagaaggarggaacacttactgaaattgcttcactaaaacatgttgggaatactctctgaggtttctttactcatggaataaataggtactgttaaaaataatttcagtgagcactcaggagctgccaggcactgcgctaagtgttttacctgaatttttacttttaatttaattaggtgactttgaaagttgacacttgtcataaaattctgtatttggaacatgtactgtttgggttaaaaatcttcatgtacattcctacaaacaaatcaagtgtggatgtgcagtgggtggtttttaagcttaaatatctcagctggatttaattaccttaagggataaggctacgtgatgggccagtggtttaccaaattatttttcattttctggatctcagtgtcactgaaagttaatgcatcctctttctctgctagagwcctgagttaaaatccattttagggcataagtataaatgaatttgttgttgttttttcctccttggggacactgtggtcattttgtgaggctgcctttccatttggaattgctggcagcttgctctgggcccaggggctctcatagcaggggcagttgcaagtcagcgtgaaaatgaactggtaggcttcagagggcagagctggcccagggcttgtcactctcccattccttgattctttcttggttaacttaaggaaacttatttgctactgacatttgattatagcacatcacaaaacaagtgatgtggttgtggataagccatcacattttctttaccatttcaggctggtttatatttggcagctacaaaggtttctctgttcactgtccacagactcctagatgactccttagactgctgtagttgtgtgatcaacatttttgatcaccaatgtgtttcatggctttaattacctattgttttagtgtaaatggttcattctttaggagcgtgtttgtatccataattacatttaagggttttaccctgaagtattattagttatttcctttatctgtacctattaggaatatttagtataaccaaagcagggaataatacgcatagcatttcatccctgagggagctcacttgtgttctttccctctaagctcatcctgtcatttctattttctctcaaagaatagcacctagagtatgctctttaagttttctttgaaaagatacaagatctttacacataaaaacaaacataattttgtgtacatgaataaatgggatcatatcatgcatgctgtcttttttttttttttcctttgcagatgtcactttgagtttcaaagtgagttggttgctccaggttccctgaatccttcatgttctccatttattgtaggcattcctataccagtttgatttatccagtccttttgtcttgaaaatctcccaaaccactttgcaccgggagtatcttcctcttcatgttttgtcttccagtcaccattcatatcccgtttcttctatcaaactgaatcaggacaaggagaggtgatgactactattgtccatttgtagcattcatgtaaaaaaatgtatttacctctgtgtgatgtgtatttgaaaaagagtgagagagagcccgactcttggtaagcacaaagagtcatgattgctgtgagaacaagttctttttaaaacatttatatagtgtgcttttttttaaagccttagtttaaaaaagctaactttgagtaaaagttgattaaaccattagtacatgggattcttgtgagaatgtgaatgatagtatcatttaaatagggaggtctttttacacgtgtccattgacagatgtgtgtgggcataaatagtttgctatggtggtgtgtatgctttcatgtttatctttgtctagattgttttatcattacctaaggtgagaaaaactctcccctagccacattatactctacraagtcttttatatgctgataaagttctcgtaagctcccttttgttagtatctttttaagamgtctttcttatttataatattgccaggttattaagttgtacttaattgtctttcatttttttctcttttcaggtgtcagcagttgagtctttggagggccccctgctccaggtggaaggactgagtgaccttcgactagagcttcacagcaagaagatgaaccttcacttggttctcatagatgaactacaccggcacctgtacatcaaatcgactagccgagttgtgcagcgtaacaaggaaaaagggaaaatcaggttaaagaggctctttgctataagtgtcttgtggcagtgtaggattggaaggaatattttttgtttcccagaatgttgttgtaatttattttacttttcctttaatggactgtctctgaaacttgaagatggttttataatagcaaatactccatgttctgagaggctgacatttgaagtttgttcattcattcattctacatttattatggtccttttctgtaaggatatataagaagcatttactgtgggtctcatattctgaatcagagacattggtacatctcagaaggaagtagaaaaattcttaaattggactgtgaagtcagcctaattaagaaatgtagatatattggctgggtgcagtggcttatgcttgtaatcccagcactatgagaggctgaggtggaaggattgcatgagcccaagagttcaagaccagcatggacaacagagcaagactctgtctctacaaaaaaagggccaaaattagctgggtatagtggtgtgcacctgtaatctcaactactccagaggctgagatgacaggatggcttgagcccaggagtttgagcttcagtgagctatgatttctccactgtactctagcctgagcaacagcgaggagacctggtctcttaaaaaaaaaaaagacaaaaagaaatatagatgtattgactgaatgataagattctttattacttagggttatgttcagctttaggttgtcctttttctggaatagtttaggaaaggttcagagagaacacttttattccttggttggttgtagcatagccctatatttaatggcctgggtagtctcaagaaattcattaggttagtagaggcctggtagggaataagactagatcttaagatggtagaatattggaatttttaacatatgttagatagctgtgcatagtacatgtccttccaatattcctttagaatagacagatcttttcagagggcatttcagcactatctactgaaatatacatgttcatgcttcttcattcagatatagacaagaagagcactggaagcagtgcacgctgggaatgaagtctttcaagtcttatcctgtttgaacaaaaaacgccaaatttgcttgtgatgcttcagtttaatcagagatcctgacagagaaagagaggtttctacctcttttcagcagataggcactagaaaaacttctgccaggcacacagatttgatatgtacctgagacataacttcaagactagctctgaatagggtatctgtcagtacctcagcagagagtgaagtggtgaataggggaagtgctaaggcattctttcgacaatgcctgctgataaatagcagatctgaagagatttcttcccatacaaggttaagtaataaaatcactatggtcctgtgaaaatattctgtattataagggaaaatgagcattatttgaggtctcagaggaagaacatttattttaaaaaaatttctgtaaagcaagcaagaaacatttaagagacttaagctcaaggtttctcaaaaaatacaagaaacacgatgtagtagattattcagaataatcactcatttcccttctacttttgtgggagaggagtatttcctacsctttttgttggggccttggcttttgccatcattagggtacatgacacaagcaggggcttcaaacgtgcttatgctgttgagtgtggcctttcgtgccactgccattgccttgctggcggtcccaggagaagggtaagagacacatggaactgactgaagatcagcagacctgcctagcctgcatcaaccaaccaccaaaatgtatgcttattgttgaacattattgagattttgtggttgtatacagtaagcgcatagcttccatgaaaacagtaaccgggagctacaagaacagagtgaggagagatgctaacagagctaactaaaacatgaataaaatgtaaggaaaccaaaatgaagtagagaaatttaagtctttaaagcttcagagagaagatctgaatcactgatgtggagggaaaaacttttcttgatgaagaggaaaaagacaagatgccaaaaggaagaggataaatatgaaagatgaacagtggtcaatccagtgattttaggggttccagagaatcacactaaaatgatagtgtttggggctgaattatgttccccctaaaattcatatattgaaaccctaatccctggtacctcagattatgactgtatttggaaatagggtcttttagaaagtgactaagttgaaatgaggtcatttgtgtgggctctaatccagtaggactgatgtccttataaaaaggaaatttgacacacttggagggaagaccatgtgaagacacagggagaagatggtcacctacaagcgaaggagagaggtctcagaagaaaccaactacgcccacaccttgatcacagacttccagcctgcagaactgtgagaaagtaaatttctgttgtctaagctatccagtctgtgttactttattatggcagtgggagggaactcagacagaggggatcagaagcaataattagagtataaataaaaaaacctacttaaacaggaaaacaagaccttggtctgcaagttgaaagaatttaaggtaaaatgaataaaaaaaagttactcttagatataatctggaaatttttatgattttcaaaaacaaattttataaataccaggaagaaatattatgtgatctgaagtgatagagataattatttgcccacccaatgtccattcttcccttcatttttaatgacaatctttatttcgttcctggtggctataggcccagctaaaaggctgcattttccatcttcccatatagctagagggtgtttagtgggacttcattttgcaagctgttgaatggggaggtcattaattttttaaagataccaattaaactggtatgctcactcttttacccttcatttgcctttctttactttctatctgggacatagattggtgccatcgagccgtcctagacacaaggtgaccttgaggatagaagccacatctgaaactccatgatcaccttgaacttcttttctagccctgggtggggtgcctctttaatgtgagaggaagtctttgttttactcagaccactattatttggtcttctttttatacacttaaaaccaggtcagttacacagaaaggagcaaaaatcaggctcaccaggatttgctgaatactaaatgccagaagacaatagaacaaaatctataaagttgaatggagaagagttgggaccaaagacttttctagccagccaaggggacattgatatgcataggtggccaagagatattctcagatatgaatttataataaaaaaaattagtattctttttccgagcaaaattctcagagataaactgtgagacgtacaaccagagaacaataaagttgtaggtagtttgaaacaactttgaggaccacataccattaaataggtacatgtatatatatatgtaagtaactgacaaatatgtttttacaagattgagaatatcagctaaaaaccattgtggaaaaaaaggtcagccgggcgtggaggctcacgcctgtaatcccagcactttgggaagccgaggtgggaggatcatttgaggtcaggagtttgagaccagcctggtcaacgtggtaaaaccccatctctactgaaagtgtaaaagttagccaggcatggtggtacgtgcctgtagtcccagctactcaggaggctgtggcaggagactcacttgaacccaggaagtgaaagttgsagtgagccgagatcacaccactgcattccagcctgggtgacagaacaagactccatctcaaaaaacaaacaaacaaaaaaggctatgtagtcaaggagtactctctaacagtaaacagaatttatatccctttttactcagttaatagtgactaggaaatttggataggtaggagaaaggaatgctgaattcttgcttaagatgagtgtgaagttttgttttcgactttaataattagagaaaatgtttaattttgtttttactaatctagatatgtatatttaaaaatcaatagagaagacaaaaatattctctattacaaaggatattgtactgcagccctcctttgtcagcaggggatatgttccaagacccacagtaggtacctgaaactgcagatagtgctgaaccctgaatctacctgcacagtaaatcctcacttaatgccctcaataggcacttggaaactgtgactttaagtgaaatgaagctgtaacttcaagtgaaatgacatacagaaggtcctagaataacattgtgtccttcaaggtcctctgctgatgagagaaaaaaaattcgtttcattatatgccaagattcttgattgcaaatagaggaaatcagtctgggtaactaaaacaggaaaagaatttattggaaagttatcaggttgttcacagaatctatgggaagtctgtataatcaggctctaaagcccagtaggaaccaacggagattaagcagctgagcacacacagtcttagacaagccacaggaagggtctgtttgggttgctatttttgctggcaccatgcccacaatagctggattttaaactcctctgtaaatgatctctaaatgtccctgcatctttcctttatctcgtcaagattcaaacttctggactcaggcatccagtttgctgagcctgggtaatgcctggactccttcagcttccatagtaggaagtggggccttctttttgctttgatgcagtcagtggggatggactgttcagatgtttggtacccaagacaaacacccaacaaatttctactgcaagagaaaacaaaggaaatcacatgaaggcacttacgtataaagaagaccagatgtttttgaagtagaagataggcagtagaattgacaaatgaargaaaggtacatgctcacatacaaaaaataataaaaattttacttggaggaaatgaaacaaataaatggtgagactgtccttgttcttagctcatgaagatgtcagttccagttgaaaattttgaaactgtcaaatgaaatctaaagttcacatggatgaatacatgcgtaagaattgtttaaaagaattgtgaagggaggttatgrggggggcatttcttatgtgatatcaaagcatattgtaaagctgttttastcaaaacagtacagacatgcaaaaataaatttttttaaagaaaacagtgcagacatgaagtagaaaatcagatgggtgagacaaaatagagttgagaaatagaccccaggatctatagactttagtattttgaacaatagttcagctggggggtaatgaaggctatttaatatatagtgttcagacaattgactgttgatttgaagaaaataaatttaggtgtctacctcttatgtacaaatgattcagccagatttaaaaatcacatagcactgtattagcattaggaaaacgtgtaggaggatatgtgtggaggagcctttttcaagcatatcagaagacataaagaaatatattaaatggtttaaccattaaaaaacccaaaacttatcttcaggaaaacagagtcaaaggataaactatactctgaggaaatatatgtatgtcatataacgctttaatatctaaagcatgcagatatttgtaagctcagtaaagcgggatatagactgttcatagattaaaaatacaaatggctaataaatataagattgttcaatatcatgagtagtcagagaaatacacatttgaaaaattaaatgcagttttttgttcataagatgatcaaaatcaaagacattgatagcatgttatgatagcaaagatggcggaaatgcgtagctttctcttgatggtggaataaccaatatgcctttttggaaaataaatttgcatattctttgtccagagaattttgtttctaggtctacatcctacaaaaacagtaccagttcataaaaatatatgtaacaagatattcattgtgacattgttggtaagaagaacaaaaatattcagcttaaatgttcatcaagaggagtatggtatattggtaccatgtaattacagaatttcagtgataatgatctctatgtgctgatatagaaaggtttctaaggtgcatttttgggtcccaaaagcaagttgaaaaatagcatagatagtatgaacctatttgtgaaagattgaaaggatagaaacttaaatatgtatactttatatattggtataaatatttgtatgtgtatagaaaatgtcagacagataatgtcaaaacactgataaaaggaattacttgtgagaaatggaaatgtgaggtggggaatagggaggtagaaattcttttmtttcctgtgtacatcatgagcatgttttttaaaaataataatacaattactgatgatccttttgaagatttttaaaaatgaaatgggaaaatgtttagattatacccttgaagggaaaaactagaattcagatctatgcaggatgatcaaagaatgttgaaaaaggagcatgcgtgccatttttgtgttgtgtgacgtggggggtggatggacagacactcatttttaaattttttttcaagcagtccttgtacctcagcctcctaagtaactggcataccactgtgcttggccttgatgctcctttctgtaagatgttttggaaggcagtataccaaaatgatgtgaatggattattttttttttaagtattttcaagaaagaatttacacctttataatcggataaaattagtaaaaagttgtttaaaaataattcttttatttattgcatgatcctggataatactcggtttaaccttgcttcctcagccatcctgggacatcgtctagctcatggaagagaaaatttggtgtccatatttgtctctgggcatgtaaagaatgttcttcactgcattgtattcattccctaactattttgtcttttaaagattttttttctgtttacatatgttggttttctttttatctttcagttcttgttttttttttttttccctcttkgcttagattttaaatttttagcctcactttattttctgttaccatgtcttcacccttggtctgtcatttgaaacgatggctcttttttacttttataccctttaaatcattcttattctttctgagtgttccaacagatcttagaactattgagaattattatgccagccattcctgtttcattatttggtgaartcttactaagggcacgttatctttgacagatatttcttagctcagtttgatttaacaaaattttatgagcacttgctctttgacaagtactgtgccagctgttctggctatataagtgaatatatcagttattcgatttacaacttaaagttcaactcacctctgtcagtttttagtttcacaaaattagccaaatgagttgcagttgtaaattttggacatagttgaacccatttattgtgaagtgaaggaacagaaatatgttataattaaaaagtagatgtttaataagctgtcagcacttctaacccctcttaaaaaactgttttcgtatcatgaaatcttgaaatctaacatttagaagcagagctttactagttggatgttggttaatggccaggaagtccttgaggttacagtggcagtggttgttgcttgttttgggtttaatttgttgtatacttttcctgtcctctaccatgttgctattggcaaaatgcattcagtcacaatatataattggtaattttggggggaccattttatactagcagggattactgtacatcagctgtcttttgatctcagctatgaatgattctgaatggatttaaaataaaaatttgtaatcatgtatttaaaatgaaaaataactgtcagtatttccaaaataacgttataatttttattttattttttgttttcaaaaaatgctttctctgagggattaaaaacccgttgaaggtattaattaatcaatcccttctcagctttatctctgatatgtggtgagaagaggtctttttttctgttgtgaaatggaaactgaggtccatattacttaatgcaatattctacaatagcacctaccttatgctgagcttcattcatgtctgtagtcacaaagtgagtgggtgtgccccctttctctggaacttttgagactaagtcctttcataaaacagcaggagaaaaactaaagtcatttccagagttacttgcctttggrttagtgctcaccaaggagaaaattgaagcttaagggaaaattttagagagagagatgagtgtatgaaaatagttttgcagtaaattgactttctaaaagtttattgatggagtttgagggcccttctggctctgataataaaatcagcaggttatatttttcagagttgaaatggcaagctgtttatcaccctaaatttaactgaaatatgtttttaggttaaaactgagaaaataattgtaggatttaatctagagtgatgtgcatgtacatctgtgttcatagaagtgtgtactatgataaatacacatataaaaatatcagtgtgcacacacatagtaacaactgtttcatcattaggtgtggcaggcagtattccagctatataattgaattttcctgctgattgataccttaatttatctgtactttaaaagtaattcctccactttgttctaraaatatttaaatatttagacaatgtattatatttttcctgtcatttaaagttgaagttttttttactctgtagcagtaccataaacctgtgtctttttttacaattaaaacatttttattttactttattcatttgtccattgaagcattttatttgtaaatatgtattacatccatagatgaagaaccccaggattttctctcctgtgtgtttttgtgttgcttcttcatggtccatgatgtgagctgagtcagtacaatgaaaccaaactggtgggatgggagcagattagtctgtgatttttctagatttttctagatctttgagttggacatcaaatctggggctgatcacacttgctcacaacaacttgttcacactgtgaggttcccaataattttcccagctctgtgatcatcagtgatttcaaattcgctcatgtgcccatgctttgtcatcacagttgatgaagacactagacagtgactttggagcaaggtctaataagaaccaggtgtttgcctctcttttcggtattgtcgatgctctggaaagcagcaaacaggacatttatgcacaccattagggtggcacggaaagatggtggaaagagctctttgtgtctttgggcatctgtatccagggcctagggggacctgtgaagtgttttgtaattgtgagtaaaatgcaggtgaaagaggatgacgtcattgagaggaaaaaaatgagaagacaaaagaagtcataaaacatgaaagaatggacaaatctattatctaatttattttataaatagataaaccattatgaaaagttattggatttgaggactgttggattttcttaagatagtttaggctaggaacttacaggtttacattggtagaaaagagttgttgggaggatgccagttcaattcctggtaaatgctttctgttactttaatatcttatactccacttttcacattagcctgtgagtgattttaacaattggaaatatgctgtttggtttagttcatatcttagtcatactcacattcttagcactgagcacagtgccaagcacataatggatgctgaagaattgttcgagtaatgattccctgtttccctgtaacaagtcaaaagggagacgttaatgactgtcatagtgatcctcaaggcctaggacagtggctcctacattatttgtactcagtgaaaagaataaaaccttatgtgataatttcactctttaacacagtgtgaaattatcacttgaacccgaattatcacttaacaaactttatttttcaaagatctctgaaaaaacatgtttgttttttattggattataaatacacacatacctagcacatttgttccaaaaggagtgtgtgaaggagatggggatatattgctgtggtgggggcagatgttgttcccaattgcacacatccttccttccttccttccatttgaagaaatctttcctataggcgtggtctcttctctgcttcccctttgcctgctctagccactgctactgatgatgtatttcagtactaaaaagtgagaattatggcttccacttccctacccttggatttggcttcgaggggctcttctgttgtagatagtgtgcgagatgattccatttcttgagagcagggcatagggtttagttggcttggcatagcctgcattctttcacttaacaggtattttgagatgggaattaattggaaattttgttttttatagttttcrtgatttaaaattaatgtgtttattttgaaggaagttgatttatgcgtttatttaaagtttattagtttatttaaagtyaatcattaagatgaggggcttggccttcttaggaaaggtgaaatgggtaaatactgaattaacctgtttgagatccttaaatcattttaattgttgtgattgtccacgtcatgaaatttatgagtctcttttaaagaaaactgaatgtagtaaacttccggcatatgtcaaaaactatagcytgaaaaacacaagtaaacactagttaaacctttattcagtatcatggcatgttgtcatttgatctttctttgttgataaattaatatttaatacagatacaaaggaggacagtgaaattgcctggcatagtgttattacaaggtggttatccagttgatccagaatacactacactaattttttaaacagcattgaatgaaatgacaaaataaaaatttaagtacttggaacccttacaatacatttttatacccctgtctgtgacagtcacctctttattggaaatatactggggagatccagtatagtatatactggggagatccagttccagtgtaaagagggctcatgacaaaaacaaaagtggtaagggtggggctgtagtgggaggactttagttggttttgaagaaagtggtaactagtgcttcttttcccgttcagctccctcgtgaaagatgcttctgttcctctgattgatgttacaaacctccctactcctcgaaaattccttgatacctctcactattctactgctggragctcaagtggtaagtatttaattcttcagccactaagctttttagtatgtcttagttcctaggtagatatctggaggagctttttgggggctgagctagkttgggctgggctaggtgggcctgagctaggtgtgttggaacctgtgatgagccctttgcaaccttcagagcaaataagatgtacagtgatttattgggctgttgcattatcagggttgaaaagtggcagctgaacctggcctgcctgctgaatccagctgcatctgtgttttgtttgaccagcactgtttttctttctttctttctttctttttttttgagacggagtctcgctctgttgcccaggctggagtgtagtggcacgattttggctctctgcaacctctgcctcctgggttcaagggattctcctgccttggcctcaagagaagctgggattacaggtgcctgccaccatgcccagctaatttttgtatttttagtagagacagggtttcaccatgttggccaggctggtctcaaactcctgacctcccaaagtgttggcattacaggcgtgagccaccacacccgggcgaccagcactgtttttctaaagttgagtttggatgctttttgatagagcatatgctttccattgtgctataatctttactactcctagtagcttttacttatttatctcatgtattgcattcagtgtctggtcctgggagcttctgagtgtgtgacctctgtcctatgccctctccacttctaaatgtgcatgcatccacgtgtgcactcatagtcgtacctgtaacacactttgaggaaatatctacaaacttrtcttttcttctttggagatatccaatatcctattgaataagacaaagccattttggggttatgtttaaggttgagggcaggagggtatactttggatgcaaagatttaggggaatcttgtggattgccttaggcttgcctttgcagagggttcagctcaactgggcttggagagcttctgggcctctgcagagagtttctctgcttttgtaactgggttggggaagaagactcgatgtcttttgtgggatgcctcgcaggtgccttcttgtggcagccaaaatcttcattgccttttaacgaaattgtaatgtttattatcattgtcttttcagataaaaattagttcttatagttcttattagtgctgtagagcttgaaataatgaaaaggtagaaaaaaatagaaaaacaatttggattcaatcagtacattttgtgtaactaattggaaatgtttctgttgagagcttaatatattgttggggcatattttgttaccttaaaatgccacttaaaattgttttaggattatttaggcttggaatcttcaagtttattactttaactacaggaaagtatagaatttgataatagattttcctttgtttaattagtagccaagttttaaaaaattgcagtcatttatttttattatgatactttacaatagtttgtactccagcctcttcttggagctagaaaggttttgttttctccctctttctgatgtaatgttgcttttgagttttaacactgctctgaggggttgtagactgtggaattatgaaacaaaatatatttgtacctttgatatgtattttatctctgccttttatggaaattaccagttgttacatctttgcttttttgtaatgtgaatcattactgcttagcctggttatattaatttatgtaaatgttgccaagtcagtggccaagtgaaataaaaaatttaattatttatgaagaaatgacagggcaggctttgcaaatgagtgttgtataaatataaaataagctgaaatatgccagttacggcaaatttcagtggaagctaattttgctacatctattattcttactatgataggccttactttttgataggcactttatctgtcagcttctggagtttgcattcattacttagtggagttcatggtgacactctgattttggtattattaggaattactgttgaagaactgcttggtagttgactggggctaggagcattatggagactgcttgtagagatatgtataaaccttttatttatttatttatttatttgagacggtgtttcactcttgtggcccgagctggagtgcagtggtgcgatctcggcccactgcaacctcctccttctgggctcatgcgattctcctgcctcagcctcccaagtagctgggattacaggcgtgcaccmccacacccagctaatttttgtagaaacagggtttcactatgtcagctgggctggtctcaaactcctgacctcaggtaattgtccgccttggcctcccaaagtgtttggattacagtcatgagctaccatgcctggccagacgtttctttttagatgggttcatttccttgactattttgaagacttgatcgtgtgcttttttttttttttttttttgtgcgtgaccaaaaaagaaggtaaaaatattattgattaaagtcaataatagcagaggttaatatgtgtttagtgcctaccatatggtaaagcaatgtcttaagtgctttacatgaattaactcatttagtccctcaacaattttataacaatttattatcagtcccattttacagatgagaaaactgaggcacagggaggttaataattgataaaagtttacacagttgacaagtggttgtgatttcagcttagagccaggttcgactatgctcttctaaccagtttgttttgctgaaaacaagctaggtgtcctctttgtattaattttctactcacacaaacttagtggcttaaacaacataaatttattatcttacagttttgtaggtgagaagtctaacacaaatctgatagcagtaaaatcaaggtgttggcagggctgtgttcctttttggaggctctaggggaaaatctgttttcttgcctttctggctcctggaggccaccatattccttggttcattcatggtttccttcctccatcttcaaaaccagcaatggtgggtcacattcttctcatgttgcctctctctgacccactcttctgtgcctctttcctctttttaaggactcgtgattagattgattccacctggataattctggctaatcttcccatctcaaggtccttaactttaattacatctgcagtctcctttgccatgtgactaatcacaggttctagggattaggacatgaatatctttgggcaaccataattctgcttaccacactctacgctgcccattttgtgacttaagttatctttaggagcaagtgtaaaaaatttgactttcttcaaattatgtagcgaaatctttttaagtcattgcagtgtagtctttaggactctattaatctggatcacattattaaagggaattgtataaatgaggaagatgtaaattatgtagagaactgcacaaaatgttactaagtacatataaaagtatggggctgatgaaatatactataataaaaagcaggaattttgtcttattcttaataataaactggaagtcctaagagtctatttgtgaagtgctctgcaagtcagcctagaaagtaatagccgttttcagctgggaatttaacataggctcttaaagctcctctctcattttgtgaaacagtaagattgagggtgtaatccattagaattgacacttttatagaggaagttccattagggaatccctggggagtatggctctcccattgggataccataaattaagattggaggtgattcctgagaactttcaggttattttaattaaataagaattttgattgcttttaaacaagttgtttttcacgtgtcctattttgaggtagagttgtgggtgactttttttttttaaattatactttaagttctgtggtacatgtgcagaatgtmtagttttgttacataggtatacacgtgccatggtttgctgcacccataaacacatcatctatattaggtatttctcctaatgctatccctcccctagccccgccctgaccgaaaggcccaggtgtgtgatgttcctctcctgtgtccatatgttctcattgttcaactcccacttatgagtgagaacatgaggtgtttggttttctgttcttgtgttagaggacatgaactcatccttttttatggctgcatagtattccatggtgtatatgtgccacattttctttatccagtctatcattgatggacatttgggttggttccaagtctttgctattgtgtatagtgccataataaacatacatgtgcatgtgctttatagtaaaacgatttataatctttgggtatatacccagtaatgggattgcagggtcaaacggtatttttggttccagatccttgaggaattgccacactgtcttccacaatggtttaactaatttacactcccaccaacagtgtaaaagtgttcctatttctccacaccctctccagcatctgtcgtttcctgactttttaatgatcaccattctaactggtgtgagatggtatctcattgtggttttgatttgcatttctctgatgaccagtgatgatgagcattttcattatgttggctgcataaatgtcttcttttgagaagtgtctgttcatatccttcacccactttttgatggggttgtttgtttttttcttgtacatttgtttaagttctttgtagattctggatattagccctttgtcagatggatagattgcaaaaattgtctcccattctgtaggttgcgtgttcactctgatgatagtttcttttgctgtgcagaagctctttagtttaattagatcccatttgtcaattttggcttttgttgccattgcttttggtgttttagacaaagtctttgcccattcctatgtcctgaatggtattgcccaggttttcttctagggtttttatggttttaggtcttacgtttaagtctttaatacaccttgagttaatttttatataaggtgtaaggaaagggtccagtttcagttttctgcatatggctagtgagttttcccaacaccatttattacatagggaatcctttccccattgcttgtttttgtcagatttgtgaaaggtcagatggttgtagatgtgtggtgttatttctgaggcttctgttctgttccattcttctgtatatctgttttgttaccaataccatgctgttttggttactgtcgccttctagtatagtttgaagtcaggtagtgtgatgcctccagctttgttctgtttgcttaggattatcttggctatgcaggctcttttttggttccatatgaaatttaaagtagtttttttccaattctgtgaagaaagtcaatggtagcttgatggggatagtatcgaatctgtaaattactttgggcagtatggccattttcacgacattgattcttcctatccatgagcatggaatgtttttccgtttgtgtcctctcttatttccttgagcagtggtttgtagttctccttgaagaggtccttmacatcctttgtaagttgtatccctaagtattttattctctttgtagcaattgtgaatgggagttcactcatgatttggctctctgtctgttattggtgtataggaatgcttgtgatttttgcacattgattttgtatcctgagactttgctgaagttgcttatcagcttaaggagatcttgggctgagacagtggggttttctaaatatacaatcatgtcatctgcaaacagagacaattggacttcctcttttcctaattgaataccctttatttccttctcttgcctraktgccctggccagaacttccaatagtatgttgaataggagtggtgagagagggcatcgttttcttgtgctggttttcaaagggaatgcttccagtttttgcccattcagtatgatattggctgtgggtttgtcataaatagctcttactattttgagatatgttccatcaatacctagtttatcgagagtttttagcgtaaaggggtgttgaattttgtcaaaggcctttctggatctattgagatactcatgtggtttttgtctttggttctgtttatatgctggattatgtttattgatttgtgtatgttgaaccagccttgcatcccagggatgaagcccacttgatcatggtggataagctttttgatgtgctgctggattcggtttgccaatattttattgaggatttttgcatcaagttcatcagggatattggtctaaaattctctttttttgttgcgcctctgtcaggctttggtatcaggatgatgctggcctcataaaatgagttagggaggattccctctttttctgttgattggaatagtttcagaaggaatggtaccagctcctccttgtacctctggtagaatttggctgtgaatccatctgatcctggacttttttttcgttggtaagctattaattattgcctcaatttcagagcctgttattggtctattcagagattcaacttcttcctggtttagtcttgggagggtgtatgtgtcaaggaatttatccatttcttctagattttctagtttatttgcatagaggtgtttatagtattctctgatggtagtttgtatttctgtgggatcagtggtgatatcccctttgtcattttttattgcgtctgtttgattcttctctctttttttctttattagtcttgctagtggtctatcaattttgttggtcttttcaaaaaatcagctcctggattcattgatttttgaagggtttttttggtctctcttttcttcagttctgctctgatcttagttatttcttgccttctgctagcttttgaatgtgtttgttcttgcttctctagttcttttaattgtgttgttagggtgtcaattttagatctttcctgctttctcttgtgggcatttagtgctatacatttccctctacacactgctttaaatgtgtcccagatattctggtatgttgtgtctttgttctcattggtttcgaagaacatctttatttctgccttcattttgttatgtacccagtagtattcaggagcaggttgttcagtttccatgtagttgtgtgattttgagtgagtttcttaatcctgagttctaattcgattgcactgttgtctgagagacagtttgttgtgatttctgttcttttacaattgctgaggagtgctttacttcctactatggggtcaattttggaataagtgtgatgtggtgctgagaagaatgcatattctgttgatttgtggtggagagttctgtagaggtctattaggtctgcttggtgcagagctgagttcaattcctgtatatccttgttaactttctgtcttgttgatctgtctaatgttgacagtggggtgttaaagtctcccattattattgtgtgggagtctaagcctctttgtaggtctctaaggacttgctttatgaatctgggtgctcctgtattgggtggatatatgtttaggatagttagctcttcttgttgaattgatccctttaccattatgtaatggccttctttgtctcttttgatctttgttggtttaaagtctgttttatcagagactaggattgcaacccctgcctttttttgttttccatttgcttggtagattttcctccatccctctattttgagcctatgtgtgtctctgcacgtgagatgggtctcctgaatacagcacactgatgggtcttgactcttcatccaatttgtcagtctgtttcttttcattggagcatttagcccatttacattcaagggtgatattgktatgtgtgaatttggtcctgtcrttatgatgttagctggttattttgcttgttagttgatgcagttgcttcctagcattgatggtctttacagtttggcatgtttttgcagcagctggtactggttgttcctttccatgtttagtgcttccttcaggagctcttgtaaggcaggcctggtggtgacagaatctctcagcatttgcttgtctgtaaaggattttatttctccttcacttttgaagcttagtttggctggatatgaaattctgggctgaaaattcttttctttaagaatgttgtatattggcccccactctcttctggcttgtagagtttctgccgaragatccgctgttagtctgatgggcttccctttgtgggtaacccgacctttctctctggctgcccttaatattttttcccttcattccaactttggtgaatctgacaattatttgccttggagttgctcttcttgaggattatctttgtggcattctctgtatttcctgaatttgaatgygggcctgccttgctaggttggggaagttctcctgtataatttcctgcagagtgttttccaacttggttccattctccctgtcgctttcaggtacaccaatcagacatagatttggtcttttcacatagtcccatatttcttggaggctttgttcgtttctttttactcttttttctctaaacttctcttcttgcttcatttcattcatttgatcttcattcactgatacctcttcttccagttgatcaaatcggctactgaagcttgtgcattcgtcacgtagttctcacgccatgtttttcagctccatcaggtcatttaaggacttctctacattggttattctagttagccattcgtctaatctttttttaaggtttttaacttctttgcaatgggttcgaacttcctcctttagctcagagaagtttgatcgtctgaagccttctctaaactcgtcaaagtcattctccatccagctttgttccgttgctggcgaggagctgcgttcctttggagggggagaggcgctctgatttttagaattttcagctttctgctctgttttttccccatctttgtggttttatctgcctttggtctttgatgatggtgacgtacagatggggttttggtgtggatgtcctttctgtttgttagttttccttctaagagtcaggaccctgagctgcaggtctattggagtttgccggaggtctactccagaccctgtttgcctgggtatcagcagcagaggctgcagaacagtgaatattgctgaacagcaaatgttgctgactgatcgttcctctggaagcttcgtctcagaggggcagccggctgtgtgaggtgtcattctgcccctactggatggtgcctcccagttaggctactcgggggtcagggacccacttgagggggcagtctgtccgttctcagatctcaaattccgtgctgggagaaccactacaaacttcaaagctgtcagacagggacatttaagtctgcagaggtttctgctgcctttcgttcggctatgccctgcccccagaggtgcagtctacaaaggtaggcaggcctccttgagctgtggtgggctccacccagttcgagcttcctggcccctttgtttacctactcaaggctcagcaatggcaggcgccccttccccagccttgctgctgccttgcaggtcaatctcagactgctgtgctagcaatgagtgaggctccatgggcgtgggactctccaagccaggcgtgggatataatctcccggtgtgccatttgctaagactgttggaaaagcgcagtattagggtgggagtgtcctgattttccaggtgccatccatcactgcttcctttggctaggaaagggaattctctgaccccttgtgcttcccgagtgagrcgatgcttcgccctgcttcagctcaygcttggtgggctgcgcacccactgtcctgcccccactgtccgacaagccccagtgagatgaacccagtacctcagttggaaatgcagaaatcacccgtcttctgcgtcactcatgctgtgggctgtagactggagctgttcttgttcggctatcttggaaccacccctrttttgttaaacttttccaaaaaccagctcctggattcattgattttttttgaagggtttttttgtgcctgtatctccttcatttctgctctgatcttagttatttsttgtcttctgctagcttttgaatttgtttgctcttgcttctcttgttctttcaattgtgatgttagagtgtcagttttagatctttcctgctttctcttgtgggcatttagtgctataaatttccctccaaacactgctttaaatgtgtcccagagattttgttgcattgtgtctttgttctcattggtttcaaggaatatctttatttctgccttcattttgttatttacccagtagttattcaggagcaggttgttcagtttccatgtagttgtgtgattttgagtgagtttcttaatcctgagttctaatttgattgcactgtggtctgagatactgtttgttatgatttccgttcttttgcatttgctgaggagtgtttacttccaattgtgtggtcacttttagaataagtgctatgaggtgctgagaagaatgtatattctgttgatttgtggtggagagttctgtagaggtctattaggtctgcttgttccagagctgagttcaagtcctgaatatccttgttaattttctgtctcgttgatctgtctaatatttacagtggggtgttaaaaagtctccaactattattgtgtgggagtctaagtctcttcctaagaacttgctttatgaatctgagtgcttctgtattgggtctgtatatatttaggatagttagctcttcttgttgaattgatccctttaccaatatgtactggccttgtctcttttgatctttgttggtttaaagtctgttttatctgagactaggattgcaacccctgttttttttttgctttccatttgcttggtaaatattcctgcatccttttatttgagcctatgtgtgtctttgcacgtgagatgggtttcctgaatacagcacactgctgggtcttgactttttatccaatttgccagtttgtgccttttaattggggcatttagcctgtttaaatttaaggttaatattgttatgtgtgaatttgatcctgtcattagtatgctagttggttattttgcctgttgatgcagttttttcatagtgtcaatggtctttacagtttggtatgtttttgcagtggttggtactggttattcctttccattttagtgcttcctctggacttttgtaaggcaggcctggtggtgacagaatctctcagcatttgcttgtgtgtaaaggattttatttctccttcgtttatgaaacttagtttggctggatatgaaatcctaggttgaaaattcttttctttaagaatgttgaatattggccctcactgtcttcttgcttatagggttttgcagagatctgctgttagtttgatgggcttcccattgtgggtaacccagcctttctctcgggctgcccataacattttttctttaatttcagccttggtgaatctgatggttatatgtcttggggttgctcttcttgaggagtatttttgtggtgttctctgtatttcctgaatttgaatgttggcctgtcttgctaggttggggaagttctcctggataatatcctgaagaatgttttctaacttggttccattctccctgtcactttcaggtacaccaatcaaatgtagatttggtcttttcacatggttccatatttcttggaggctttgttcatttcttttcactcttttycctccaatcttgtcttcttgctttatttcattaatttgatcttcaatcactgatatcatttcttccacttgatcaaatcagctattgaagcttgtgtatgcttcacaaagttcttgtactgtggttttcagctccatcaggtcatttaagctcttctctatactggttcttctagttagccatttgtctaaccctttttcaaggcttttagcttccttgtgatgggttagaacatgttcctttaacttggagaagtttgttattaccgaccttctgaagcctacttttgtcaactcattcatcaaactcattctccatccagttttgttcccttgctgctgaggagttgtgatccttaggagaagaggcattctagtttttggaattttcagccattttgcrttggtttcaccccatcttcgtggatttatctacctttggtctttgaagtcggtgaccttcagatggggtctctgagtggccatcctttttgttgatgttgatactatttctttctatgtgttagttttccttctaacagtcaggaccctctgctgtaggtctgctggagtttgctggaggtacactccagattttgtttgcctgggtatcaccagcagaggctacagaacagcaaagattgctgcctgttccttcctctggaagcttcatctcagaggggcaccagccagatgccagccagagctctcctttatgaggtgtctgtcggcccctactgggaggtgtctcctagtcaggaggcatgggggtcagggacccacttgaggcaatctgacccttagcagagctcaaatgctgtgctgggagatcygttgctctcttcagagccgtcaggcagggacgtttaagtctgctgaagctgtgcccacagctgccccttcccctaggtgctctgttacagggaggtgggggtttcatctgtaagcccctgactggggctgctgccttttttcagagatgccctgcccagagaggaggaatctagagaggcaatctggccacagcggccttgctgagctgtggtgcactctgcccagttggaactttgcagtggcattgtttactctgtgagggtaaaacctcctattcaagcctcagcaatggcagacgcccctccccccaccaagctcaagtgtcccaggtcaatctcagactgctgctatgctggcaccgagaatttcaaaccactagatcttaagttacctatgctccgtgggggtgggacccactgagccagaacttcrctccctggcttcagcacccctttccaggggagtgaacggttctgtcttgctggtgttccaagcatccctggggtttggaaataaaaactgcagctagctcagtgtctgcccaaatggttgcccagttttgtgcttgaaatccagggccctggtggtgtaggcactggagggaatctcctggtctgtgggttgcaaagactgtgagaaaagttcagtatctagtccggagtgcactgttcctcacggcacggcacagtccctcacagtccctcacagtccctcacagcttctgttgggtagggggagagaattccttgtgcttcctgggtgaggcaacatcccatcttgctttggctcgccctyggtgggctgcacccactgtccaaccagtcccagtgagrtgaaccgggtacctcagttggaaatgcagaaatcccccttcttctgcgtcgatctcactgggagctgcaaaccggagctgttcctattcggccatcttgccagcaatctgtgggtgacttttctgtgagaggtttttttttttttaaataatagtttataagttatagtttgcaaaatatatcatttaaatgatgcaacaggcctatgacgtagttagggcaggtactatgtgattactrttacaattattatatttagatcattaaatttaagtgcgatcagatataaaacatttacttataaaatgcaaagtcaaggcacaggttggcaaaagcaagaatccattaaaagaaaaatgattagcatccgcttagctttcctacatattaatgaagaaaagaaatgacataataaagaactgagcaaataatttgcaattcacagacaagtccctgtccgtggaaaaattggcatttatctgatggagattaagtatctagaatatgtaaagaatctctataaatcaataaaacaagctaatagagtaataggcaaaattatgaacagtttgcataaggggaatccaatgctaagaaatatatgaaaaactacttatattctggttaatcaggtattatcttctttcttttttctttttttttttttttttttgagatggagtctcgctgtcgcccaggctggagtgcagtggcgcaatctcggctcactgcaggctccgccccctggggttcatgccattctcctgcctcagcctccccagtagctgggactacaggcgcccgccacctcgcccggctaattttttgtatttttagtagagacggggtttcaccgtgttagccaggatggtctctatctcctgaccttgtgatccgcccgcctcggcctcccaaagtgaggtattatctttacaatcactttacagatacggaagctgaatgcaggaaggttgagtggttggtccaggttcaaccaagatgataattgttggagcctggcctcatgctgttcccagtctaaatatgtagggcatgtattttgcaagcctttctcttattctcctcagtcacagtattttgtaatgcacagagaaactaatgtctaatttagatgtagtagttcaactataacttaggtagaaggatgggagaagtgtggagaaaagccaataattgtagtaaaatgttggtttaagcttttggactcccagtatgtcttttcatttggcaaactgcctttggaacattttgactgagtagttactcccagggaacacaggcatttcatttgtggcctctttattcattttattcatgcttctgctgggatttcgtgaatatgactataatgaaactggacttcttagttcttttcttttgggtacaagcataggttaagcagtaaaaacctaaagagaacacaaattaaatgatttttatgctgctattttcttgatgtgcattttattccataaagtgttgctctgagactttatatatatcttaagaatttggaggccgggcacagtggctcatgcctgtaatcccagcactttgagaggccaaggtgggcagatcacgaggtcaggagatcgagaccatcctggccaacatggtgaccaaaatacaaaaattagctgggcatggtggtgcgtgcctgtaattccagctactcaggaggctgaggcaggagaatctcttgaacttgggaggcagaggttgcagtgaggtgagatcttgtatctaccaattttgttgcattattttcaaaattctaatagaatatttgaaaaaatatatttgtatattttcctggattttgtatgtaaacagtcagtgtctgcagttaaggcagtgttgtctcctttttgtaaagattcaacagttatttgccctctttttgtttatttgtttttaatttttgcatagctgggaacctatcatataacttgaatggtagaggcaatagtgtgagtcttgcccttaatggaaatggttctaaaatgtcatcaagtatgatatttccttttcatttttgactggttatttacccttctgggtgggaagttatagattatatttttgttcttttagattttaaccttaatttttagcacctactttgctacagagctattttaaagttatcaaatgtctatttttctttaatatttcaagtgcagtacacattccaaggtatgattattattcttgcctatagcaattatcaggcgttggccaaatcatgattttctttttctgtcattcttttttcatttactaatagaattctactgtgatgaagagctgtgtcttcttcatgtatttctatattcattaattgtttaaatcagtaaaaatttatggatatttactttgttctatgacttgtaatcaggtactgtcattatttatcttattgctcaaattgtcccaaatttggccactggtagctccttcaggttggttcctaggttgtttyaacatgtccccatccattgttgaaaacttccttacattctggtaccacaagacatttcagactcatcttgtacttcccctccctttgccttggaattaaccatttctctaaggagatctggttttttttttattggagagtgatattttgaaacctagatttgtattctagttgaacacattgctgctggtgtaatgttgctgtagtccctcttagctgacagagctaggagatatgtatgtgcatgcttatgtatattacatgtgtatatgtgtgtacaccatacacatgtatagacagaaacatatacatctatatgtatctatttctgtatgtatttctacatagatctgtatctatttatttctgtatctgtttatttctaaccatgtgtatatatgagtaaaacatgagttcaactccaaatccatgtcaaccactgcagttcagctgagccttctttccttatttctagctcttttcaatagtgagaaacctggttcttgtaacaagcaactcatttttgtaatcccagtatatacatgaaatcattttacaattgctaaccaatgaaaaacaattcacggcagtgaaaaacaaatctataaacttgagtacaatgtttgtgtgcagttcaatttgcatattagaaggcttataatatttagtcaaaatagtcaaaatccagttacttaggttagttcttttcgaccccaacccactcacttatggttatgttatttatttgcaatacttttaggttcatttgttactgtttttatttcatttgagttctcctagatctcagttgattttaattatttattgtgggggtacatcggaagcattatcatgttgtaagcatctgaactataacacaaagcactcaggcaatgtcacttttccatctctatcttttatcccattcccagtttccttcctattttttccgtctatccctataggtcatcagtcacattcatttctgctttatccttcctgtaattctttttgcaaaagcaaggagttaaatatatcttttcttaaatcctttctctcttccatgaagggtaaggatactatagatactcctttatactttgctgtttcactctacaatatatcctggaaatcattctgtattagttcatggagattctgcttattcttcaatgttctttttatatctgcatagtactctgttgggttgatttatcataggtcaaccactctctgttgttgctcttttttatactytaagttcaggggtacatgtgcaggtttgttacataggtaaatgtgtgtcatgggggtttgttgtatagattatttcatcactcaggtattgagcctagtacccactagttattttttctgattctctccctcctcccaccctccaccctccactctccaccctccaatgggccccagtgtgcattgttcccctctatrtgtccatgtgttctcatcatttagttcctactcattagttgagaacatgtgttgtttgattttctgttcctgcgttagtttgctatggataatggcctccagctccatccatgtccctgcaaaaggacatgatctcgttctttttcggtgatgtagtattcatgttgtatatgtactacattttctttatctggtctgtcatcgttgggaatttaggttgatttcatgtctttgctattgtaaccactctcttttgtgtgagtatttagattgttttcagtattttgccatcaggcaatggtggaataaataacatgcacgtgcattttcatgttgttggaggtgtatcgttaaatttctagaagagggatagctcaatcaaaaggtaagcccatatgtatgggatctttttgtttatagcttaaaarttttttttaatgttttaaaaaactcataaaatttactgtgtyaaccatttctaagtagacagttcagtggtgttaagtatattcacactgttgtgcagccaatctccagaaatatctcatcttgcaaagctggaactgtgtgcccattaaacaactcctctttgtccacctccaccaacccctggyggcccccattctactttctgtttctattaatttgactactgtggatacctyatataagtggaatcatatagtatttgtcttttgtgactagttatttcacttagcataatattttcagcatttgtccatgttgtaccctataccagaatttccttccttttcaaggctgaataatactccattgtatatatactatattttgtttatccattcatgtgtcaatggacatttggctattgtgatagtggtgctgtgaacatgagtgtgccgatatttccttgagatcctgctttcaattcttcttaatatatacctagaattgaaattgccagatcatatggtaattctatatttaattttctggggatctgccatgctgttttcacagcaggtataccattttatattctcaccaacagtgtgtaagggttctacttctctctatcctcatcaacacttgccattttctgtattttttttcttttgatagtagctatcctaatgggtatgaggatatatctgattattgttttgatttgcatttctgtaatgattagtgatgctggacatcttttcatgtgcttgttgctcatttttaggtcatctttggagaaatacctactcaagtcctttgcccatttcaaaattggattatttgtttttgtttccgttgagtggcagaggctctttatatattctgtatattaacacattttcagatgtgtgattttcaaatattttcttccatttcataggttgccttttagctctgttgactatgtccattgatgcacagaagttttgaattttcgtgtagtctagttttacttttgttgtctgtgctttttctgtcatatcctggaaatccttgccaaatccaatgttgtgaggcctacccccctgtgttttcttctgagagttttatagttttaggccttatgtttaggtcttgatccattttgggttactttttgtgtatggtataaggtcagggtctatgctcatatatagttttattacatcttgccaaattctccccccaaagagaaagtagtaccagtctgcattcccaccaccagtacatcacagtgcctgtttccccacagccttcccaacagaatgtgttttcattttacaattcttgccaatctgagaagtaaaaaatgttatcagtgttgtttaattttcatttctataattatgtataaaatttgaacaatttctggtatgtttaaggtttatttttagttattttggtgaattatgtatttttttcaatttttctgttttgtttcatttttattttatttwwtttattttattttattttattttattttwttttattttattttattttacttagagatggagtcttgctctgtcgccaggctggagtgcagtggcaccatcttggctcactgcaacctccgcctcccgggttcaagcaattctccagcctcagcctccagagtagctgggactacaggcacacgccaccatgcctagctaatttttgtrttttttagtagagacggggtttcactatgttgggcaggattgtcttgatctcctgacctcgtgatccaccctcctcagcctcccaaagtgttgggattacaggtgtgagccaccactcctggccatgttttatttttaaatgtatcaatatgctatattaatagatttcttagtatttagacaatttttcactcttgaaataaatctctcttgactgtggtgtattgttttgtcaatgttgtgttgaattctatttgttaatattttatttagtatttttgcattgatgtttacaagtgatattatatgaatgatattgtgtagtctaaaccttaccacattttggtttcagtgtaataatttgctttataaaagcaagtagaaagtttccttcattttcaagacttggaacaatttatggagcattgggactatttggagtctgggaatttttctgtgaaaccatttgtgtttggtactgttcamcattttcactttttttcttataattttttctgtgttttttcctatacaaaattggtctttttaagcatttttgtctctagtgagatgtaattaacatctgtatttccttaggaaattactcatttcatctaatttttcaattttatttatatagagatctacaaagcattttcttatggctttaaaatttttcttgtatttcctttttgtcatttcttattttattttccttccttccttccctttttttttttttttttggagtcttgctctgtcgcccaggctggagtacagtggcgcgatcttggcttactgcagtctcaaccttccaggcttagttgatcctcccacctcagcctcccaagtagctgggactaggtgtgtgccatcatgcttggctaatttttgcattttttatagaaacagggtctccttatatttcctaggctggtctcaaactcctggattcaagtaatccacctgccttggcttcccaaagtgctgggtttacagcattgagccaccatgctgagcccatttcttattttctatgtttgtattatctctctttgtgaaagtagctagcagtttgtctattttgttaggttttctttctttttttttttttaaggaaataactaggattttgatttattgatcagttctactagttttctgttctctgtctcattactttctgcttttatcattatttctgtctttatgctttcttttggtttgttactcttaaaaaatttcgagctagatatttaaatcatgtatttaattctttcattttactggtaaaaatgtttagtgatacaaagttttcattcatcactgctttgaatatacctcatatacactaatatgtagttttcattatcattttatttttaaaaattttttatttcagccgggcgcggtggctcacgcctgtaatcccagcactttgggaggccgaggcgggtggatcatgaggtcaggagatcgagaccatcctggctaacaaggtgaaaccccgtctctactaaaaatacaaaaaattagccgggcgcggtggcgggcgcctgtagtcccagctactcgggaggctgaggcaggagaatggcgtgaacccgggaagcggagcttgcagtgagccgagattgcgccactgcagtccgcagtccgacctgggcgacagagcgagactccgtctcaaaaaaaaaaaaaaaaaaaaaaaawttttatttcattagtttttggggaacaggtggtatttgattacatgtataaattttttagtggtgatttctgagattttggtgcacccacaggagcagtgtacacggtacccaatggtgtagtcyttttttttttttttttttttcagacagagttttgctctcgttgcccaggctggagtgcaatggggcgatctcagctcactgcaacctctgcttcccggttcaagtgattctcctgcctcagcctcctgagtatctgggatcacaggcatgcaccaccatgcctggctaattttgtatttttattagggactgggtttctccatgttggtcaggctggtctcgaactccagacctcaggtcatccgccctccttgccctcccaaagtgctgggattacaggcgtgagccactgtgcccagcccattatatcattcttatgcttttacatctttatagcttagctcccacttataagtgagaacatatgatgtttggttttccattcttgtgttacttcacttagaataatggatcccaactccatccaggttgctgtgaatgccattattttgtkcctttttatggctgattagtattccatggttttgtgtgtgtgtgtgttgttgaatagggtgtcctttctctgctttatgtttttgtttgctttgtcaaagatcagttggttgtaagtatttgggtttatttctgggttctctagtctgttccattggtcaatgtgcctgtttttatatcagtaccatgctgttttggtgactatggctttacagtatagtttgaaatcaggtaatgtaatgcctccagatttgttctttttgtatagtattgctttggctacgtgggttccatttttggtgccacrtgaattttaagattgttttttctagttctgtgaagaatgatggtggtattttgatgggaattgcattgaatttgtagatcacttttgccatatggtcattttcacaatattgattctgcttatccatgagcgtgggatgtgtttccatttgtttgtgttgcctatgacttctttcagcagtgttttgtagttttccttgtagaggtctttcacctccttggttaggtatatttctaagcattttattttatttttgcagttattgtaaaacaggttgagttcttgatttgattgtcagcttggtcacagttggcatatagcagtgctactgatttgtgtacattgattttgtactctgaaacttcactgaatttatcagatataggagctttttggatgaatctttggggttttctaggtatgtgatcatcatatcattggtgaacacggacagtttcacttcctctttactaatttggatgccctttatttctttttcttgtctaattgctctggctaggacttccaggagtatgttgaacagaagacgtgaaactggatatccttgtcttgttccagttctcagggggagtgctttcaactttttcccattcagaattatgttggctgtgggtttgtcatagatggcttttattacattaaggcatttcctttgtatgctgattttgcagagagttttaatcataaagtgatgctggatttcgtccaatgttttttctgcatctattgaaatgatcctgtgatttttgtttttaattctgttcatgtggtgtatcacatttattgtcttttggatgttaaactatccaagcatcccttctgtgaagcccacttgatcacgctggattatctttttgatatgctgttggaattcagttagctagtatttttcttttttttttttttttgaggatttttgtatctgtgttcattggggatattggtatgtacttttctttttctgttaggccctttcctggttttggtaatagggtgatactggcttcatagaatgatttagggaggattctctctttttctatcttgtggattagtgtcaataggattggtaccaattcttctttgaatgtctgatagaattcagctgtgaatctgtctagtcctggacttttttttgttggcaattttttaattaccatttcagtctcactgcttgttattggtttgttgtgagttttcatttctttctggtttaatctaggagggtkgtatatttccaggaacttatccatctcctgtaggttttctagttaatgctcataaaggtgttcatagccttgaatgatcttttgtatttctttggtattggttgtaatakctcccatttcgtgtctaattcagtttatttggatctccttcttttcttgattaatcttgctaatggtctataaattttttctatcttttcaaagaaccagctttttgttttattaatttttttgtattttatttatttttgttgttgtttgtttcaattttatttagttctgcactgatcttggttgttttctgcagctgggtttgggtttggtttgttcttgattcactgcttccttaaggtgtgaccttagattgtctatttgtgctctttcagactttttgatgtaggtgttcaaygctatgaaatttgctcttagcaccacttttgctatattgcagaagttttgataggttgtatcactgtcactgttsagttcaaagaattttcagatttccatcttgatttccttgttgatgcaaagaccattcaggagcaggttatttaatttccatgtatttgtagtgttttgagggttccttttggagttgatttccagttttattccactgtggtctgagagagtacttgatataatttcgattttcttaaacttgttgagactggttttgtggcctatcataaggtctgtcttggagaattttccacgtaccagtgaatagaatgtatattctgcagttgttggatagaatgagaacataaatatctgttatgtccatttgttctatggtatggttaagtccattgtttctttgttgagtttctgtcttgatgacctgtctagtgctgtcagtggagtattgaagtccaccactcttatcgtgttgctgtctatctcatttcttaagtctagaagtaaatattttataaatttgggagctccagggttaggtatatataatttaggattgtggtattttcctgttggattagtccttttatcattatctaatgtccctctttgtctgttttagctgctgttgctttaaagtttgttttgtctgatatagaaatagctattcttgctcacatttcctgtccacatgcatggaatatttttttctacccctttaccttagatttatgtgagttcttatgtgtcaggtgagtctcttgaagacagcagatacttggttgatgagttcttacccattctgccattctgtatcttttacgtggagcgtttaggccatttacattcaacattaatattgagatgtgaggtactgttctattcatcatgctatttgttgcctgaataccttggtttttttttttcattgtgttattgttttataggccctgtgaaatttatgatttaaggaggttctgttttgttgtattttcagtatttgttccmagatttagagctcctgttagcagttcttgtggtggcttagtagtggcgaattctcttagcatttgtttgtctggaaaagactgtatctttccttcatttatgaagcttagttttgctggatacgaaattgttggctgataattgttttgtttaaggaggctaaatatagtacctcaatcccttccagcttgtaggtttctgtttagaaatctcctgttaatctgataggttacctgatgcttttgcctcacagctgttaagattctttcctttgtcttgactttagataacctaatgactatatgcccmagcggtgatctctttgctatgaatttactgtgtgttctttgagcttcttttatttggatgtctagatctctagcmaggccagggaaattttccttgattattccctcaagtaagttttccaaacttttagatttttcttcttcctcaggaacaccaattaattttaggtttggttgtttaacgtaattccmaatctcttggaagctttgttcattttttttttgattctttgtctttgtcagattgggttaatttgaaagccttgtctttgagctctgaagttctttcttctacttgtttatttctattgttgaaactttccagtgtattttgcatatctctgagtgtgtcttttatttccagaggttgtgattgattgttttttatttgtggtatctatttctctcaagatttttccatccatagcttgtattaatttttaaatttaagttgtttgtcaccttttgctggtgcctccttgagtagcttaataattgaccttctgaattctttttctgtcaattcagtgatttctgcttggtttggatccattgctagtgagctactgtgatcttttggggtgttacagaaccttgttttgtcatattaccagaattgtttttctggtttcttctcatttggatagactatgtcagagaaaggatctgggactcaagggctgctgtttaaattttttttggcccccagcatgatcccttgatgtggtgctctccccattcccctatggttggggcttcctgagagctggactgctgtgattgttattgctcttctgggtctggccacccagcagagctactaggctatgggctggtacttgggggtttctgcaaagagtcttgggatgtgatctgtcttcaggtctctcagctggtctctcagccagcacttgctccagttaccaccaccacacctggctaatttttgtattttttgtagaaatggggtctccctatgttgcctaagctgaatttgacctcctgggctcaagcgatcatcccacctcagcctcccaatgtgacaggattacagacatgagccacgcactcgacttaatcttgtcttttagttccgttttttttttttctgagtttcatcactttcttctcactcgttcatgtttttkgtccgtgtcttttcttagtttkggaatttctggctcaaggtggcttttcgcatccctcatcctgcctatttctttatctgtattttattctctatttkggtgtcttgtatttcctcagkgcttcctatgaattattcatttgagcccctctctkgggcatttaataatttattatttatctttgagattttttttttttkggttatccaggctggagagcagtggtgcaatcatacctctctgcagccttgaaccctaggctcaaagggatcctgctgcctcagcctcccagatagcactacagacgtgagcaaccacatttggccaacttttttatttttgtttttttgtagagatggggtctcactatgttgcccagaatggtctcaaactcctggcttcaagaagttctcctattttggcctcccaatatactgggattacaggcatgagccagagcacctggcctaattttgtcattttcttccatttcttttctgagggtcatcattttctcttcacactttcctgttttttgtccatatcttttcttagtttttgaatttctggctcaaggtagcttttcctatcccaaattcttgtttgagtatattggttccatctggaatgttgccttctagttttcttgtgcttcatggttgttttgttgaagggaatttacctctgttgctgtgtgttggatattctgtctttttaaaataatacttcagtatgagtctgttcatcatttttttgtttgtttttatgatattggggtgttttataggatttttagctcattggctccctcttctgtcactatagcaaagtccagatctttgttttggtagcatcggaaggtttgtggtctctgaattttagctgtcttgtcatcgggtaggattccaaattttcccttttttcctgtttctcttttagccatccaatagccaaagggcatttctctctactttttgtttccttttttatttcccagaagctacgtgtttcaaaaactggtcaagattgtgtctgcttttacatcccatccctatagtcagctctgtgatctgtctagatacctttttagtattttgaaacttagggttgactttgtctttcctctgatggttttagatcaaccttaagttcatcactaattcccttctctctttgttatagtttttcacattctacctttgtttgcaataaggccttctggcagatcagggacagaggaggagcatgagatatcacttgctgggattaggtgtctttttcttatttttatttacagttgttttggattttggtcagttcagttttcaagtgatcccgaggacatggtttttgtgtagttttgctgcttatttttcttgtcctctattgcttctggaggaaatattgaaagatggagacataagcaaccacctttgtcagcctgagagtttccaaagctgaatgttttaaaagtgcatttttwactatttttcttcattttgagttttgatgttacattttgtcacattatctcattaaatttgcacatctctgagctacacatactatctccatttcatgaatgaagaaatcaaggtccagcaagattaaatgactcaagggagatcacacaaccagaaactgatagagattctaatcaactctaaaattgtatgatgccaagctcttgttctttccactacatcttgccatctccctgagtaactgaacttagaaagcccatgcattaattaaatactgcaacctaaaacattttagtgattataaatgtaaactgtcagtttattcatctgttccttgtccctcctgttatcttgcagtcctgttatatttttagtagcctcttctccactggcttctactccttgaccttctaaggtacattttctttcctgtaaacgagatcatgtacattaagtgctatctcttgaaaaaaatgattcaacagatgtcaattttgtttatttatttattttcctaatagaggtttttactctatctccccttawagcagacctaccatcatttccctcttggcccactttcacgtacgggaggacccgtgcacactcaccttgctttcaaaactcactgccctccctgygcaaactcctcacttcatggaaatgatagccccaagtagcagttggcaacaacttttggctcctcctttctggagtgggtgttgtattgtctgtagttttctttaaagtaatttaatctgcaccttaggggtgcttagttaacatttttgaagtaccttaatcatgaatctacactccaggggtagttagttaacatttgaaagaccctaatcaaaattctatactccagaggcaaccagtgcctcagatattgctctcaacctgtaccagtgggtgcattaattagaataaaagatgtaagaagtaatttttcacggtgaaggaaatgctatttaagatatgtagttggccagtttcctacacagagataagacatgagtggaggctgaggatacagatttggcaagggcaacagtcttccaacctaggtaggcccttgatttggtcctgtgcttgctgcttttagtggaggatttggtttggttggctcacctggcctgtggagcgcattaagtctttattaccctgcatgggccaaatccagcctgcttctgtctgcttctccatccagcgctcattggaactgtactccggctcctctccatgtttgcatttcttgtccacagagatgttattctcaatcttgagtcagatgatttctttttaatttcttaatttacatttttaaatttaattatattttgagcatattggatatgttaagagtgtgaatttatagtgccattttgatcagaagcactcacattatttttaaatggtaactttcttactattttctacttgagaatattgtcagtattctcaggccaggttctcatctgtggggcttctagataagtaacttgtttgatattctagtggtctaattaggctgggtgatgtttttgaacattcctttttatatttaattctattcaatagtgacagttctcatgtgatagagggataatattcttgaatacatgtgatttaagttacgtagattgaaatcatatacgtgatttttgtgtaatttgtgtatcatgcgtagtataaggaatgacatctaccaagagtttctatagtaaacattactattgtcctatatcttagttaacatgtacaaatataaatgaaataatgcagtttatgaagtaaaatactgaagtatatcaccagggcccttattttctggggtttggtgacgtgtatgtgtggtatggcatatattactgatcttgtcccatcaaatatactgagcaaaggaagcagtcatgatgaactggtggtctagattgctttctgtactcactaggacacgaagtaattttttaaataaaatatttaactgtataaatagtctatttagcttttttatatgttattttttaagtgagccatctataatataggtatacatgtaagtagctgtaggctrtgtaatcaaggatatatagacgtaaactatactttttttttttttttgtgaggcagagttttgctctcttgcccaggctagagtgcagtggtgcgatcttggctcactgcaacctccgcctcctgggttcaagcaattctcctgcctcaacctcccgagtagctgggactacaggcgtgtgccaccacacccagctaatttttgtatttttagtagagatggggtttcaccatgttggccaggatggtctcgatctcttgacctcttgatccgcctgcctcagcctcccaaagtgctgggattacaggcgtgagccaccacacccagcctgtaaactatacttagtggaatcatggaattgtagcgaatgaaaggaccatagatattatctagtcaatcttttcatgagtcccagagagttttagctaagccctcctttcatgattccattcttagcttcaatcacagagatgatttatagccatttagacatacataccaatatatccatatctatacatacaatgtgtgtgtgtgtgtagggggctgtgatcacaagcacttggggccaatagaattttagtagaaataattggttaaagggcattaaaatcttttaatatttagcattatcagtctgtgaaagtcttcgaaactaggtttgagaaatctttactcattaagaccctcagagcagaaaaatcaagggtaagagaactgggaaaggaagttaagtatttctaattttaaagtgttctaaaacctacacgttgagtacatattgtagcaatatagatactagggaatgatttggagttcagtagtttggaaatacgtatattttgttataattctgatgtgagactttactgaattcctgttaaattatttttgtgcagggcttttttcataaagcaccaataattctacctgacctcacagggttttgtgatattagactagtcatggttgattatattatccttttaaattgccttttaattttcagctgatgtaagtgaaatagataatataaattaattaatattggatctgttcagtgtttatgctctaggagatttcaggagacaaacagaaagagaaggttctaaacaagtgccgtttggggctgtgtcattttattattcatacctggcttatttgttgttctttaatgggctatctatcatattagtgtgtatgtaagtggctacatgtgacataatctcaagtcttattgatttaaactgcatttacctcatcactaatcactcttgtggcaggtagctgcagtgttcagggggcactttgtatgtgtcacgtttgtgactcatacgtgcttttttgtgaagagcattttgtctcacctaaattcctattactttttggtcctacctgaagctctgcttacaattttgcgtatttctacccgcagtccccaaacatgctgaatttagttggcttgttggccgctaaatacttttctctccttgctgtggggttggttttgctggatggagtacttctctttcctgaagtatctagcttcttcatgtgtaaaacaaaaccagtaactgaaatgtcaaatttggaaatataaatgactttttttgatctgccttcagagttgcgttgtcatctttataagcttaagacttcctggttttattccaagttttactaatattcaaaaagtttatttgttaaatcccatatcatcaaatgcactccacattgcaagtaaaaccaaatgaatctggtcattatacctctttctactcatggatttcagggatctaatgagcttagtaagatttgcatcatggataaatagaggacttattcttataagaataaaaattgtgtaagtgattatatcatgtatgtaattaaaatggttttgattcagatttaaatgtttttttttttattgtggtaacgtcacataccataaagcctaccattttaaccattttggaatgtacagtcctgcagtgttaaatacattgatagtgttgtgcaaccatcaccaccatctatttccattactcttttcattcttgtaaaactgaaactctgtactcattaaagaccaattccccatacccctcttctcccagctcttggcaaccaccattctactttctgtttctataaatttgactaagtacggcatataagtagaaacatacagtatttgtctttcttttgactgagttatttcatttagcataatgtactcaaggttcatccatgttgtagcatgtgtcagaatttccttcctttttaaagctgaataatattccattgtatgtatatatcacattttgcttatccattcgtgtgttgatggactcttgagttgcttccacattttagtgattgtgaataatgctgctatgaaaatgagtgtactcttcaagaccctgatatctcttcaagaccctgcctgcaattctttaagtgtatactcaattagaattgctggatatatagtaatttcatttttaattttttgaggaaccgcaatatgggttttcatagtggctgtaccattttacattcccaacagcagtgcacaagcgttccaatttctccacatccttgccaactcttgctatttcctgtttttttttggggggggtgatattaatagtagccatcccaatgagtgtagggtggcatctcattttagctttgatttgcattttcctaatgattagtgatgttaggcatcatttcaagtgcatattggccatttgtatatcttctttgaaaaaatgtctattcaagtcccttgcacatattcaagttgacttttttgttgaatttaggagtgctctatatattttgtatattaataccttatccgatatgtgattttgaattttttgtcctattctgttggttgcctttttactttgttcttagtgtcttttggtgcacaaaaattttaaaattttcatgcagtccaatttgattttttcttttattgcttgtgtttttggtatcatatccaaaaaaatcattaccaaatccaatgtcataaagcttttgccctgtgttttcttctgagagttttattgttttaggtcttacatttaggactgtgatctattttgagttaatttttgtatatggtgttagataaggatccaacttcattttttgtatgtagatattgtttccctgtacagcatttgttgaaaggccgtcctttccccattgaatggtcttggtattctcgccaaaaatcatttgactgtgtatgtgaggttttttcccctagggtctcttttctgttccattggtctatatatttgtctttgtgccagcaccacagtgttttgattactgtaacttctaagtaagtttgaaattaggaagtaagttttgaaatgaagtatgagtcttctagatttgttcttctttttcaagatggtattggctattctggatcccttgagattctgtatgaatttcaggatggtctctctctgcaaaaaatgtcattgggattttgatggggcagttgcattgactttgtaaactgctttaggtataatagtattggcatcttaacagtagtaagtcttccagtccgtgcacatgggatgcgtttccattcatttatttgtttccattaattataattttttaatttagcaacaatttyatagctttcattatatagcttatatatattatagctttcattatataaagctttcattacataagtttttcatctttttcgttaattcctgattattctttttaatgtaaactgaattatttttataatttccttttgagattgttcactgttartgtatagaaatgcaatggacttgatcatagtgtatagtcctataagtatgctgctgaattcagtttgttagtgttttgttgaggatttttacatctgtgttcataagtgatattggtttgtagttttattatactgcttttatctggctttggtatcagggcaatgctggcctcatagaataacttaggaagttttattccttyttctagaattttttggaaaagtttggttttctttaaatgtttggtagaattgaccagtgaagccatcaggtctagtgcttttctttgttggaagattttagactacttatttaatctccttactagttatagatctatttggattttctatttctttgtgatttagtgttgataggttttatgtttccaggaaattgtacatttcatctatgttatataacttggtgttgtacgattattcacagtactctgtttaatttatttctctagaatcaatggtaatgtaacttccatttatgaatttagtcatttgagtcgtctctatttttttcttagttcacctggctaaagatttrttatttttgatgatgttttcaaagaaccaactttgatttaatcagtttttggtattgtttttctattctctattttatctctgctctaatctttatatttacttttttctgctagctttggttagtttgttctgttttcagattccttaagctgtaaaattaagctgttgttttgagatcttttttgttttttaccgtaagcatttataactataaatttctccttttttgctgtttttcctgcatcctgtaaattgtatttcatatgttgtgttttcattttcattaatctctaagtaattttctaatttcctttgaggtttcttmtttgatacattggtttttaaagagtgtgttaattgacataagtttgtgtattttccctttttaactttgttattgatttctaactttatccctatttagttagagaagatactttgtgtgatactttctacttaaatctattgagacttaattggcagcctaatatatggtttgtcctggaaaatgtcccatgtgtacttgagaagagtgtgtgtgttgctgttttggggtagagtgttctgtatgtgtctgttagatctagttggttgattgtgttaagtcttctgtttccttatttctgtctggttgttctatcaattatcgagagtagggtattgaagtcttcaactgttgtagaactgcgtatttctgccttcaattctgtcagtttttgcttcatatattttgatagtcattaggtgtataaatgtttakaatggttatatcttcttactgtgttgagcctttattaatatataatgtccttctttgtctcttgtaatctttttttgatttaaagtctattttttctgctcttgttttgctgctgttttcatggaatatctttttccagccttttactttcagcctatttgtgcctttgaatcgatttgtgcctttgtagacagcatataattggatcatgaatttttattcattctaccagtctctgtcttttggttggacagtttaacccatttacatttaaaataattactgataaggaatgacttatttcagacattttgctatttttttctatatgcattattttttttacccctcatgttctacattactgtattattttgtgtttagttgactttttatagtgaaatgtttaaattcctttctcatttcccgatggtatgcattctgtagcatttttctttgtgcttaccataggaattacatttaacattctaaagttataactctctaacttgaatttataccagtttaacttcaataaaatacaaaacctccactcctttaatggctctgtccctaccacttttggttgttgatgtcacagaattatatctttatacattgtgtgctcaaaaacataaactagtaattcttttaaatgcattagcctcttaaatgatgtwaaaaacaaaatgtggatttataaaccaaagttaacagtaatactagcttttagactaataattgtgttttaaaaatcttttaatattttaaattatgtagaaaacaatagttagaaataattgtcttgttgtaacactactaatttttataattgcctagacgtttatctttattgagatatttatttcttcatatgccttctagttactgtctaatgtcctttcattttaacgtgcaggactttataaagcatttcttgcatggcagtcctgatggtactgaaatcctgtagcttttgtttacttggcaatgtcttaatttttcccaatcacttttgaaggacagttttgtgtgatacagaattcttggttgacagtttttttatttgtttgtttgtttgttttggcactttgaattaatccactgccttctggcctcggaaatttctgatgagaaatctgtggataatcttattggggatcctgtatatgatgagtaacttcgctcactactttcaagattctctctttgtattttgaaaatttgattttaatgtgtcatggtgtaggtctctttgagttcctctcacttggagttttttgagcttcttggatgtttatattcatgtatttcatcaaatttgagacactttcttctattatttctttaaatattctctgctcttttctctctttcttctcctttcagagctcccacaatgtctaaattgtatcctgtgggctgtcttcacttctcttcaatcttttttcattctgttcttagatgataatttccattgtcctatcttgacgtttgctgattttttttcttctccctgctcacatctgcctttgaatccctctagtgcatttttcattccaagtatacttttcagctcaagaatttcttattctttttatttttttagttcttatatctctttattgatattgccagtttgtttatacattattttcttgactttctctttattttttgttatttgagcatctttaaaacagttaaaactttaaaaaaaactttttaaaagttttttttcttaatatatctaccattaagtctttttcagggacagtttctgttgatttattttttttcctttgaatgggccatatttgcctctctatttctatgctttgtgattttttgttgttgttgaaaactgggcatttgagtttaatgatgtggtgactccagaaatcacattctccctcttttcccgggttctctgggttttgatgttgttattgttttgttttataaattattgtagtcagtgtctatcctaaggatcagcctgggtgttaatttaagatctcctcaaataaagcttttctaagcctgcacctttacatgggcatgcacagtcaccttataattttttcaatacatgcatttgtttttgaatgtcctagtcctaatgtttggctttaaaacggggagcaagagaaaaataaaggcagtaggggaaggctactggctgtttaacttccctggaatttacttcagcaagagtaggaggggcttgaaaaattggaggaggtgcaacaacaattgtcacgtgcctctttgtacctctgtgattagaggaagcaatcagcgatcagagcatagattcttgatacttggcaggcagggttctttttgcccaccctgtcttcccaccaggtgtgtgcaaggtactccaggaacaggtacagggatgtctgccacagtgctaggtagctactttggtaagagctgtaattgaaatcgaccacaatttaccatccaagtgttcccttggaagttgcaagccttccatagactccagagttacaaaatagttacatcagacagattctgccagtacaatcgtgtaggtggggagattcctggtgcctcctactctgcagtcttcccagaatcctccttaagagcgttttataagctgggaacccccaaaatagggactgaggagaatgccctacagtggatttcacatcatctgaagtagaggttttatggactttgtgtagcagttacaagaactcattccatatactgggatgttttctttcttccctagtagatttcagtaccattctagtagtgctgaataacttagaatggcttgtagtctgagtttaaatctactaaggaagaatgtattcattctttcaggatattgcagatttttaaaatcttgcatttgttttgagagatggaggacagaggtggatggggaaaacttttgactattaggctccatcttcagctctgtactcacttttgcttttgtatatcttaatccagccatttgtaaaatgaggcagttacttttaagtcagagatttgtaacgtcctgttttttttggcagttgcgaaacccggaattcctatgtgaagttttgcatatgtatattcatactttggagagcaaggcctgtggctttcagtagataacagagatctcctatcagcagttctcccctctctccaacttgccacaggggttaaaaactaaagttttggttatttcttccatttcagtgccaaattgtttgaaagaatgctgtattctaaagatctacagaggcttttgacatataacattacttctcagaagcctttcatggattattagcaagatctgtctcctatagataattatgttgtagcagacatatgtttaaagaaaaataggttgttcttttgtatttatgaaatacctcttcgttaccctatttcctcaaagtcttgtctcacttgtatgtattgttttcccttaatctttttaaaaaatttattataattttaatttatttatcactcttccccctgtgtgtattcatgatgtctttttctccagcgacttaccacttttaactaacaaatacaaacctgaggctaggatccagctcttcagaattctcttgcagcgccacatatggcattttataaacagcgagtgcctaataaatgtcatgagccagtggactcatggcagaagtagtagtctgtggaaaacttcccatggtgatttgtttactaatttttattgcatctgcctcttattactaactgatgggtatgatttgaggaatataaatgttattttgtgacttttggatggttactgtgcaaatataatttaattgaaaaatcctctttaattctttaagagagtaatcaaggcagtgatttcgtttattmgactgctctgttttggggtttttgagtggagtctgtatctattattgttattatttaatttttcagtgagggagataaatctgcaggacatcaaggaagatttagaattggatccagaggaaaacagcaccctgtttatgggtatcctcattaagggcttggcgaaactgaagaagatyccagaaacagttaaggcaatcatagagcgcttggagcaggagttgaagcaaattgtgaagaggtctacaacccaggtggcagacagtggctatcagcggggggagaacgttactgtggagaaccaaccaaggtaggtgggagtgtattttgtatttttgacaactctatttattgcacattttctagggtggggcgtaagtaacttaccttctgttgatgttgttttcttgaacttaggatactatagcccatacaggccaggcgcagtggctcacgcctgttatcccagcactttgggaggctgaggcaggcagatcacttgaggtcagaagtttgagaccagcctgtactagtagtgaaaccctgtctctactaaaaatacagaaattagctgggcatggtagtgcatgcctgtaatcccagctgttctggaggctgaggcaggagaactgcttgaacgcaggaggcggaggttgcagtgagccgagattgcaccattgctctccggcctaggtgacagagcgagactccgtcttaaaaaataaaaaggatactatagcccatacaaactttgattggtaaaacagcttgactaggcataattcagctgtctgttttttaatgttgttgaaaaattcaaagcatattgtcactcaatgaaaaatatggacatatttatagtagagattgtcgatatttaaacatttaaagaataaattgaatcaaataatgtagcagctattgtacacatactaagtactcagcaatgttcaaggcaatttatgtatattatctcacttaattatcactacaactgtatgacctagttattagtatccacatattgcagttaggagaactggagctcagagattgaataattagcaagctcttagaaaaagtcttggtgttgaatactagtccatttgattctaaaatccatggtctttcctgtgtctcatgctttcttctttaatgtgtaatgatatttccaatagacaaatcagtctcaggaatttttaaaacaataagatttgaatttcataattcttatttcatatggagagtacggaaattgaattcagattctaactttgtgactatcatatactaacagatcatgtgtgacaaacaagaagaaatcataatcttgtagatacgttgttaaggaaatatctactgtttatacctagggctcaaagtttttttaaaagaagataaaattaaggagaaataataactcatttagtatagagttctctatagacttatttaaattttttggaaaaattaatactgtatttctgtgttcttttgcatatgtaaataacattgatttcaattatactttaacatttcaaaaattaatttccttgtaaacttgattcaaaagtactatgtttggtgaatggaactaccctttatccttctcctgccacagaatgtttcaaagtaaatatttggccaggcacagtggctcatgcctataatcccagcactttgggaggctgaggtgggcagattgcttgaggtcaggagttcgagagcagcctggccaacatagtgaaackccaactctactaaaaatacaaaaattagctgggcatggtggtgcatgcctgtagtcccagctacttgggagtctgaggcacaagaattgcttgaaccggggaggcgaaggttgcagtgagccgagcacactactgcactccagcctggttgacagagtgaaacttcatctcaaacaaacaaacaaacaaacaccccaaaaaaccaaaaccaaacaaacaaaaacaccaaaagtaaatatttgatgggttttggagaacagacctgactttgtatccccactttgtgatttgcaaaaattaacctgtcttacagtgttgcttgctttagatgaggttatatggttgtggtgcttagtggaatagcaccagtaagtactataacatgcatgcctgcttgtataaaatgcgtgtgtatatgaatatatgtttattatcggtgccttccccaaattccatgttctatgatcacttacatcatgatccagagaagctggagaatggttctttgaacttttgcctttcttctttctttgcctggcacctggattttcgtgaagaccttttgactccttactgatgaatactctaaaattctggtttgctctttgcctgttgctgcaagttcctagatgaatacagtgaactttcctagggaaataacattgctgtagtatatattggaaataaaagggcatggattaataacttttctgcagatctcattatagtacctttaaaagcactgtgtctttcataggagtttcatcttttttttttccccttgcctaaaccccttccagaattcacgagtggaaattatagcactagaagtataatagaaattcagcacactgccctgggaaatactaaatgtttctctatgaggaatgagtcagcagcaggatttttttccctgttaagtgtctttcgtttgtccgtattttagaaagcttttgtaggcaggatatattggacactaacaagtgaatgagctgtttgccttggctgtatgtataaacataatcccattttataaaacatacaaattcaagatttgggacccaaactgtttattatgagacaaaatagtacagagaaagcaagtatttagagtaaaccactttgttagaagatcaaagattaaattttggggctgggattccaaaggactgataattttgagctagtctctagtggttatgtgctgtcaaatgctttaaaactttymaggaattaattctcttgaattaagcagagtcattcaaaaatgatcagcattgttgcttctagaggattggaattttagaagcaatattgtcaaattatcatttgaagcttgtggtgcttttgtgcattgactyttacttaggaaggtattagtggcatttatttcagagagaagtaaaatcacaatacttggcattatttattattgtttaccattcaaggaattttatggctaaagatatatgaatttatttttttaaagaaagttggaacagagaccaaaaaatccatgaatcctgtttcccaacatgaaaattttctcccccaccctccagtgaaatatcctgttccaaaacattagttattctgagacaagatacccatactgtaattttccctaaaagtttcatcatcttattaaatatattctggttgtgatgcattgcaggcttgttttcatttgtctttatrtaaagagaattaatgttgtgtgctattttgctagaaatgtagaaggaaacaaactagtgaattctttcttgcttttaattcctacagagccaggatactttcccagccagttttttaaaaaatcactttggtgacctacttattattttattttattttgtttttgatctcccaaactatctgttgtctatttataggagaaatattttgtcttttctgttcattcataatctatcagtgtctttaagcctccacttactattaaatgaaaatattcaaccacaattattgccaacttgataaacattagggtaacatgtgccttgctaatttaccagaaccacctgctacccattatttctctagaaagacaggcagcgtcttcaacttcagatggtgactgtggcctgaagcctctgcatttcagaatcaatttcttcaactcctgctgcctaattgttgattctttcccaaaatctgattcatgagtatttttatattatttttatttgaaagaagctggaaggagttctgtacttaacaaataagaaaagcataaggaagagatggaagaaaaacttctcaaagatgtggtatcttgtcaagaatatggaagaaaagaatgtgggaaaagagaatggttggtatgtgtgagggaaatggacctgtttaaatgcaaaggcaaaaattcattgcaggaagggatggtggaggtcagcttcacttaggtagagctgtaggtcctagagagtgcagaaggcgttgagtgagttggagccgttgcttccagggagacctttctctcttttggaaggaaaccattttaaaaggttcattgacttctgttatgaagaaaaagattaaatgtcagatgtgaaaagcagagaactttgtgggttttgggcttgttgtaatattgaagaaagcttcatggaaaacatgggaaagaaatatactttaatgctaaaagtagttgtgtttggttagtagggttgtagtctttgctttttcatctctgttttgcacctcaagttatagtgaaaataattcattgtcaaaaaattaaattattactcaggttattttaatcacaagaaattattagaaataaaaatgcctgtgggggtatgaatgttcataaaactaaattttaatattgaaaaatataatacctgtttttaaaccaacttgacatcattcattaattttattatatatgtgtatctttatatatatttggttatttattggctgcctctagaatggaagagaagagagcactagtttgtcttgttcagtactggtgtatctccagaatctagcacagtgcccacctgacccataataaatatttgttgattgcaagaataaattccacatttatgaaatatctgccatggaccagacattgggtaaaatgcccaacaaattatatgtggtccctgtcctcatggagtttaaagcaggaaggaaggcrttactcaaagaacgctaagatgtgagaatgaaagcagccagattcttgatatgccattttcactgtttttgcttacctctgtattgattaaattttttcttttttttggagacggagtcttgctctgttgcccaggctgaagtgcagtggtgtgatcttggctcactgcaagctccgcctcctgggttcacaccattctcctgcctcagcctcccaagtaactgggactacaggygcctgccaccacgcccggctaattttttgtattttttgtagagacggggtttcaccgtgttagccaggatggtctccatctcctgaccttgtgatctgcctgcctcggcctcccgagtgttgattaaattttaactgttgccaactgtgctttgcttagagatgataccaatttttcatgtaatggataatgtttgagagttcctatatccccttgccaacagattgtattatcaaatacttttatccttgccaatctgagaggtraaaaatggtatttttggatttgcatttttattgtaaggttacacttcttttcgtttgtataaaagtaacttgtcatgatatctgggttatatatggatgtattacttcaaaataaaatgagttgcaaatgagtgaagatatagatacaataagccatgaaatgatactgaagcagggtgataggtacaaggtggttcattatcctattatcttcacttttttaatgtttgaaattttcaacagtacaatgtttaaagtgtttatttccttttcaatgaattatttttctaacatgtttgtctcattgatttgtaggaactctttacatatataggaaatttgttctttgggatttattttgtaattttctgccagtttctttctcttttgacttcatgatgtttctgggcatgtagacatttgttttaattttttatgagggtatatttatcaggttttatagcttctgggttttgtgtcatacttagagcttccctactcttagattataataaaattttcaacacttttctagtacttatatagtctcattcttaatatttatatctttgatacatctgggatctgaaggagtgaccaaacgacttttgagcacacctgacacatactatactgtattgtaaggggttgtacacccttttcttttctgtcatccatgtgtctgtcatgtaattgtccatgttagctgcataattgctgaataattctaacgctgagtcgtttatcatatggtgatggttcttctcaaggttggtatttgccacattttctaaaactctttttttcctcctggtttctcagtctgtgaagactatagattttcagaaatacgttgaattattgctctaaaattggaaaaatatacttttgaaatattttttataatttggaggccagaattcagaatgagggcatactgctgtaatagaactttcttataaaatggttttatctgtgaggaagactaaaggctcaggcctcaaggatagttttatagtatgaatacaatgtttatggaaggagaaataaatgaaatattgctcatgattttttttagacctgtggctagattcaggcatgagtttctatttcacataaatagcatttcgttttatctcttctttctatattagttacccttcttctaagtatccgaaatgcaggacatggtggaattggtcattttattttacagaaaagtcattcaagagcagctttgaagcaaggtcaggcattttccttgtggcttcttatagccattcccaggcaccgcatgtagcacctggacaygcttggaatcaggaagggcctccgtgtaatttagatgagtagttaattcgaatcaaagcaagcgggaagcaagtaaatttaacttcagtgattatgattccatttgattaaatctctacttttgattacacatatcatgagaacatgctttaaatatacccaactatttaatattgaaggggatgaataggatgaaccagggacatatagaagaaattccactattcttcaactaggatatgtcccctgcagcttaactgaaatatttttagaacaaatgaaaggataattttttttacatatgggacttgttactccaattgttaactaaaatatataactcattaccatgaaaggtcccaagtctatatactttctagtaagacttaaataaattaatggataatagctccatcacatatacagtgtctgagaaatgtcaataatgttcatagttcttttgtaaacatgagtttggacagctatcattctggttgtgtattgtccyttggttatagtcattagagaaaggcttcttggctgaataggccagagatgttactcaatattacatttcttaaacctttgtgttttatgtggcaaagttaaaaaaaaaaamaaaaaaaacctactctcgatttctcttgttttacatattatagtaggttcaaattaaagatctgaccagtcaaagaaatagagacaatctgtttcatggactgtaataactttatttagatggcagccatcatgctgtatcaaggccacttctctgtttgctagagtgggagctgccttaggttttgtcatttttgtgcacttgctattgttataataggaaaggcactccaagttcaaaataatactggatcttttcattgcaaaaatgaactaacaaacctatgtcaaaagaaattcttacgttgatgatgtgtaggggtggtgtcatatatgattaaagcaccttcatgtgtctctcaggctgtatttcaaattgtctgggtcttctagctcctgccccatcctcttgctatagtctctaatcagattggactgtgagtttataaggggaggtaactttgtgtttgcagcctgatttagggctgggcacatacgaaatgcctacaagtttatttttatggagatgtggtctcactctgtcgctgaggctggaatgtagaggcycaatcatcatggctcactgtagccttgaccccccctgggctcaagagatcctcctgctttagcctcctgagtagttgggactacagktatatgacacgatgcctagctatttaaagtattttttttttttttttaagagatagtgtctcacagtgattgcccaggctggccttgaactcccggtctcaagagtctttccactttagcctcccaaaatactgggattacaggtgtgagccaccatgcctggccagttttaatgaatgaatgaataagaaaaagatgcaaataaggtcatttagtggaagttattattattattttcagcactactcacagtgggtctatggacccacatcaccagtgtcactagagagttggaaatgcaaatttccccaagaagcagtggttattaaattggaatgtttggatgcagggcccacaggactctatgccttagttgattcttatgcacactgaagtttgagaacactctttagataacatcacaaacatcatagaattttgcagttttgtagtattcacgctttgcaaagccatctgccatctggtatctcacctgagtgagcctcaccacttgcctcctcacaggcaggggcattattattaatcccagatttacccagagaaatgtgaaagctgaaataatttgacagttcacaaagcttgttcgtggtgcaattaagattagaagtagtctttttccaccatgtaagtttgctttctggcttatataaacatgatgtttccaacccatgtcatgggcctgattttgtttgtcctcagaaggacgatatctgtactaaatatccattttcctgcccatacctcacactgtggtcagtggcaggcctcagagatagctggacatgttgagaagcgtgaaaagcagccacagagtgcctggattttaattaggtcacttgagaatcaaattttattatctaaacaattcctctaggggcattcttgtactaggaacaatatagtactaagaacaacaaagcacttgtactaagaacaacaaagcactaagaatatgcacctaaaatcttaacttttgttatccctgggaagtggatttatggatcatttttctaatattccactatgatgaaatgttatttttggaatgggggaaaggatttcaaaagaatgatactgatactttaattcaaagaaatagggcctgggtttattttctaattttagccacaaatttggcatacatcaggattagacgtttgaggtcatctctccagaactcagaaacctgacttgacaaggagggagtaacacaggaaggaagtgactagcaccaggccccacttcagtattcttgttatttttactgtgtttcattctatattactactaattttttcttgctcttttcatagagcagatggagaattagtcagcactctttaaatagtaacccctttttacatgaagacttattaataagtggtaaaacgtatttctatcccttagaagtaggtattagataaccttgaagattaaatgggctccatgtcctatttgaaatgaaaaatagtagctcagccaggcttattaaggaaatgtgtatgagagatatgggcaggtaaaacaaagaccatttttatctaattatacgtttctttttataaaattataaagtttttatataaagtctacgctctgagttcactactttcttaccttttagagcataatcgtagggaaataaacattctatggttattgcttttgtcagtggggaaaagcataaccctgatattaaagtctcagcagacaagtartagaacagaactaattcttctatcttgtgtgtgtctttgcttcgtgaccaagtaaggcagcttcttggctgcaaacgtgggttttccagccaaatgactaattcaaggttccctggatgttaaatttagattcagatagtcttatctcaccttaaatattgagcatttttcacagcttgatgatgtagctttacactgttgatgcttcttgccttctgcaactgtgactgttccttaatatgtgcctcttcttagccttctgccttttttcatggtagcacttgaagatgagatacctagggatcacttggggctggaagttaatagatgatctgggagaataagtaacattttacttctctaggaagtctggttttaaaacctgctgggtaattagaagtgtgtttaaagaataaacactttcttcatcctgttacttttctgttttttaaatataaaatagattttattgccatattattaaagttggctcttaaagtttgtatctttcagttcgtaactgtacttcatgttctcatgtttagcttggtaaggttacctttttgagagcatggttttgtgtgaaatattttttattgtgggcttctaaaatcaggaggttataatctataacacttactttcttaccacctcttatctgtaatcaggcctctctcccattttgctggagcccactttttcattcctttatcaacaaatatttattgcctatcatatgctattttgccaatcagtgtcatgccaaatattggaatacagtaataaatcagaaactcatacccacagtgagcttacagtagaggggaagaggaaaggactggagggaaggagagactagtttgaagacagttttaataatcctggcaaaaggcaacatggccggcatgagcaaggtaaccgtggcaatggagtgaaggaggcctatttgagagagagtaaagaggtagcagtaaagagacttggtgatggcttgggtatgagggaggaggggaggtaaggattttttgctggggcaagcattaccatttactgatgtagagaacatgaagaagtagatttggggaagaatatgatgagttccatttaagtcatattaagttagcggtctacagctcaggggagtaatctggcyaagggatatgtgtgtgagttgatagcaggtagataattgaagattaggggcaaatgagctcagctagagagagtatgagggggttgagaagagtttaccgcatttaaggaacaggctgaggatgaggttcctgagaaggaataactggagaggtggcaggaaagcagaagagtggagggttgtggagccagtggaagacagtgtttcaaggaggcacaagtgggcagtagaaacaagtgccgcggctatttgattagaggccaaagtgggtttcttggatggagcaaaataattatttgggacttttagcaacagctgttttagtagggtcccaggggtgaaaacctgtttgcagtgagaaggaagaggcagtacagacagttctgttggctctctttctagccttggcttccctagcattatagagtactaatatcactttggcctctcttctaaaatactttcyctgttttctaacgcccctaaaaagggacagtctccagaactgtgtcctttgttctcttatctttgaacttcagtttccttgtctataaaatggcgataaagtagtaccttccttatagggctgccctaaggatgaaatgagataatccaagtaaagtacttaacacagtgctcggcatgttgtgagtaattaggaaagagtggctgttatgaccatagttctcctttttgttgctgtcatgatttcattgtcattgtcactgatacttcatttcagtcttactttcttagggatctcctccattatgacaggtagctaactacctgccccttgtagaagaaggaccccagatcatcatctttcatcccagacttctgcttatattgccatcctgcattgctcattcttttactcatgaactcgtttgccctcaaaatttgactgttttctccattctggacattggtccatgtgttgtaggagagatgtgtttacaaagaaccataaaatarggattctgcctacactttctggcccaggaggccatgcatacctgttttgtcacttctctcagttcattgtaatagtttgtttggagggactgtagaatcacagaggaaagagagaattggttcttactctgtggattaggcctcttttggttataagtgccaggaattgaaatcacctaacttaatcaaagaggggctttttattagaatgatacagaattattattatggaatataagcaggactttactaatcmagctgtaagaaggagagagatgcagctgggccttaggaacatccagagtatctattatctcctttccttccctctagatggtaaatgttaaagatacaggaattaattcattgttacttttaatttgcttttttttaagtgttacattcatatatatttttgtatgtagctctcacagtcaatttctgaggaacgtgaaatttggagaagtctatgatgtcttgaaagtcccatgtctatttaatagagagctggtattcaagtccaggtttctaactggtatttataccacattgccatctaggattaatattttctttcactaactgtgatgctgcattgagtattactacatactgttttgtggctttagaaataacttgtgagagaggggtatgtgtgttatttttttctgaagggtagaaattgcaattaattgaaattaaaatctctaaagttcttgggcctttactaattcaattcagcttaaggaatcctgaggtaatttaatgatcttgcctgctcttttgtcttttttagatcagtggtgaaaacctttatcctagcagtatgtaagcaactgagctagctgcaacataatgttttatttcttttatttaatattttctgttgggagttgggcagggaatgatttcamtggggcattgtgttttcatccttagtgtgtctgcagctaaaggcaaacaactctttctcaatcttgtgttgtgggcagtcagagagtgtatataaatattaacaacatatttcagtttatttctggtagctttaaattgggacaagctagtgcagatttacatcctgtttatgtgaatgattcctaatctcttattctttgctgcatcagaggagcgtcgtcttcctttctccttttctttttaaaggagtgtacgtgctggtgagggacaacatatgattgactttggtttctttttccttattagtcattcactgcttatcccactactgagttccactcaatgatccactgaaacccttcttgtcaaggtcactggggaccttaagttgtaaatttctctctcttagccttaccatagcctttgactctgctggtattctcttctctttggtcctctgcaatgttccctggcttccttcttcctctctagttactttctaaccatctttttaatgatactctttcctggagtgttggtcctggacctcacttgcttttcttattctgcatattatccccgagtgatctcatctcctcaaatatttatcacttttaaaatttccagtatcattctctctgctgagctccagacttgcatatctgactccctaaggatataacaccttaaacttaacatatccagataaaaacccagcatctctccttctactagatttccttttttttttttttttttttttttgagacggagtttcgctcttattgcccaggctggagtgcaatkkcgcaatttggctcacccaacctttgcctgccgggttcaagcgattcttctgcctcagcctcccgagtagctgggattacaggcatgcaccaygacgcccrgctaattttgtacttttagtagagatggggtttctccatgttggtcaggctcccgacctcaggtgatccgccacctcggcctcccgaagtgctgggattacaggcgtgagccactgtgcctggcctccttccagatttctaatttcactttaattctctctccsccccgcccaccctcccccccaaaagcataaaccaaagagtatctgagacaggtctcaatcagtttaggaagtttattttgccaaggttaaggacgcagccatgacatagcctcaggtccttacgaaatgtgcccaaggtggtcagggcacagctagttttttaattttaattttaatttttatatttttattttatayattttagggaggcatgagacatcaaccagtatgtgtaaaatatacattggtttcgtccggaaaggtggggcaagtcaagcgaggaggggcttctgggtcatagatagatagagacaaacagttgcattcttttgagtttctgattagcctttccaaaggaagcaatcagatacaaattaatctcagtgaccagagggatgacgttgagttctgtctgttctttgtccatgaggaatttccgtgtggacaaaatgtgagggaggtatgtagctttttaaaaaaatcttggtagctacttttttaaggactagaatgggaggcaggtttgcactaagcagttcccagcttgacttttccctttggcttagtgattttggggtcgcaagatttattttcctttcacacaggaaaggtaaccattctcctcagtgttgctcaagccagaaatttagacgaaggaaacttgaacctttccctgtctttagaattgtaccattacctcagctagttctgtgcatttyctaattcgatttttccagcagtgttgtgagtctcttagaacagttattaattaatactttcactttgcagacggggacacttggagaagttgggagaatttttttcataacgaaagatgtaggcagtgtcagtgctgggaaagaatggaaatctattgtttcttacatgttacttaagaaagagaaagaaaaaaccaagtgaactaaaagagaaaagttgatgtcctcctggtagtaagaatgtaaaggaatcagctttcacaacacctcgctttttgagatgccaggtttcatttttcactgtttcatgtatttcctcttcagtgctagagaggtgttggatcttcactctccccactcagagccatagctgctgttcttttaacagctaattgaggtataattcactgctgcacgattcacctattgaaagtatacaattcattggtttttagtacattcatagagttttgcacccgtcaccactacctggttccagcacgtttatgtcctccctaaaacaaatcccgtatacttatcagtcagttcccacccacccccagcctaagtaaccactaatatattttgtgtctctataaatttgcctatmctgaatattttatataactataatcatatagtatatggtcttctgtgaccttttttcacttaccatagtaatttcaaggttaattccagttgtaccatgtatcagtacttcattcctttttgtggccaaataatattctattgtatgaatataccgcattttatccatttatcagttgatggatatttggattgtttccacctttgggttgttgcgcataacactgctaaggacatttgtgtacaagtttttgtgtgcacgtatgttttcatttctcttgggcatatagctaggaatggaatcactggctccatatggtaactatgtttaatgtcttgaggaactgccaaactgttttccaaagcggctgcaccattttacattcccactggcactgtttgagagttccaatttctctgcatccttactgatactttttattgcttttgtttttgattgtaaccatcctagtggaccgaaattctagctcattgtgattttgatttgcatatctctgatggctaaagatgttaagcatctttttgtttgcttattggccattcatatattttctttggagcaatggatatttaaatcctttgtccatttttaagttcagttgtctttttattatgagtgtaagattttagatttgtcttttatcagattaatgatttacaaatattttctctcattttatgtattgcctttttactttcttgatgatatcatttgaagcacaaacattttaaattttggtgtcagagctgtgggttttattaaataatatgacaccgttgtgcttcggtaaggcggaagagagctttcctctcgttaaaatggctggaggtctcaaaaaaggtagagctgcaagttcctagctactattacacctcctttccttcctccctgtgtagcctgtcctgtggctatgatggccacactataggaacaggcctgttttggctttgagcctccaggagtggcagaaactggaactgtgtcagcattttattaagagattgctatttccaagatgttaatagatactgtgaatctcatcttacacctctattctctactggttttttttttctctaaatgtagcgctgttcctggctgctgagcagctcttgtccttgactgacaggcaaggtatgcagttgtggcactcattggccctggagataaccagataacagcacccctaacaagaggagccacttttctgttaaaactttgctgctggttcacaatcctgtatctagaacttcatgccattgggacattagacaccagtgtgcctcaggcatctgaatgtcatggatcaatatggtttcaaaccatattttgaataccccaatatttaccttaacatacattaagttttaattttctccggtaaggacatttggcaacataactgccattcatggcagaaaataactaagattttcctatcaagagagtacaaaagatataatgttaaataaatttacctttgtgaagagtcaatatattattcatactttgctatctaccactcaaaaacatattacagtctgtagattcatatttgagaactacagtcttacatacctaggataaatctttgttggaaaaggagaaccttcacttaatcaggtatttactgattaagttactgatctgtatgatgccagataccagttttataccgattatttccctgcaccacattaagtgtttcagttggtatgtttagacacatgtttctgtattttgtatgtatctttgctaatatttgagtagttyttcagtaacacagatgagaaagaagaattattttagatatatgtgagtataaatatgaatttgacctttaaggattaaaaagaatcatcaatcaaaaggtagaatggcttctatttataaatacaatgtgtaacttctggattatatatgtatagtctaggctgggagtactacataaattctattgattttgtctcatctgaattacaatgtcaaatagatactagggttttaccataagatagttatgggctgtctcattgtcacattaattacaataattaggcagtaaagaagccataggaatagataatatgttgtatgtttggatgagattgtagttataaccccttatttatggtaataaaaccttgttaattgacactgctgacaagctcttttgctttccttttcaactttccaagttggtttatcagtctatttaggaattacaagctgagagccacaaaatatacaataaagctcacattgcaagattttctgtacttgttcatgctatacacattaaattcattcagcagtatttgctaattattgttctaagtgctcttaagtattcagagatgtataaagcagtgcctactctgaaagattaataatggagaagtgaggtaaagtatctatatataaagaaatatgactgacatttattgagcagcatatgtgaggctcatgtgataagttccttaaaagcagacaaaagagtatacaagttcagaggaagaaaagatgattccaggcctgtgtgatcattgaaactataagtctcagtggtagaggaattattttgcatctatgccataaatctttgagctatctattctagagctgtagtgaaaggtaggtggctaaatgtactgacatggaaatcaacttttgttctaggcttagctgcactgcarccttattttgtgtccttgagtatataaaattgatgtaataatatgtgtccagcatatctcactgtgatgaatgagataatgtggatgcctgagcttctccctgtggtgaaagtcagattgcttggcaggtgtatgttttttttttcaggcaactcaggctgtacatttggatggtagtaagcatagctttccatgactwaatggattaatatccttatcaaagtgcctaatttattgctagggaatagcatattctgtgtaacatctgagctgttgtctgaaaaaattacatgaattccttggagaagctgcctgtatgaatacatagtagtagtattgtaatccgtgaactatgttaaaacggcaacatatgtttattgagatgctattgctggtttaggggctttacaattgcttttaaaattcttacatcatttacatgttatagcagaggaaactgaggcttagataagtttttaaaagttgcttagataatacagttgtttgaattcacatctgctgaaatctaacgttaatgctgtttacattgtagaatgctactttagtttgatgtttttcttgcaggtcactgtaagccatttatctgcgtgtacgtatgtgtaaatgttatttatttgtttatgccactaggttgcttctagaactgctggagttactgtttgacaagtttaatgctgtagccgctgcacactctgtggtcctgggatacctgcaggacactgtagtgactccactgactcagcaggaagatatcaaactgtatgatatggcagatgtatgggtgaagatccaagatgttctacaggtaagagccttttacaaagggtgtcatcttgattcagagtaacagtttagaataacaacaacaacagcaacaacaagccacctaaaacactatcttaagagtcataaacagggtgagaaagtaatgcttgcatttgaatgtgatgttgctgatggcattaacttctactatcttcaaaaaactttttaacaggctgtgtgcagtggctcattcctgtaatcccagtactttgggaggccaaggcgggtggatcacctgaggtcaggagtctgagaccagtctggccaacatggtgaaaccttgtctctactaaaaatacaaaaattagctgggcgtggtggcgggcgcctgtaatctcagttacctgggaggctgaggcaggagagttgcttgaactcgggaggcagagtttgcagtgagccattgtaccactgcactccagcctgggtaacagagtgagactccgtctaaacaaaaaaaaccttttaacagacttcttttttttttggcagactttaaaaatagaagcatattctcaatatgtatagtgtctggctttctgtcgtagtatactttacttgactggaattagtcatatattaaggtaaaaaacattaaaatattcttaagcattattttataaacatgtacatagcttaattttgttgactatttccttacagtcaacttttgcatatattgggttatatgacagaacaagagcttattttgagagatgagaatagatctgtgaggtataaatgtatcactttgcttgatttgttgaagattagaggaataatattattctttggtatgatgctgctgaaatgatatttagaaattgtattatactttttctccatatgtgagcaaaatatatttgatttagccagatggaaattagaaatataattaagagttagctgaagcaagctttgacataactaaatagaagtaacttagttagatagtttctgctaatatgaaaaaaattaagtatatgtggggaattggaaaatggaactgtgtaggaatgaaattacttgcatggcaaataagagtctttgcagaaaaaagtaaatcatgaatgtaaattatagtcattttttagaatgtagacatgctcttggtggattgaatggattgattcctggtttttcattcattagacaacttttggtacagtgtatatgctttactggtggttcagtagaaataatattggttgaaactttttactgctttgtcaattgccatgcctgtagtacatgcttggtgaatatttttgtattgaataaaatatctttatgggttggaggctggttatttaacattttgcatgttgatatgtttatccgtcttatgtaaataatgtgtgcctttcgtatccatgtttaagtatgaaataatagattctaaagctagataaaaaataattagaaatagggacttctgtttctcatcttgatgaagttaccctttgctgtaagcaacttaggtagtcagcacagtcarctgagaaaaaagaacacactaggtgagctttaccttcatccctgcatcttcctcgtgaatactttccaaactattagccctttggtcagatatgaagctgtgtacaccacaaggcttggcaggaaacaactactgtgggactgtgagctgaatgaagatttcagaagttggaaacttctcagcagtgttggagctcagaccagccagtgtggggaaagcttgctgaacatactgtgctttcagctgtgacctcagaaaggtcacaccttatgagtagggctattctaggagtagaagacaggctactatagatctcatacagcaaagccccaaaccaagcctctattttatcatcttgatccacctgtaaatttattgtctgatagaacaaaactctctctaaagtaagacaacataattcagtttctcaataacaaagcacctgcaatgtctagcatagaattattatgcttgttaaaaagcaggaaaatgtgactcttaaccagaatgaaaaagttgatagaaataaatatctaaaatgaaaaatccaccagggagtggtggctcacgcctgtaatctcagcactttgggaggctgaggtaggtggatcatttgagggcaggagttcaagaccagcctgaccaaaatggtgaaaccctgtctctactaaaaatacaaaaaaattagctgggcgtggtggcaggcacctgtaatcccagctactcaggaagctgaggcagcagaattgcttgaacctaggaggtggaggttgcagtgagccaagattgtgcctctgcactgcagcctgggtgacagtgtgagactcaatctcaaataaataaataaataaataaataaaatgaaaaattcaccagatggatttagctgcagataacatactgtggaagaaaggatcagtgaatttgaggatagatcaatgtaaaccatccaaatcaaagcacagagaaaaaatagacaaaaggaaaatgaacaaagctataatatcttcaaggatattatgcagcttaacaattatgtggtttacaggtacagaaggagagaggacagagagattggggtagaaaaatatcaggagaaatggtgaccaaaaagttttgaaatttgttgagaaacataaacccacagatgcaagaaacgtaacaaatcccaagcaagataaacacaaagaaaatcaacacatacgcacattatgaaaaccaaagaaaaaattcttaaaaatagccagaggaagaaagacacattgcctacaagcaaacagtgataaaaattatcagtgacatctcatcagaaacaatgcaagccagaaatcaatgtatgtcaatctaagaatgctgaaaagaaacaaaaattgtcaatctagaattttgtrttaccgaaaatattctttaaaatgaagctgaaatagagacattttcaaatgaactaaaacttaaagaatttgtcaccactagactttcacttaaagaaatgttatagaaagtttttcagccatgcgcgatggctcatgcctgtaatgccagcactttgggaacccgaggcgggtggatcacgaggtcaggagttcaagaccagcctggccaagatggtgaaaccctgtctctatgaaaaatacaaaagaattaactgggtgtggtgtctggcgcctgtaatcccagctactccggaagctgaggcagagaattgcttgaactggggaggtggaggttgtagtgagctgcgatcgcgccactgcactccagcctgggcggcagagtgagactccatctcaaaaaaaaaaaaaaaagagtttttcaggctgaaggaaaataataccagatggtaacttagatctacagaaaaaagtaaatagggccagaaatggtgaatatgtggacaaaaaaaaaaaatgcttttcccccccacatttcttgatttatttttattaaaagaatttttaaaatttctaagtcaaaaacaatcatagtgtatgtgggttttataatatattttggaaggcaatatatgacaataattagacaaaagatgggagtagggtaaatgatactatgctgttgtgaatttcttatataattcatgaagaggtataatgtttagggtagcctatgataagttaaggatgcrtatttcaatccctagagcaaacattaaaattctaagatagatacgtagctgagaagccagttgaggggataaaattgaacagtgaataaatatttgattaatccagaagaaaggaaaggaggaaaaagaacaaggaagaaagaaacaataaaaaacaaagataggatgaatagaacccaaaagcaagatgatagacttagcaccaaccatatcaataattacattagacataaatcgaccagatactccagttgaaagacagagatcatactggatttaaaaaaaaccaagacccaaccatgctgtttcaagagatgcattttatgatattttattactttaaaaatttttaaataattttaaaattgtagaaaagttgtgagaataagaatagtacaaagagccatatacctctttatttggattcagctgttcttaacgttttaccacttttttcctgttttctctctgtatatatggacacacacatgcatttttctttgaaaaatgggcagcaagttatctactctgctgtctatattcttgttttgttaactgacccagtaatgttctatatagcagtatttttgcccctccagtagagaaaccagtttagaatcaggtgtttcatttagttgtctttaaacttgaacatttatagtcttttttttctcttttctgatagtggcacttttgaaaaatatgtatctctccccttttaatacaagtttgtcattttgggtttaaaagatacactttaaacataaaattaaaygtatgagaatggaaagagataaccatgaaatactaataaaaatagctagtattacacaaatacatcagacatttttagaatatataaatgtaattatttgtattatactactatgacatttagaacttgaatacatcaaggcctagatagtatgttatggactatgtaattttacttatggcaaggtcataaaatactttgtgaataagtttttatgacccccccccatctttggcttttacttatgttctgaactgaaaacaattattaaatctgttaggatcctatttagaatactaccatgaggaattagttatgataataaacaaagtaagatatcatgtcttccctaactctgcttactttgtaattgtcagatgtatrtaattcctgtacggctgaaaacgaaacccattatttcataataaagatgattgtaatgaactaagcaactttaaattccatcagttattaacaggtgaaatttacagattaaaaataggtttttctggcatattaaatgagttatacgtttcatacatgtagtttcaaatgagtgatttggccacatgttctcactcataggtgggaattgaacaatgagaacacttgttcacaggaaggggaacatcacacaccagagcctgttgtggggtggggggatgggggagggatagcattaggagatataccyaatgtaaatgacgagttaatgggtgcagcacaccaacatgtcacatgtatacatatgtaacaaacctgcacgttgtgcacatgtaccctagaacttaaagtataataaaaataaaataaaataaaataaaataaaataaaataaaataaaataaaatgagtgatttggggattctgtctttaagttacggaatgagttgtttaaacagctttattgaaatataatttacatgctataaagtttacctatttaaagtatagatttcagtggttttttaattatatttatggagttgtacaaccatcacaatcatatcattttagaacattttcatctatgccaaaagaaaccttgtatctattagcagtcactcctcatatcccactccctttacctctaggcctagcctgttaggtactgatctactttttggaaatgacttatttttatcatagatctatgatctttatttttttatttttctaaaatatgggtccttggaaattttatagtttaagagaaagtagacaagatgaatttaagacactaaaagaggtatcaattatgtgttatatctctcagaaacttgtagtctccacattaattatacacttggcagtgctgttgctgttccacgttaatgcatacatgtaccaatggcataagctatttgacagagaaagaacatagaactgaaaccgttctaatgaaaggtgagaggtctgacatagaaataacattttatttcatgtattttgtttaattgctctgaggccaagatatggcagtgttctttgcatttttgcttgctttctctttccgcacttttcttcgcctcttaactatctacctttctgcccttatcttttttcttaagcatgttgtggaagaatggccttagtcatgagttgagttaatctgttgattgtttcttaactatgtattctactcatctttattattgccctataaatttgagcatagagcatttttgaataagaggttcatataaatattttaatttgtaattgctatgcaataaaaattgttatataacttttaaattatttttagatttccatgttttctagttctctcagaattctttcaggttatacagtactgagtaatattaagctatatacccatcaataacctagatggctaatggcacagacacacagacagactaatgttgctgaatgtaagaagagtagtagatgtaatatgtaatgttattattctgagacatgttgaatggcccaagaaaggttttggagattgatgatgagttgatccttggaggatttgtagaggtagaggagatgggaaatggcactccaggcagatggaaaggctcatgagatagtatttgcaagtggcaaaaaaggaatgaatagacaaggatattcagggataggtaagaagaagagtttagcataaatgaaggtttattttgtggatctgatgaaaagcttggataggtagatttgggtgcaggttgtgaaaacctgttagggttatctaagtggtttgtgatttatctttacagtaatagtttctgaacctggttacacatttgacttatctagggattgattcttagctccatcttacaccttatgacagtcactgtggataaggactacattctgtttttcagctcctaaggtgattctgatatatttgtttaggatcttgtatttggaagtctttgtgttgggtaagtggttctcaatgtatacctcttggaccatcatcagcattatgtgggaacatattaaaaaatgcagatttgtatccccacctttgattgactgaaacaagaactctgggggcgggaccttcaggtgattcttatgcacactgaagtttgaggacctttgctgtaggtaatatgggaactttggagatttatattggagtgtgatgagatgaaggaagattaatgtggtagcaatgaaaaggactgagtagagagggtagagactaagacaggcaaactattttgtaggctagtggagagtctatgcatatattacttgaggtattgtttagtagwgaagtaaacaagacaggctttggtgtatgctaaaggaatacaaagaagggagaagaagatttctaaaccttttcagagtcttttagaaaatctgtaagatgatatggtccatctgccagcctagtttccagtatgacagatattttaatgatggtttagtgttaaattattgggaccaactatgtactgagtactggggaatagaaaaaaatacatgaacaccagagacccctggctgggaaatatttaatgttcatttatatggagggtttaggatgaagatttttggttaagtttctatgtacagttttacacatggggctgatttagttttcatgtacttgttggaggagtgttctttaggttagaaatcattcctggagaacaaaataattcaacagaatactagaagcctttagttaaatatgtaacagcatgaatgaagatgatgggatattatgatgaatagagttataagtgtttagagttcaaatttctgtatttctttgaatggaaaacatttcctgctgaaaagttgaaatgttccttgtatattaaattctttgtatagtaaattaattcttggaagagagaatactttttgatcttttaatgacttcagcagtttttttccactgcaacttgggctttccctggcagccagaacccwtcctttagttggaaggctcatttgtctcagcgtgtttttgtctggagacagacagtgaggagacaaggctatagctatcatagtaacggggtgttatagtttttccctggtgtcagccctgtgaccacacaccattgcactcctttttcagttttcactctttttgaaactgtgataatagaaatacatgtttttgcccttttgagcagcggcagtaccttccaaaatgacacctacttggtgacaagtgtgtcatattgttggctgtgtgttttcaagtgtataaaagactgaggtacactagaaatacaaaatattcaatcttgttgaattctgcatagcaaaggaagaggatcactttgaacaaacccatcctccagacgttatgattctgtaaaaaatctaaatttttttcacatctcatttcaaaacacaactgtcgatttagccattgttgacttaaatgtgtaactccttggcatgctaagcagtgtctacagatggggacagtgggttctgattatactgtttaccactagcagtgacacctagaacaagtcactttactttttttagtgccttgatttcttttttctggagattaatggagacagaatgtaaaatcgttttacttttgttaactgccatataaatgtttagtgataaaattaacctcttgcagagagagcttgaagtttgctgtcaggtaagagaatccacaaaattattagtactgatccttgacctggaggggattttcaaggagacagatgtaatttctattttgaattcaggtctgaaactaggttattcttaggttctgtcgactttgatattttggttacctgaggattctataccttaaagtaaaacaaacctattttagtatttcaggccagaaaacgtatgagagtattctcgcagaaatagtttttcgtcatttctcagcctrtaaaactttttgataacctctattttgcgtggcatcgtgaagtcatgttgttggccaggccattgaatctccacaaaagtgcttgctcctagaatgtttcttctgtctcgtcagtggataatatgctgccaaatgaacagaatataattaacatttacaagttaaattaaaaatcttctaaattcgagtttgtttctgtagcaccaggactctccctgtgttgttttatgttcactactaattcttcaagcaggaactgatgagcagccagggagattcctctggcttctagtacagacgtagcaaatgcccaaatcagagtgctagggtgtctaatgcatagtgaagtgtgatgtcaatgtcatggacatctgaatacattgcggcaaactttagaaaatagtagcttggcaggggataccccagaataggttgatctggtaggaaggctgttctccttaaattttcacatacctaggatgggcctgctcgggcctcattacgtcttggcctagagaacacaggtgtagaaatggcaggtcttccttctccctcactgcctccaaagcttatctctgtctggttttgtctgatattttagagggtgaactgttaaaagccaagtgtccgtcagactcatgctgctaccgctcctttaagtgtgctcatcaagatttggtgcacctgggccaaggcaagaatgttgctaggawccaagaggccataataagttgtggtgattaatagcatgaagtgaaatagtgtgatgtagaaagtgtcattctgtgatttgagtgaaattaaagctactggcatgaccttcactgacatattgctcttgcctacttgagaaggttttagagcaaaggtaattacattttcctgaattggtcttttttttttttttaagcgtatttaaaaaaaaaaaaacgttttctgattgtggaagcaatgagtatgtctgaatccttgagtatagcgatagttcttctgatttttttttttttctgtatgccaaattcttcagaaacttggtggcttaagacatcaaccattttatttctcatagttttgtgagtcaggaattcatgaaggctccaatgcacagtgyttctacttgacatggcattggctgagaacattcacttggccacgcatctgcagcatggactggttagaaggtccaagaagactttattatgtatctggcaccatcacgcttctccacgtggcttctgtttcaccatatgaccttgcagcagcgttgtctcagggtagttggacttcatacatgattgctagctttaactagagagcattctaaagggtgaaggctgcaggtcttttaaggcctggccttggggcattacttggtatcacgtctactgtgttcttttggtcaattgggtagctcagatttaaatggagggaaaatagaatttatttagtgtgaagagtggcaaggaatttccagctatttttttctgccacttcgttgtggactttgtaagtttgcctttatagacccaccagtcagacactggcatgaagtcattgtctttgggtttgtgtcacaagatagaggccrgtatttcattgtctactgctcttaatttgttagagaatatttacgtgattaccggattcagcaacatttcaccagtttgatcacattaaagaccattcaagatacatttaggaaaatacaagtctttcacagaactcctttgttcaagtgagttaattcttggagtagttacactttgtcactttacactcaagtactgaaatgattttttatatgttattaatccctttgatctttctgttgttacagtttgtcgtattgctccccattttagagatggagaaactgtgatgggttttaaatcatgttttttagcaccaaagagtcaaatatggaagtcggcttgccctagctttcttttgcaatttttaagtcattgatttaaaagcctactttggcttatactttggcatcttgacattttacttgagaatccgtgataactttcaactgattcatttaattgaaattatttcagttcacatatttttaaaatcaaggctttgtgttgaggaatatggccaaccagggatttgtttgtatatatagaagtgtgtttaccactatacatgtgtttatgtattcatgtatgattgttttctaattgtgaatattcaggatttcaagttttttttttttacattgacagatataattatacatatttactgtgtggatttcaagtttaaaagaatagccatctctgcatagagatttgtcttttcctcttttaaaataccaaatattttgataaaggcactgagattggtctaagcctttgcattaccctatacagtcaagaaaggtgaggctatgtcttttttgtttttkgtagtggcttcagattagatcaactgaatgttctgaatattttgctaattacggctattccagtggtcactgggcctcccaccattcctctccagagctgatggtaattgcaatagctgtgacttcctctctccctgtttttagaaggtgttgctttctcttgtatatcttgcttttatgaagtggctgtcagcagggagcacaaagagctctctggcagttgctgttccttcgagagcatgcttcttttgcctgtttgtcactccactgagtactgcattctggtagtgaagggagcaatccttcaccactttagtttgtgctgcttatactcttgttcagggttgaaggctggaatatagaatggagggatattactgatacgtgtaccataacgtgtatgcaaagcttaatttaaaaactgagtggaagtgaaattgtaggatattaatattttatgcccttgactttaaaccttctgtggtaaaaggtgatgtagaaactgttattgcaccatttcttctaatcttggcttgtaagatctccattagttggaattctgcaaatgaaagacgtaatgaaaggagagtttttttttttgtgaatctttgctgtcctgggcaagactcagttgttctggtaaagaggtggcaataaacaccaatgcagaagtcagacagtgcactataatgtattgaaccccattatttggtctattttaaatgtatgtataatctggttgatgaagtcttctggattctgttatcctattcatggtcagtcttagttttgttatctttactatcttaaagcagcaaatctcttttgggatgcacaattagaatggcctgtggaccccacatctctagagcatgcttcagtaggattctaactgattctaatgcacactcctggttaagaggcaggattagtaagtgatacaggattggtcatactaaaatcaaatccattaaagtcttaaggggttgaagaggtttacagaaggcaaattttgattcattttgaaagatatgtcatgtttaggagagtgtttgtgttctgcaacatatagtaaatgaagatagaattatgaaacttcataaatatgggaargtgctttaatgtacattactataaagggaaaagaaaaactagacatcggtgctctaactgatctccatttacagattttggtcagttttatttagagtagcagcccaaagttggcaaacatagataattcctatttctgacttgaacagttgagaatgttgacaaatgcattatttcatccaataatttcttggactggaaacaattatatcatcatgttaattgtctgttattaagaagggggttttctaggttgcttcccgcccccatttgttacttgtatgaatttttaaggcttatattgatgagattttcatgtaatggaggggagaaattttttcctttttaacatgttcatgtaaaaggaatttaggaaattattttaatcttgctgggagctaagacaaaacacaaaacaaaaacactgcagaacagtttatggtcccatggacaaatgttcagtctgaacacaagtactagagaagaccttggaaggctgaggtcagaatgggttaaagtagttgagttcatgggcaaagggggacttggcatgttttcacacagttaagtataaatgtataatatgaacagcactataaagacctgggggagatgggctttggggggtttgtttgttttcttagaacatgttaccaaaaacaaaaaaaaaagattgaatacttttggatgatagggagacctttgaagaagagattgggtggcttggactttgccttttaagccacgggctgcgattatatttttgttttgtttttactatggaaaatttcaaacatgttcagaaattgaaccagtagaatggttccccatgtattcattatccagtttgatcagtttcagcattatcaatttatgactgatactgttttctatccctccgtatttccctctcctttattattttgaaacaatcctagaaatcatactgttttatctatattttaatatgtatctctaaaaaataagaactctctttttaaaattatacctaaaaattggccgggtatggtggctcgcgtctgtaatcccagcactttgggaggccggggtgggcagatcacttgaggtcaggagttcgagaccatcctggccaatgtggtgaaaccctgtttctactaaaagtacaaaaattagccaggaatggtggcctgtgtctgtagtctcagctacttgggaggctgaggcaggagaatcgcttgaaccggggaggtggaggctgcagtgagccgagattgtgccactgcactctagcatgggtgacagagtgagactctgtctcaaaaataaaataatacctaaaaacttaatttctttatcatcaaatatccagtcagtgttcacatttccagttgtctcaaatattataattattttttacattttgtttgaatcaggatccaaataaggtttaaatattgcaatttgattaatacattaagattcttttaatctataagttcctgctccatctgtcattttatttttatcccttgaaatttatttattgaagaaactatatcctttgctttgtaaaattttccacagtgtggctggctttggctgattgctagcgtcatttgctatttatttttgtcctgtatcttggatctggcgccttgatcagatttaagttgatttttggggacgtaattacttcataggtattatgcatttttggatagaggagtaaagtagtgaaagtaatgtttttaggatggtttgtctggcagcagtgtgcaaaatgaattggtagaggagaaatggagagctgcgaattagaaggcaggttcaatcagtgcaggaaggaaaggctacagtaaggcagaggcagggaaaagaaaggcaatagagatgagagagattttgaaagaaggaattttcaataccttttaggcttaactataagaaatggagagtcggctgggcatggtggctcatgcctgtaatcccagcactttggaaggccaaggccagtggatcacctgaggtcaggagttcaagaccaacctggccaacatggtgaaaccctgtctctactaaaaatacaaaaaaactagccgggtgtggtggtgggtgcctgtaatcccagctacttgggaggctgaggcaggagaatcgcttgaacccaggaggcggagcttgcagtgagctgacattgcaccattgcactccagtctgggcaacaagagtgaaactcctcaaaaaaaaaaaaaaaaaaaaaaawrtggagagtcttaagtcaggttgaagttgtgaacctgagtgattgggagttggggtcaggaagatggtgctttgtgcatgttgaattgaaggtctgtgtattggtagactatccttgcagaattgtgttatagraagtgtattagtctgttttcacactgctgataaagacatactccaaactgggcaatttacaaagaaagaggtttaattggaatcacagttccatgtggctgggcagcctcacaatcatggcggaacgcaaggaggagtaagtcacatcttacatggatggcagcaggccmmaaaaaaaaaaaaaaatgcatgtgcagggaaattcccatttttaaaaccatcaggtctcatgagacttatcactatcatgagaacagcacaggaaagacctgctcctatgattyagtcacctcccactgggtccttcccacaacacgtgggaattcaagatgagatctgggtggggacacagcgaagccatatcaggcagctagattgatcatgggggaccaggggagaggtaagggcaggaaatagaaatttagggattctctgtctgcctgggaatagctgaagccatacaaatggaccagctcagaaactcgtgagtgaactgaggagcactttccttaagtagttcgtcagcttaatcggctttctatagttgtcacagcaaaatattacactgtctttagagactggagtttctcatgatgatgccacattttgcctttctttgcttctgcggtttttcgtcatttataggtgatatggcagcagatttttgagcagaatccagctgctttccgaagctggagattccactggggatgtagacagcttgggaggaaataaaagccgagtycataagtgagcctgggaggagtgaagaagcagagcaagcaggacagaaagtgggcggggccagctatagggaaagaccttggggttgaagggatttgatagacttgccttagtgtcttttagttccttcagaagcccagcctgacctccatcatgagagaactagttagtgagggtggggcaccaacagttcccttgtgtcctctcctgctgtttctctcttatatccagagactacagagaatgtggttaatgggaaactacaaaacttatatgtaatcatttcaaaagtcctccctagctgaaaggattttaagaaaatgtgctattcagaaatatcccttaacctgtttaacagcatcttatttactcatctgtgttttatgaatacttttccctagttgcagaaggatggcaaaataaatgtttgctatcaaatctatacctgtaattcagtgaagcattgaacacaggtgatgtacccttcttcacaggggaattgtgttcaaaatcattttaattttttatcctcagtaagattatatagaaaatcttatagctctcaaaggtgcagattatatttttctgtaatagttctgggcttcccaaaaatttttgttggtgttgccaaagagttgtgtcacataagtgagtggcacaaacattttttgactagccacctgaaagttgtgaagggttttgaaaatataaagtaaaatataaagtgaacaccaccactgtcaacaaaatccactgctttggatatgatttcacaggaagatgacggctgtcaccaattgaactacagcaaatgacgaaagctcagcacgaattagccagtctcattggggtgataaacgacagcacattaaatatgtgttagcaacgtgatatggcagtgaaaaaagccaacgctatttttggctgtgctgcacaaaacagcatctcgtcaccgagctgggctgatcattactttctacccagtacttgtgaggcagcatctgggatgctgtcttgagtgtaggacacgtgcgtactggaaggatagacaaacgggtaggagtcccaagcagagcatctgctgtgactaaggactttagatgagacaagttttagaagtggcatgtttaggaatgagcatggaagtaaagagatgttaaccttttcagagataggatgatgttgaggaaatacatcatagactcctcattagttggcattagtttagtacagtgcactttagaggaattacccaaatactttcacagacagcatatcagcaaaaaggggctctaaagcaaaattaagcaaggacttatttatggtcaactatgttttaatcaagagattaacattggcagtgcttgctataatgtgagaaggaatagaaagtaatagattacataagtcaggtgcttttgattggaaattcaaatgcaaatattaaacctgggaacaatgggggtgagactttatagttatctttagaaattcaagtaacaaataaaggaattacttactttccgcagtagtataggcaagcacaacagaaagaaataatttaagaaatacatagtataaactgaatgtcagggaacatttctgcagtgagaactatcggaccataggatattccccyaggaaaattgggttgaatttcaytggacatttgatcctgacagaattgaatgtgtatcagtagggaaatagactgaatatccctgtaggcatttttcatttctctcttctctgattctgggccctgttgatgatctgttcacctgctgtgattaggaagaaattttatctcttgtttttctacacccaggcacattttagatgctttcctgattgacataggctaaaaatggagcttcattgccctgaggttgacctggtaccatccctcctggtgttgtagaaatttctcctttctgtttgggaggcagtgttagggtcctttacctaaggtgaatacatgtaatataaaatgggcccatgtgtatagggtcagtgtcttcttcagatatatctagtaacctaacagggctgcaagctggcctctttgggagtgaatgatggttttattttcccctcttcccccaggacttgactttgaagaaaaaggatatttagcagactaggagaccacagacttttactgtgtcctgtagaaatgtgaaaaatttcaggttcctggatgggaaagggctactggagaagagcttgactccttatgctgtgacagtggtgtgtatgccagtctttccctgtagtagtatcattgtataatcaaagaagtaaactaaaaatgcaaatttaatttcaggttcattacaaatggtctgtatttccttgttataaactagtctattggataagattgttagatagattgttatccaatcttagtctattggataagattgttttcttagcttggcattcaaatacctgtacaattcggacaaagtctctgcttttccaggcttagtttacccttttctatagtaatgctgtattccagttaaatcagcctttctttctgtcctctaaatatgactctgtcctttcctacagtagtagttttgtttattccatacatctttcctactgtccttgccctcatctctgaataccttctctgatatgctccagtcctctgtcttacctatgaarcatccattgatcatttcccttcaagaactcattgcatttcttgtttttaccaytcatttgacatatctaatagttatatttttcttcctctactgaatccacatctttcctttttaatcagattaaaaaggctctcttgaggaccatttcttacatgtctttaaatttctcacaactagtctttaagcctttggagagaaggaactatggcttatttatggtgcctgtctcttcccctaaactcacagagtttggcagtatgcacttaataaatatgttttgaacaaatgagtagtagatactctatacatatctattgattgatttaagatttgctatagactgaatgtttatgtcccccctaccccatattcatatgttgaaagccagtccccaatgtgatggtatttggagatggaggctttgggaagtaattaagtcatgatagcakagccctcatgaatggaattagtgcccttgtaaaagaggccccagagagctccctcgacagttctgccacgtggggttacagcaagaatatggccatctatgaaacaggacaggggtcctcaccagacattaaatttgctgatgcctttatcttggacttcccagcctctggaaatgtgaggaatacatttctcttgtttataagctactcaatctgtggcattttgttgtagtggtttgaactaagacaaggttgaattttaaatgctttgtaaatgtgttgaactttgtagatttaaaaatcatgtagcagaagactcataaagctacgaaggtttgctatattcccaggakaccagttcctcctgctttctcctagaccagcctgcacttaaatcatccctatatgaagagtttctgttggccaggcagattgttagctcaggtttccagatatgaaatgatgtcatgaaataatgggcatgaaataatgttggcaagagaaaccattaataattgggactgtcatagtattactattatatagccaatgctcgtgcatagataatatcatttctatcatgggtgtgacaataatagatttggaagaatggtgaaaaatttgataataggttaagtgaaattaaactatacaaacttgtcctttattctttgaaaacgatttaaatttttgatttttcattttaattttcttactcgtatttaaaaatttttccttcatgtcttgctagtgaaatgtacttgctgcaaattaaatccatttctttcagtgatagctttggtttgtaattaccttctttaagtgttaagtctgtccttagaatcatcagagcttctattatgtaattctttggagtaaaccctagttaatcagagcatgcatttcactggaggggcagctcagtgagtgatgtgaaggtgtttcctctgagaaacggaaacagttatgaagtgttttgtggtcctytgggagttgaggtgctatagaaatgtaaggcttttattacaactcctgacctactatacagaaccatgctaacatcattgatgattcttttgcataatcaaagaattaaacataaaagtcatattaattttcagcttcattagagatgcaagaatcaaaagagatgtttgccaaatgggaaggcactaaattggtaggagaaagaattttaatttcaagcttcaagtgaatgttataaataacctagcataaaaaagacactaccaaaagcgcctgacaatgtcctttttaaagatcagcaacattaaaaaggggaaaatgtaaaaaagaaaaaaaaagggaaaaaagaaactataaaaatatgaaattaaaattgctgtatttgagtcagtttatggtagtaaattacttctgagagcctcaatttgaagatcaccaggtagtctatggtaattagtataattttgctgtggtcaccaaatctttatattatttttgctggtcaaacagcaatacttttgcctttttttttttttttttaacttggtcgcagttgaagatgatgaaaaatccatttactcgtgaaagggtaaatgcaacttcctgatgtgaaataggggcatttaaagcactcacattaaggaaagtttgcattttaaatataaagtagtcttaaaatttttctctacccacatataaacaccattccaatatgtgtgaagagctgttgttcatcttgtaggatcactaatcacaggattaaagcgatgaggaagtatatacagtgaagaatgatgcccttttctttaaaacaaaaatctggaggcagccagaagagcttgggaaaattcttgtattttatatctattatgctcttgattttatatctactgtatctccctgatctgtggccagctgggatgcaaatacrgcacaagaagttcacagtatcaaaggagcaagtgaataggaccccagaatgtgattgttatgaaagtactgagattattacatttaggccctatgtgattctggaggaagtgagttttactgctcagtagaaaattatatatatatacactgtatatataaaacacacacacacactgtatttagaaagaaaaagaccatctgttcattctgtctgtatttctgtggggatttaatctgacagtgaatcacttgggatttgtacagaataaacttgtgctaacatttttatgaaaaagggtagggaagacaaccaaaattttctctttagggattgtttagctctgctttttttgttttttttctttacagcatacgaacatggcaatatgatgattgattttttttttaatttgttttatgttagccttttctgattctacaggagaggttcattcctttgtcttagcatgaaaatttctcaggatagacagtagcatcaggaatgatctttaatagagtagtggttttcaaagagtggttcccagaccagcagcatcagcatcacttaggaactagttagaaatgcagattctagtgctgtatcccagatctcctgattgagaaacttggaggatggagctctgcagtctgtgtttagtaagccctcctggtttttctgatatgcaggagaaccatggaattagacacagactgtaataatgaaacgctagtgttatttcaagaaacttcaacactcagactcacttatgctgatgaatatgacctgggccaaaccttaaatatcttatttccttccaccctcataacacttcggagagcctgccatcattattcttccgttcagatgatgacactgttcatgctcatttgattggtaagcagtgaaccaggctttgaatcttggtctggtttcaaaatttattttcttaactgctgtagaataggaagatttaaaaaggaatgattttcaagtggctattcttgtgactttttacaactaagtatgtcatcaattaggaaagtacctgaggggttgagtggcaagttgggtgccaagagcaaaccagattataatctagaactcagttctagtcctgactctgcctttactctctctcattcatttagttggcctaatgtcctctgaacaggcttcctcctgggacacttgattcsttagatgactatacttttcctgtgaagtgtgcctattttacagagaagcttcccacttcgaactggaaaaaataagcatagtggagtgactttttcaaggtcattatcccctttcaatgggagagctatagtttgcttctattcagtaccatcctgttgtaatggaaaaagaaatacaaaccaaccaagatgctgaagtttgcttttacctgcattatatttaggggttcatttgcaaacctgaagtatttcattgacttgtacctttgctgtttgtcacaacaataatcatgattctttcatctcaagccttgatttgaaacagcctggagctggtccrgacmaagcccatctagtcattgtatctaggcctgtcgatatcctcttgtttgtttttgtttcatttggttttcttttcttttctttttttttttgagacggaatttcgctcttgttgcccaggctggagtgcaatggcgtgatcttcggctcaccgcaacttccaccttctgggttcaagcgattctcctgcttcagcctcctgaagcagctggattacaggccaccacacccagccaaatttttttttttttttgtatttttagtagagaaggggtttctccatgttggtcagggtggtctcgaaatcccaacctcaggtggtctgcctgcgtcggcctcccaaagtgctgggattacaggtgtgagccactgcgcccggctcatttggttttcttacctgtcacctaaagttgcagtctccttaactgaattattagttcttaggcattaaggacagcttctttgctttttgtctgtaaactattgctgtgtcattttcacagtacatgctcaataatgtcataaagaattaatattttgcctcttccttattttattgtcctttcccataattttccagcctatcttctgtatattattccatttawcttttctgtttgtgatttttttcctctgttccctctgagcatttgtacttgccattcctgtactgcagatacacctttgttttcttctctctccatttattctctccattaataacaaaattaaaaaattacagctaacatttgataagcatttaccacataccactgtgcttagtactttatatgtattatctaatttaacccccacatttataatgccattattattcttagtttgtaggtgacaaaaatgaaatttggagaggttaagtgccttgcctcggctattaagtggtgagactgagattcaaattcagctgtatcttaattccagttaaacttttaattatagtattttgcctccattgttttcaaaagacataaaaaaacctttatggctttgtctgctttgctttggtatgacgtcttattcatgtattaggcttaacctgcttattgtaatctggaaaaaaaatatgcagagacctctaggctgacaggcacctatacctagaataaggattttctgctagagggaactgaatgtcatatggggctgtgatgggctacagcctcccaggttaagacttatttcacatggatcaagctatctcctcactccagcaatgacacagttagtatatatgttcataactaagcttaaatgccatttttaataaatattaataccagtataaggtaaggacaaggatgcacatacagtcctattatgaaatagggctgtagcagcatttttctagtttagttacttccttccagtatttcaattcctttcaatccaggatcttagtgattttgcatgtaaacctttttcctatttcatgctctctctttgcatttgctttattcagttgtattgaatttctaatgtggattagagcacacagtagggctggttcttcattttaataactttcctttccaggcacttctcagtaatcctttctttttttaagccaggtttagagagggagctaaaagcagaacaagacatttgagtttgtattgttctgctttattttcataagttccacattctcaactgaatttctagggacgaaagagaacycgattacttttagttcctttcagtgccactctaacttagtgacttgacttccatttctctaagtggaaatatttacatgtatttcaaaggatgctctctggcttagttagtatctctacactgattagagaatgtaaagcgatgtttaagtgcttattattttttaattacatttataaaggttaaaatatagataactcaaccattattattatcctcatttagaatttgtataccatttacatttccaaagtgctttgttcatgtaaattagttggtcctcctgccattcctataaattatgtcagtactatcctctgaaatgttgccattttcagtttatagttattatttttatttcagacaactacaccttgttcaaagggtgaaagtgattaatagctttaaaaccactaaaggtaaacattcttaaatacccttgaagttaagtagatgccggaattgctgagatggctgccaagccaatgttggagaatttatttttttgtacagattatatatatatmtttgattttcttcttctcctctctgtttattttgtattttttattcatataggaatgtgcacacattgtatatttttcacaaaatttcatgaactaaacctacccactaaacacttgtgtcagggaacaacacagtaccagcatcactcgttcattgaatctcgatttgagtgcgcgattctgtcttacagactgaatctgtctaaacatcagcatagctggaattatggacacaatgagtwttcatgctcagatgttgcttccattataaaactaatttctgtatgttccaaaagtgttatcttactgggttaaaataacactgagtagtcacagtaagagatgcacacaagatgtgcctcatgagtggtgtagacaagatatactgttggacatcacaggagcaaagttgtaccttttcagaaatgcttcacatggaggtgaaattagagctggactgcccactagggatagagggcttagacataagtgtaggctttggtaagagaaacaaagaagagggagtagtggtggcatgtgtcccaagcagggaagatagctatgtcttgcatatgacatgttttgatgcagggagagttccagtttgtttggagtaagggttcatgtatgtgtttagtcaccattcaaatttgagagttaagtagaggtcagatatctaaggactttgaatgctagctaaggactcatagtgaactaaacacttactgaataccatctatgtgttaggcacaatgctcagcacttttatatgcattttgaatttatgctcaagacacttggatctgcgggggcaggagttagtggcactgagatatatgagcagcctgggtagaaatggagagaccagagatagaaatcgcagaagactattagggttgatgacaccttggattacggttggtcctaaaatttataatttcagctactaaagacctggttctagaggactgaaacttcatcttttcttggttattctacatataatctaatgcaataagaacctgaatgatgagtacttagttggcagatatttatcagtygcctactctatatacatctctttgttagatttgatgggctgctcactctgtccctctgcccacctgatgttagttaatctgggggacaaccatgtaataagttacttcctagtatctatagtgaccagttatttgggagtcacctgattgaccaaagactgtgtttttacagtgttgtctcctttatttttttcttaggattctttttgcttttcttttttacaacagcctactgtgtcgcatcactgaatctagtttatagtttttygtttctctacattccatcattttagaaacaaaagccacatctctttgaagaagtacttttgactttttctcccaattttagcacttgtccgtaacaactatgtaaggtttgttttgggccctcctttccttctatcacccctttgaggggctcttgtgccctgttttgtgttacgtggtaggttaataaacgaggtaatgaggggatgaatgtagagataggtggaacatatagattggtagattagtggatattttggaaaatgaattgtgtaagagaagacagaatttgaaaacagaaggacagagaaaatgaaaaggtatgagacctcagagtgggggcacgaggagctgtttgtasccagaggtttctggttgaactcaggttcctaaactctgagttgtacaggaagtagtaaaagttttttaaatgtccttctagttctcttttaaccaactagaagagttgccaggatttttaatttccactctggggtgtgcctaagaatcttagttaccattaccatttgtatacagtattattccttgagaataattccagagcccactttttttttttttttaaacttggcagtctgaagagatttggcctctttgtagtggtttttgtgctaatattgatccaaatttagtttcagtgcctgttttcttctctttcctattcagtcaactatttaacctctcagtgattttagttgtcctgaaatttggtctttcttagcaaggacagtttgttttatgttctttaatagttagaggatgactgggttcattcccgtaataccagaactttgggaggcttgagataggaggatcatgagctcaggaattcaagaccagcctgtgcaatatactgagacccccttctctacaaaaaataaaaacattagctgggtgtggttgcatgggcctgtagtcccagctacttgggagtataaagtggaaggattgcttgaacacaggaggttaaggctgcagtgagctatgttgctgccactgcactccagcctgggtgaccctgtcttaaaaaaaaaaaaagaaaaaaaagataaatcatcactctgaatcttttcattgagaattttttttaatagcctaagatgctaagtagtctatacagtgatttctgcatgattttcctttttttttgtctaaatcttgacataagtttaccttcttcaaccttttaatctattcctgaatgcattattttaatagatgtgctatttattaatattttggaactagaatattaattaccccttttaaggcaaatcactacccaaaacacattaactgtgccttcactaagaaccttggtaacacatttgcacctgacaaaagggagtgggcagaaaattagctaatgaaatagttgttctggagtactatgtaattaagggctttgcagagagcccttggggaagctggaagactgggaatgagttaaatgtatatgagttttctagtgctgtagtaaataaatgtgtggtagaaatgaaaattttcttgcggaaagyatttaaaacaaggacaaactgtagttatattagtttgcctaagtattcaggtgtataggaaattctgaagatactttttgttggctaattgccattaagtacccacgtgtactgctttgtaagtggtaaaatttgaaggctgctgttgagtaactgtttcaaacaggtatgaagtcagcagtgcttatgttttcattttatctatcgggaataagttgtggacaagtctcctaattcggtgcttctcaagctttaacaagcatatgaatcacaatcactgggggatcttcttaaaatgtagactttaattcaggatttcttgggtgggactagagaatttgcgtttcattcattcatttatttattttttgagacggagtcttgctctgttgcccaggctggagtgcagtggcaccatcttggctcactgcaacctccgccttccaggttcaagcagttctcctgccttagcctcccaaatagctgggattataggcatgcgctaccacacccagctaattttgtttttgtatttttagcagagatggggtttcaccttgttggccaggctgttcttgaactcgtgacctcaagcgatccacctgccttggtctcccaaagtgctgggattgcaggcatgagccaccatgcccggtggagaatttggatttctaaaaagctatcagatgataccagtggtgcatagaccacactttgagtagcaagagcctaatwttttttttttttttttttttttgagacggagtctcactctgtcgccaggctagagagcagtggaacgatcttggctcactgcaacctctgactccctggttcaagcgattatcctgcctcagcctcccgagtagctgggattacaggcacgcaccaccatgcccagctaatttttttatttgtactagagacggggtttcaccatattggctaggatggtcttgatctcctgacctcgtgatccacccgcctcggcctcccaaagtgctgggattgcaggcgtgagccatcgtgcccggctgcaagatcctaatatttcttagaaggagagaaatcctttactcacaggaactgtacacacatgttcacacatatgcacaagcatgcctgctatccataagcawttgtcatctttcagatgatggaagctgtttgagacccttaagggactgtagtcatgactcctgtcttttcagtatccctttccccttatcactgtgatcctactgcatttatggaaaaactgctggcgggccatcatgtttgacccagagctgaagttcagaacttccttgttgattgtcagtgttagtaggaatgaatttagcccattatagtgattggcaattagaatggtaccaacattatcagttaaatcctgtctgtttgcttaactcagttttgggtgctaaggcagctgtattctccatttcagtaacttctgaatattaccattcaggtgctctgcatcaaaaagccccacattggctgggttttgtggctcatacctgtaatcccagcactttgggaggccaaggcaggaggattgcttgagcctaggagttcaagacctacctgggcaatatagcaagatcccatctctaaaaaatttttttaaaattagccaggtatgatggtgcacacctgtagtccttgctgcttgggaggctgaggtaggaaggtagcttgagcccaggagtttgccgtcagaaaagtcccacatcagttactaaagtctaacagttctacctctctctgtctctaaaatcctcttaagtctctctgtctctctctaagaccacagctttagttcagggcactggtctctctccctggctcaccataccatcctattaactgatcttctggccctattctgatatattctccatagtgcagctgggatcagctttctaaatgacaaatccctccttaacttttttttgtttgtttgtttgatacagagtcttctctgttgctcaggctggagtgcagaggcacaatcttggctcactgcaagctccgcttcccggtttcacgccattcttctgcctcagcctcccgagtagctgggactacaggcgcccgccactacgcccggctaatttttttttkgtatttttagtagagacggggtttcactgtgttagctaggatggtctcgatctcctgacctcgtgatccacccgcctcagcctcccaaagtgctgggattacaggcgtgagccaccgcgcccagccccttaacatttaaactctgaaagttaagtccaaattccttgacatggcacacaaggccttccttgagtctggccttggaagctgtgcatctcacattagtttcttggtggggtcctttctttcttgcctccaatcttttgcacatattgtaccctttgttgtagaattccctaaagtgctgtgcacatttctttcttgcagttttcatcttatgttgtcattgccttttcttggctcaactgggaactttcttggggccatgactctgacctgtgcacagctgtcttactgcctggcacattagaaatatttattgaataagaggtgaaatgaaaagaaaaggctgcgtgcagtggctcatgcctgtaatcccagcactttgggaggctggggtgggaggattgcttgaaggccaggaattcaagaccagcctgggcaacatagtgagactgcgcctccaccccctgcgcccccccccccaatacacacacacacacacacgcacacacacacacacacattagttgggtgtgataacctacacctgtagtcctagctgcttgggttgctgaagagggaggatcccttgagctcatgagwtcaaggctgcaatgagttatgatcatgctactctactccagcttgagtgatagggcaagaccctgtctctaaaaaacatttttaaaaagagaaaattaaaacttaggtaagtactgtttctttattttgtctgaggtagaatttaaaatgttgaggttatggaaagtttatattaaaatcatacaacattgatttagtaataaagctttaatgatgtatgtagagcaaatatcaataaaacaaaatttgtaattttatattagtatgtaggcaatgattcatattaaatatggaagaggagggaaaagatctggaataataatcataaaaccaataataaatatttgagtaaagatagagatgttgtagaaattgtaaaacgttaaatttttccctttttgtggtttctctatttagatcatggtaaatggatataagtattatcaaaaaatattgatataattttttattttctgaatatgatttttatttgtctttggtagcaaatgtaccacattaaggtggtatttggattataatttakggctagtaaacaggaaggaattgccttaatccaaatatacagtagtcttcccttatttgtggggataatttccaggctcctcagtggatgccagaaactgcagattgtaccaaaccttatatacaccatattttttcctatacataactatgataaactttaacttataaattaggcacagtaagagattaataacaatgatagtagtatgctataataaaagttatgtgaatatgcgcttgggaactctttcatgcacacactgtcttgctctctctcaaaatattgtactatattgaaggtatgtactgtactgtgggtaactgaaaacatggaaattgaaactgtggataaggggggactatccatttacctcacttagtaaatatttgagtgcctactgtgagccagacactgtgttaggtgctgggattataagcaagatatacatgatctgaaagataaactatgtccattatttgcaaaaacaagttacatgtgagtgttctttgctgtctgtagataacaaatatgtgtatagtgatttactgctcatagagctcttttgtgcgtcttattgcctttaattccacgtaacaagctgagggaaacagagactgagagtaatttgtagaaagtgacattgctgtgtgatagagaaagtaaacttgaacccaggataggctccaattccaaatcccatgccattttcttacaccatactgcactacatccatgggcgattgtggaataccttacagaatcatatcaagtttttaagaacatggtttgaaaatcactttttttttgtatttataacacaaatgcttaataatttttgagcgttggggatgagcacaacctaactyatatccattatattactattgcgcctctgacactttaaaacattaaaaacctggttttacccttaatgttttctggaattgtatttttttaaattagcagtaaagggaaggtatgtattttttgaaatttcttcggattctttctgccttttgcaatttccttgctatcttgatgaaatacaaagggtgaaattcttatagctagaaggaactttaragaaagaaatatattattggaattacagcacataaataaaatacagttctcataattcacctcggtttaaattattctttgtatctgcttctgcaraaagttttcatttaggcaacagtcattgatattgacagtgtcagttgataaaaatgaatgtaactgtggtttattaaatgcaatgtgatgtatgaatgtaaggtggtattactatagtcctccacttggacagagagtgagaggggacagtccattgccactggtattgatgtcctaaagtgtgtgccatgaaccttatgctctttattaggaaggctactctggcttgtttactcttggatttgacaaagactgtttccttgacagaacttcagttaggttcctctgagccctcttctcaacgtggggtcaaccttgagtttctgtgtttgtccttgctaagtccagctttagcaagaatcctgctgtgtcggtttaatcagaatccaccctcccctttatacctgatcaccctgatcagatgtggatctgatcaagttccacatcccccacctttgatctgtaagtccttgacctgcctttagaaacaatcctgttaggttagtttaataagaatccccctactcttaatgtgtttcctcttagtacttttccatccaccatcctcttactttgcttcttggctataaatcccamatgtcttagcttaatatgaagttgagcccagcttctctcccctattggaatatctccattgttgtggtctcgaataaaatcttccttaccatttttaacatgttttgagaatgactttttttctttaacagattctcagcagcaaaagcaattcaagtaatcaagtctacgattgggtatagaggttaaggtctctrtggcctaaaggtaaaagaaggggatatcagccatattcaaatatgtaatgtttaaataagctatgaaggatagcaaccttgggtaagataagatgtgtgtaagatgtagtccacagcaaactgaaaagcgtggccataaattctaggagtgagattaatttaaataaaatgctgataataaataccaatattaccaacctatggaccatttctccttgaaggaggatgcaaaaacatttaaaatcaagctggaataagcaaaataagaatttaggtaagaatggagttcttgttgagctcctagatttctagatgcacacctggtgacactttttttttgtcctctcaataattatggaaagccaggaccattaattatttttcacttttagatgataaacctgtggttaaaaatggtcaaataatttatttgaagtcaactagaacttaaacctgactccaaaacttgtaaaataatggtggtggtaatgatgaaggagaaggggaactggggagaagttagtggtgatgttggaggtgttgatggtgtaatagatgatgatggtggtggcgacggtagccatggtagagatgttggtggtgataatggaggtggtggtgctggtagtggaggaggtggtagtgatgatggaggtcatgttagggtgatggtgatgatggaggtattggtggtgatgatgggtggggagggaatgatgttggtggggtgggactggtgatcgtgggggtcatggtagggtggtagtgatgatggaggtattggtggggatgatagagctggggatggggtggtgatggtggggtggattggtgatggtggaggtgatggtggtgatgatggagagattggtagtgatgatggaggtggagagaggttggtgatggtggagtgggattggtgatggtagagatgatggtgatgatgatgatggaggtcacagtagggtggtaaggatgatggagggattggtagtgatgatggagttgaggagggggcggtgatggtgaagatgctgatggtaatgatggaggtgatggtgttatggtggtggcagctgccacttacttaggatttcttttgtcctaacctctgggatgatctaatttcacctacacctctgcatccataatttactacatgcctattaagtggcagagcttggatttgaacctaagtttgtctgacaccaaagtccacatacttcacaggaatgttgcgttgcttctcacgttatttccagtccaccatatgtgaattctgtgtattttcacagaataatgacacctgtattctggtactgtgggactagtataagatggtcaaactgctatcaatgattctattctctttgcatatttcagtatccaacaatttatttataagaccaaaagacctttctgaactatcataggtagcctgtgttaggaccatcttatataaacaattttctcttgctggaactatctggagtgactgcataaaaaaagaagtataatcaaaatcggataaacctcccagtaggttagtcaatagataaatcaccattgttcttacttataggctgtacctctgtgttgttcataagggattgtacagtaaccagcaaatttgtaaatgtttagctaaaattcaataacagaatgatcaagttttattgccactttattgaggctttgttttccgttagaaagctaccatttgatagtctactaaaaatgccagaatttagctgtattaggtttattcttaattcattgccattatggaatgttcctatagcacaagtgacaggagaaatccatgtataaatgtctgtgctacatgctataagcacagtgattcccacctccaccctccatcttctcaaagcaatcatgtgaagtatcaccagctatgagagacagaatatgctggaggctaaatttctttatctttaaaatgtttccaaaaatggccagaggagttgatttgcttttgtttccatgagtattttcgctattacctttagagatcactaactcagagcagttcatatgactttctgctgycatcatcctgacccctgcctaaacttttcttactgtggaaaatattaacaattgaccttattcagacatttggcaggctgtggtcattattaattccttcttgcttttctacatattttaattgccctcgggatctggtattctgaagaatgctactattggccagcttgataagtttgggaaatactctcctcttcatagctctgagttagttagccttataggactagtaatgagagttgaatgaaagaactagaaattactagatctttcttataagggaaagctcttcttagctaacattttaaaataattttgcatttttttgtttttcaatagttaggctatctgtatgatgttcttaagagaatattcagaattattagcttgattttaccaataaagattagagactgagtatacagatttgctgggagtctctttttcatgctaagaaatgaagttatattttacccaggcctccctgcttatcatcttttcattttttcccttcctccagacagcccatcctgctgagccaatacacagttttgaaatggttttatgtctatgagcaccacatggttagtctgcaggaatcataataatgtcttggacatgtgtttcaagatagctcagccttcttatcaagacttatatctcacaggatatcagaggagggagggaataaagcattatattagggaaaaaagcattacattagggaaattaagagttttgtgcagggttatcaaatgaacgttaatattgaggaatgtatatctgtgtgtgtgattttttttctccacctgtggctctgctgcgtgcattcacattgtgcatgcgtgggcatctctctgctgccttattttatctgatttattttttacaacacaatcatttaatttgactcacctgaggggttatttcattatcagcatgttgtccacttctatgttaggtctattttgattgaaaccttggatttttcccttcaggattgtgtgttggggtgggggcatactggggatgacagagggagaaagaaagatttttatttttccttctaataaatgttcattgagaaagttatagaatatggagaaaatgaaatttataactctcctgcgcagaaatactgttagctgtgagtttcttttctatatatgcttatatagttgagattatgcatgtatacagttctgcatcttagctttaaaaataatgtcacatcttgataatttcccagtcattaaaattatttgaagatatcattgatgtatcaccttattttatattctatttgaataatacatccaaggtcaccaaaagatgacagtgaaatgtattgtttgtaatctacattagcatcagtaaatatggaccatttaaattgtgttaagtcaacctctctgatcttattttattaaagtttaggataggcactacattggatgggactgtgatcttaagagtctcttaagaggctatagttacagaggctaactatctttggtttacttaactttggccgcttttttaatccatatactataccccaaattatggtcagccatcttaaaagtatccatcttttgtatcaaaaggaatttagcaaatagatgtatgtagattagtgcaaactcattctcacttttgtaaaaaatagttaaacttgatgtcttacatctgtagactcatttttggatacaaagtcttaaatagtttgtgttagtcaaatataaagaagttgaagcatctttgtatattctgtagatcatagatcctcattgaatcattttactatagtgtagtctttaatagtttgtaatgtcattagaagtaaactcaataattcttattactatagaataaacatgctattaataagaatagaaatattgttagtcatttatgcgttgaaaagacatttccatttcctgtgcttttcctgacctcagccagtacattagcacattcgtacactggcagaatgctaactagatgttatcacagattatgtatctgtagatttaatcttttcaggacttagcatcagcaaaagtaggacagtttttttttagtctttgtattccatctaaacatgtattgacattctcaagaaagtcatttgaacaaaaatcccaacatcaaatactccagagaaggcatctccaggtgcaaattatgatcagattatgggagatttatcttcaaggtcacaaaagtatgctagctttgggggaagctgtgtcatagtgtcaagtggaacatgcttgtttatttggtactcacgcagtgttgtttatactgaaatacttgaatgtatgtgctcacctgctgtttttyttytgccttttaaaagtcttggagtacatcattataacaaagcaatttttttttgattttgcattgcaagtttttgtttctctctaataatgcagtttacttctaagtgtggctttgataggaagatgtcagaccttcgagtggatcactaaataataatcacttgtctatcagtgagcttgttataaggtgtgttgcttttgatgggctattacctgactgctgggtcaaagttagtcttgctctgtattgggcaatctaaatttaagccttgaagagtgtccagattgtacagaatttytgatttgtatctggtcaatactgtcagaattcagttttttttttttttttttttttttttgccagtatttggttgatgggcattagttagctgataaaagtggtatgttgtggtggggcattgtgggagattagacatacttttattggaatatatttgggtattttaatattcccatctttatttgggataatgtccaattatttttttcactttcaggtataaagtgttgtgtttttcttcagcatttgtctaatggtagcccagctctgcaaccacacaattaatcccaaaccgccatgaaaaatcaaatattctttttagctgtggtcccaattatgctggagactgaggcaggagaattgcttgagtctagttgagtccagcctgggcaacatagtgagactctatctctaaaaaaatcagaacaaaacaaaagaacaggaccgggtcataagcctaattcatgtgacaccatcaagcatcagaaaaaagtagtaatcatagagaagtttttcataaataaattctgaatcatattaaaatttaatgggagaaatgaagtttgaggttttctttttttcccatgaaaataaaattcagaagatgtttacaattactctgctatctttctcaaaatagtggtttaatggcaaacctctcggaaggactctgtatctttcttagaggtgctgaaggcattgctggtgctcagttcatgtttaataataatgttattctggattgaagtgtggctagtataccagggttaatgctggtgctttaaggagaagggtgattggcattttaatcagtggaaatgttcagaacctttgtctgaacgactgtatttccagctgttcagatttctcagttctggttcagtaccaattcaaagcggagagctccatctactgaagacctatttcggaatgatttcttctgttgagttcagtgattttctgtttgcacaggtcattgaatttttttctgatttatgagctccaatgaaggttatgatgaaactggcaatttggtcatttcaaaaccaaattccttgtcattttgcttagtgcctaaatccaaaggacttaccagggggcattcttaattaactgtatttaatagtcaggttttcttgggaccaatgtagatagtaagactgctcttaagaaactgttgctatagatggtctttctttagtcttccgtagctgaatcccctttcatagactcacattgggattttattgacgatgtcatagaactgcagtgactttggtgtcaaatttaggcttgactttcagtcttgctactttggatggctcaagtgatggaagtgcaagtgactcaatttttataaacctcagattccttttggggacttatagccatgtttaatcagtctggactttgctggaagcgcagaagaatcttcgaagggttttaaataggagatcattcatatttgcactataggtcaaaccagagattttggtacccagaactttagctgtcacttcatttagagattaccaaagctgctgagagctatgttgtccaagatcatatactttcctggtttggcccatagtgactgatcagtgaagggggtataaagtccaggccatctcagacagactctgaataactttaaagggacatactttcatgacagtgtaacagagaagacacttgaagcagatataaaaatcacaagccctaaaagactgacttaaaaaaatacattaacttaaaaatcttaaatataacaaaagacattaaaacaaaacaaaatgatagaccacagactggttgtatgtatttgtaactcttctaagtggtcaaagagaagtatccaggatttgaaagaagtcatacaattcaataagaaaaagataaacaactcaatggaaaatggataaagaatatgactaggcaattcacataggtgaatgcttgaatgaccaattataaaagatgcttaactttgctaatagggaaatgaaaagtaaaaccctggtgagattccattttacacctattgattgacaatacctaataagcttgataacaccaagtgttggcaaggatgagaagaaacaggaactcttgtatattactgatgagaataaattactacaatcttttaagcaagcaatctagaaatatctggtaaagttgaagatgtccatattctgcaactcagccattctgcctttatgtgttagcctaggaaattgtcacacatagaaataaaagagacatgtacaagggtgttcrttgtagcactgtctacttcaaatagaaagaaagcagaggaatgcataaatgtagggtgatgtttcctccatacagtagagcagttaaaataaactagttgcacatgtatccacatggatacatctcagaaacatactaagggtaatgtaaactgtaaaagagtatataatatatgtaatgtaactattatatatgtgatatagtgattgtctatattctgtattatagataaaccttttttgagatataagtttgataccatacagtttaccaattcaaagtatacaattcaatggctttaaacatgttcacagagttgtgtatctgtcactgcagtcaattttagaaaattatcattactccacaaagaaagtccgttctcttagccatcagccccctacccccaaccgctgccagcctgtcatattctccagccctaggcaaccacaaatctactctctgtctctatgtatttgcctactgacatttcatataaatgaaatcatataatatgtggtctttaatgacaggcttctttcagttagataatgtttttgaggttcatcagtgttgtagcatgtatcagtacttctttttttattgctggataatatttcattgtatagatataccacattctgtgtatccattcattagttgaacatttgggttgttttcactttgtagctattatgaataatgttgctatgagcatttatgtttaagtttttgtgtagacatgtgttttcatttctcttgggtatatacctaggagtggaattactggattcctggtaaccctatgttggaatagccaaattgttttctaaagtggctgcatgcttttacattcccaccagcagcatcagagggctccagtttctccatatccttgttgatacttgttactgttcatctttgattataaacattttagtgggtgtgaggtagtatctcattgtagttttgatttgcatttctctggtggctaatgatgttgatcatctttttcatgtgcacattgactgtatatagatttgtaaagcatgtaaaacattggcatatattgtttctcgatacacacatgtatgatcaaagtataaaaaaatgggaagagatggtgagtggagctttagctatatttgtgtcattttatttcttaaataacaaagggcattaagcaaataaggcaaaatattagcatttgttaaaattgtggtgctatatacatagctgttatattattttytaaaatatagatatgtatagttgtagtcaacaacctcaaaataatagttgttgtaatgagagtagaaaattttgccaaggaacaattaaaacataatacaagttgcagaaatgctttggtgcmtgcttacattttgttgagatctgacaaacgggaagtaaaatttggtcataaaagtctaagttggagaatcatttattagtacagatactaaggaaaggttgtcaaccatgtcagatcacacagagagggagcaaatgtagttaaataaaaaacaacaaaactttatatttggcaattyttattaatatcctcctaggatgcagttttcattttaggagcaaggttcaaaatcaaattgtagggagtatacaatatatgctctatgagaaaaaaagactgtggtgtaaaacacattaaaaaggttgtcagtgaattgaaggagagaaatagggcttgaaaggaaagatggagctaagaagtttgccttgtgcatcaaatttggtgtagtacttgaccatcacccatgtgaacagtttgaaatttcaaagtggtaccacagcaacatagttctgatttagatacctagagtgacaagttttttattcatactttctctctttcctctcttttaaaaagatgtaatttgcatatagggttgtttctctttctagcactcaaagatcctttgagtaaggaataatggtttctataatagcactgccaaccacagaatatagtcagatgcataagtaaatatatcttgaaaaagaactttatccagcatggagagactttgtatgtgggaaagctgtgaaaaacatgggaagatgagacaatgtgtacaaagtgccatcaacactacctcactcatgatcggtcaatcttagtattccctcatgtctcctccactatcagatatttgagaagaaataattgaggaaaacgtttcagaacactctgaaaggaatggagagaaagggcaacagtacattttttaaagaaggatggatgaatgactctctgcttgcagggagggaagctaagccgatgttggagtagaggaggagctgaaggaatgcacggtgagtgccctcctgttggtaggaagagggcctggtggtgatgaaggtagcaatgtgggatattacagggaaggaacaacatttggagcatctttggatgagtgaagaaatgaaagacagatgtctaaatgcattgtctaacaacattgaggattcacatggatttagatagtatgaatgatgaggtctatatgattatgtgatttttataccttggaagctgggaatgaagaatagcatacagggtgtgtaatagaagggatttgcagggctgcaaggaaagatttggtggcgacatggcaatttccttaattgtttgaacagttcttttatggttaagtaattcttttaattctgttttatcataggacagaacttaggcactaaagagtctaagaaaggcaggttcctgcccagtcaaaagaaatcaccagtaattagagctatctaatcatagaatacactgtctttagagatagggagtttcctaacaagggaaggattcagagagaggctaggatgtgaagatggaaggtctgactgcgtgtcaactgaaaccttttttacacttaaggtgttraatggttttgtactcagaacattgatggggtaaaaaaatctcatttataattaagagcagaataaatgtagtgactataagaaaccaggckaggttagaatacwtgtagtgactataagaatcaaggttaggttctrcttgtacacagaatggagccaaggatctaagacaattggggaacatctatgccatagtttacgtccttttttctgcctctgtactagtgacatcaaggacagatcatatgagtaatatcccctcttgcttgctgtgatccttgaccagtctacctcatcagtacctttagtcaccatggtttttttaccctcatttaaaatttcatttgaaacaagtcattataattggcttctttaaaataaaaaaccaaggagtgttaaatttatttgtagactgtgcatgtgaaacattagaattctttatagatttctagtttttgcatgatttttaacccttggcatcaatcagtagatggattttttattttaagtgaaagccatagtattaataactaaatgtctcttccatgttttactaaaaaagtaattcctttctaccctttcttcccactttcatctccacttggtaatagaaagaacatagcagatttattagtttcactcatctcataaagataatgtcatcaaacatgttatgaacatagttcaggacaagagacaactatatgtattgattcctttctttgttccgtgctttacatatttagactataggctacaatcttggagaatcccagactcgacactttttttgttgctgtggcacattagtgcccagaaatttagtattgattactgtagtttctcttgcctcatctraatgtgaaaggaatggcaaagtggcttcattcataatgttggccagttagctctttttgcttactgaggttgtacattggttttggagaatacggaataatcaggctcagagttactttcacattgtactgctaagatactgttgaattaaagtcacagtgttcatggaaaataatgtgtcagaaattactaagaagaatgtctgaaatgtgcacaggttgtgaagtgctggagagaaaaaaatgggtcagtgcattgattctcttggggtaagggtgaggaccacattctttaaggggtgataacaggagctctagttaaaacgtttctaaatatacacgacccacctcctgaggttctgctgtagctgtcacccctagggtttgttgttttcctttattctgcatgcatcactctgtgtactcactactagtagttacttttagggttattgtgaatattgttagatataagatgaattggtgcatatcctctgacgctgggagaccattgtaattgattggtcaggtattttatagcraacttctatgtagaatataggattagataaagcctttgtatacggtaagctttcagaatttaaattaaaaatgaaaaagtcaatggagatttatgggaatatattgtaaggatgacagataatttcagtggtgagaaaaaggtcatctttgactatgtttcaaagtcataaagtggttcaatatgatattcctggtgtaagtgaattcaaggagtgttgtacagcagaggaaataggggagacatcctctgaataactgttatttcaagaggctgggtgtgtaggcagaattaaagaaggtagaagtggagagatggtttcaagaaaataacaaggtggtttcaatttgagagacattagatgaatcatgtaatgaggattttgggtggttatggacttgtagcaccaccagcagcatatgagctgatgtatggttagtaggactgaaaaaatgtcaagraagaggaggaaaggagactcatggtatggaacagattaaggacttatttacagatgcagtgaaggaasacgtttgaaatgctccaattcttcaagttggtattcatgattaaaataattaagaagtcagttttgagaactaacagtaaaggaattgaccacctgactggtgttttgatgtgaagcagatttaaagggataaaatctgtatgatgggagatcaggaaggcagcagtggtgcattcatacacagccaacactcaagtatttatttgagtattgttctggggagccatggaggatatggtttttgtgttttaaggggatcatagtctgattggcacagggataacatcaaaggccaacccaaatagaagacagcaaatgttggtgtgtcaaatgaatgttagtgctgtttgaagtgtgaatcccagatcccaggccccaatccaaaccgactcttattattttcctatggctgcctacaaattaccacaaacktaatgatttaaaatagcacmcacttattatctcacagtytctgtgggacaggagtctgggacgctgaratggttcctctgcttcagggtctctcaccatgctgcagtcaaggtgttagccagctctgggttcacctgagaggctcaactgaggaagagtctgcttcttcttttttttttttttttttattatactttaagttttagggtacatgtgcacattgtgcaggttagttacatatgtatacatgtgccatgctggtgcgctgcacccactaactcgtcatctagcattaggtatatctcctaatgctatccctcccccctccccccaccccaccacagtccccagagtgtgatattccccttcctgtgtccatgtgatctcattgttcaattcccacctatgagtgagaatatgtggtgtttggttttttgttcttgcgatagtttactgagaatgatgatttccaatttcatccatgtccctacaaaggacatgaactcatcattttttatggctgcatagtattccatggtatatatgtgccacattttcttaatccagtctatcattgttggacagagtctgcttctaagctccagttgttggccaagttctttttcttgctgctccaggattcatgacaacttgcttcttcaaagccagcagtggggttggtgggaggggttctgctagcttcagagtcttgtatagtgtcatgtgacagcctatcatctttttcatattctgttggttaaaagcaagtcacagttccctcccacgccgaaggggagggaaacacacaaaagcgtggacagtaggaggtgaggatcatggggccaatgtaaagtcttgtctgtgacacctgctggatcagaatctacatttcagtgacattccttagacgattacattttaagaaactgttacagatggtaggtgccaaagaaggttgatttagagggagaagaaagttctttgggcttgacctggccaggtgaattgttttatggtcagcaaaataatttgttgtgtaaaagcttattcacatcagggaatttttggtattctttctccctgccacttctgcttgagtatagtgtttttcacttttgtagtgctgttgtactctctgagagagtttgtaatttcctaacttgggcttaagaaaaaaaaaattgttcctttcccttttactattccattttgatgataggggttggtgtaaactaatggacatgctctgccctaatagcagaacartcttgggaaagacattgaactatcctttgcatcaattcttttatatgttaagttctgtcattcttctcttacagggctgttgtgtgtgaattgaatgagttgaagtaaaagttcttggtaaagtgtaaagcattatataatgttgtggtggacttgttttgttgtaatgccttattcacagagctgcccccttcctaccaatagtagtgtgtatccagaagtcatgattgttccttgattgtgtctaaccacagtccttcagagaaggcatgkwtggctgatccaaactgggtcacacagattctccatcttgggaatttggatttgggaccaaatgatgacagtttagtccttgctgacctaacgtaaagagattagaatccraggaaattgtggtacagctgacttctactgtacgagtagcagagaatgttccttgcagaggacagagggaactcagatctgaagagagaaggaaagttatggagaaagagggcccactgctgggggcctgtctgcttttgatttcctgcttgcttttctgggtccttgcagcatttttgcctttaagttgtataacacataattctaaatctgtatattagtaataattttccctcttttgttcaagctattttgagttgttttctgttactttcaactagagagctgaaatgggagccaataagtgtgtacttaaaaatttttaaaaatctcctaactactcattcatttttcccccaatgcctacataatttgtttttaaaggccaattatattgcttcattcattgaatagtcattgagcattttttcaggatactttagaaataccaaaatgaagaatatgatccttgccctgaagcaattttttaatttactaagagaaatggacatttaaatgactacctataatactaggcagaagaaagaaataagaactatgtgcaattcatttgaggtaatttttatgttatgcccagtaacctgattgaaggtgattaaaaatttcatttttttgcaaagaactgagcccttttgtccctgattgatgataaggtcctgacatgcttttgggcccatcatttttgcttacgcctctgaacattgcaagtaggctgggcagtctggccatatatacctttcttcattaagtaggcagaggacaatacaatgagataggcaaaactgaaaacaaaacagaagtttaaatcggagatttttaaaaaactcgcttagtgaagttatttgatttcttgattaggtcatcctttagctctgggtgatttccatgtttaagcttggttttagaggttttgtcttccttatagcttgtatcatgtataaaaagggtacttatataccttatattatacaataaagagggtattgatattgcttgcattgcataataaaaagggtgcctaacataagagttctgtgtttcctatagtttgcattacataataaaatcagtgcttaaattagatgggagccagtgaaattatagtcaaactgcatgaagctgattttagaaccacattttcttaaaatggaggttatgtaggttacatgttttactggctcatggagctcttcaaaatgacccagttcagaatgacattcaacttagagctgattgaaatgggcattggtggaaaatcccttggggatttgtggagcaattaaaaataacctaggaatctaattctttttaataatagaaaaaaaatctgtagttagaattttagagaagtatgtgaaagttttatcttactacagaaattatgggaaatgcttactttttaaaaggagaaagggaaasaatctcatgttgaaaattgtcattaggtaaagtaatagaattaatggagcaatccaaaatgagctaaataagtttctttgtgagaattcttctagagattaattctagaattcttctagagacttcataatatatggtaaaactaatattgctgcttagatattctgtgtcgtcttttgtcctcactttaggtaagcaatatgtacgccatagcactctctatcttactttacatcactttgctcatttggtgattgtgtaggtgtgagtatgtgcatgtgtgtagacttttgtcagtttccttcctgctaaattttaagctcattgaaagtaagaaccatgtgattagcttattattattatgtaccctgtacctagtgctgttcttggacataatagtgaraggtgacaacgtgctagcagccctcggtcgctctctgtgcctcctcagccttggcatccgctctgggccctctttggggctggcagaggctgaagccggcttcctctgctcgtggggaggtgtggagggagaggcgcgggtaggggccagcgctgcgcgcaggccttgtggcyggcacgggatctgggtgggcacgagctcggagggcccgcacttggcacagccagctggcgcctgctggacttgatagggggacgagctccctctgggctgcggagtgcctgggctaggtgccgcaaagtcctgtggcgagtgctagcgagaggtgaagccggctgggcttctgggacaggtggggacttggagaacttttctgtctagctacaggattgtaaatgcaccaatcagcactctgtcaaaatggaccagtcagctstctgtaaaatggaccaatcagctctctgtaaaatggaccaatcagtaggatgtgggtggggccagattagggaataaaagcaggccacccgagccaacagcaacctggtggggtcaccttccacgctctggtagctttctctttgtaataaattttgctgctgctcactctttgggtgcctgccgcctttatgagctgtaacactcttatgagctgtaacactcactgtgaagttgtgcaccttcactcctgaggccagcgagaccacgaacccaccagaaggaatgaacaactccagacgcgccrcctttaagagctgtaacactcaccgcgaaggtctgcagcctcactctgaagtcagcgagaccacgaacccaccaagaaactccggacacatctgaacatctgaagcaacaaactccggacacaccatctttaagaactgtaacactcaccgtgagggtccgtggcttcattcttgaagtcarcaagaccaagaacccaccaattccaacacaataggtgtttagtaactactcaatgaataaatgaatatttctcataaccttgtaccctacaagcgttactcataaaaagatatgccgggaatatttagaggtaacattatttttattgtcagaatattgtatattcgatgtgaggtttagcactatgaatagagtcagtaaataatccataaaaatgtgatcagcttgactcttgtttcttatattctctcagagagaagctaaacttaagagagagggagatcaatagatgagacatttaaaatgtttagcctgtgacttggtaaatgactaccaaaattctctggaggcaaagcctgtataaactaggttggctagcacacagaaaatgttaggggagttcccaaagcttcagactaagttagtgatggcaaccagttcagtgaggaaacaacagtattttcctagggccagagctcaggatggggagacactgccatggtaccctatgagggaaggcatggactccatgaactgcagttacggtgggcagggacaggaacttcaaagacagtgagctgagcagccatggaagcttcaggggatagggagatgttggtagggagttgctttttcaagggaggacagaatttagaagtcggtagtctggggaatgtaaaccaaaaataaaattctaaggcccccaagtcatttgaatggacttcctcctcagccaagacactttttttgttcgtttgtttgagatggagtctcgctctgtcacctaggctggagtgcaatggcgcaatcttggctcactgcaacctctgcctaccggttcaagcgattctgctgtctcagtctcctgagtagctgggattacaagtgcacactgccacgtctggctawttttttgtgttttagtagagacrgggtatcaccatgttgcccaggctggtctcgaactcctaagctcaggcaatccacccgcctcagcctcccaaagtgctgggattacaggcgtgagccaccacgtctggctcaagacactcttatcatttaatctgaaagactggctcaggtcatgacgggaacatggggagttggacatgccccattatacctctccagcattaacatcaacacagactttaagtctgaggagaaacattttacaccttattctctctcaggcctacaacctgaaggcttcctctgcaaataggaactttgatctccacagttctttctcctaaccccgccattcatttctattgatcccaggtctttagataaactcaaccaattgtcaaccagaaaaaatttaaatctacctataatctggaagaccctgctttgaggtgtcccacctttctggaccaaaccgttatatttcctaaatgtatttgattgacgtctgatgcctccctgaaatgtgtaaaaccaaactgcacctcgaccaccttgggcacgtgttctcaggatctcatgagggttgtgccattggccatggtcactaatatttggctcagaatatatctcttcaactgttttacagagtttgactctttttgtctacaggaaggagatgatcagcacccacttcccgtagatgttttctgtttctggtaatgatgtttttggtgttagggaattcagccttggctattctatgttcattttaaggttggtaacatcatgccccagttaggggttatgtgtctgtaattgccacaggagcagccctgtgtgttatgcctgcagctggctctgaatctgttaaggaaagagcaagtaaatattttcttacaaatataaaaggaagagttaaacacttattgtttggaaaccaagctgatgagcatattatattgtctgaggccccagaaataagcaaattaattacatgcaaataacttgctcatgaagtgtgggataataatagtatctgtttggatgtttatggcaaatttatttacatggctcaattttctgctaattttcctgtggaaaataataaatattggttccttttgcctttcttttagaaatacatcattgaaattatgaaaactgttaccatgtcttgctatctttgctttgccaagggcaattttaaagacagtatttgtaaatacatggtgaagaaagaactattaatgtatgtaggttctttctgctgtaaacagatggttgtcatcaccaacatcattaaataatacagaggttattattgaatattaacattcagtagttcagttgacttcctgttgatctttttcatgaacatcttttgatgtcagcttcttgctgagcttcagacatttcctctcttaaggtataacagggaattgagcagtttatattgacagtgtgatccatggtctctgtctttttcattaatgagtaattggattcacattgaaaagatggctctaagctctgcctagtgctccatacactctaaaggaaccttagcatccaatgtgactctcctgatgctcccatatgtgtggtttttttttgtttttgaggtatatcaaaggtgattcgatgagttgttttatttttttcaagataatcatttttttgcagttcattaacttggattgtatgtcaggcgcctcataagctaggggatgagtgtgggattgagtctttagttgggatgaggagtatttgtttttgtatccaactttataggctgtgctgctcgactcccagcctttctcagtagggtgatccacagctctactaggttactattttatttgtttgctgtctgtatgctaaggctcaggcattgacatcacctctatacgttttcatcaacaactctgacattttgacatgacaaccttgaaactattatcttatggaatgccagacacatgatctgttgttcataaagcagtaagtagaatggaaatggatttttcttttaatttttggtagagcaggaattttaacctccagtcagaaaggaaaacagagcagtttgtatcttggattagcttttatcagctactctgcaccctcatttttgccatctacaagtgcgttggggtgcagggagatgtggggttggcacaggaaggttgagccacccaactctgtactctgtaaattaatatcttgcttttgcatgaactctctttgccggttttctccatcaattgccgtggtagagatgaggctggtggccaaatattttcttcttgtatttccagtgggtaagggggtggtaccacacacactttgggtattccattgttcttcctttcagtttgaggttcccatgtagaaaaattacactgtgttttgataatctgattaacagaagggaaaaaatcaattggtagattttgaagagagaatcaatttccttattacagaaaaagatgagagacataactaccttgtgtttgcaaattatttgcttcagtctgtgatgctttcaagagtttgagaaatagggtatttaacttctcaacttatgcctgataggatcacggtaaaagtgctccagcctaatggaagcttaaaaatgcagctcttagaattgctggatcacacttgacagtgatttgtatgtctacggcttattaaacctcagcatagagaatgtcctgatttaaaatttttcaattttattcacttggtctgatgtgaggagcagccatccttcctgttgtcttgtgtagtcgaatgtaaatttctcagccacagttaaatttctggtcaaggccaaccacactgagcgttaaggagttctttctcccttggacttctcaatcagagaattgctaacatttcacctttgactttgttctctattgacatctaaatgccatttgttattccagtagccataagcatttgccatcaagcagagcacatgccttagagtgatcaggaagaagcaatgtcagaacaaatggtaatcactctgtgctaatattctattctgttctattctgttctgttctgctctattctattcttattttattataatccttggagcatatccagctttggctagttatgcacagactcaatgcttagaaatttgctgttgtagaatttgtaaatcaggaaacggattcaataattgtggcttgaagacttgtttagtataatattcgggttccttcagttatattctacatcagtgtgttttctggtatgccacttgctttcttttatgccacaaacatctgttgctgcttattgtagatgttagattttgagccagggtataccaggacttactaaagttaattttggtaaaattgcctgcagtaagtatcatcatttttcttaaatttttttcttttgtgttttgtttttccctttttctctgatcagaagttaccttatgaaygttatacatatgtgtagattagaaaattcttataatgagtcagaagttgactataggaggattgtggaaatattgatgccttggaaaggctgaagttgcagggaaagtattaagcaagagaggcgtggtttgagartagggattgaggtgattgacagcacgggttggaagaacaatgatgaaggagaagtagtgaggatattgatttagtaagtgaaagggcactgaaagaacgaagtcttagaatattagagraagaattgatggaaacatgacttttaatttttttttkaatcaatcttgatgtttattttggatctaaaataaggaaccaagtataagactgctttgaaatcataatctgaacattattttaaacatttcactagcaaatcatctgctttctgtttcactatgccgttttctaactttgctaagaaattgattctgttacgtattaggacctaaattttttccataatttttaattttttaaaattaaaagcattgcgatataattcacatataagtcaccattttaaagaatataactcaataggttttagtatrtycacagggttttgcaactatcaccactgtctaattccagaacatgttcgtcactccaggaagaaaactggcctttagcaatcactcaccattagcagtcactcccattcctgcttctcttcagcctttggcagtcaccagtctactttctgtctctgtagatttgtctattctggacatttcatgtaaatagaatcatacagtatgtggcctttctgactagcttctttcatttagcataatgttttcaaggttcatccatgttatagcatggcagtacctaatttctttttattgcttaatcatgagacaggagaattcccttgaccccctcatgggacttgtgatgggggtgtggcccacttactgggctgctgctgagctcacacctcttgtggaatggggaacacacaggcaaacgggtgccagggctgggacaaacgcttttgggctccagccccatggcagtgtytaggggtgtgttaaaattaatgctcttttagcagttgccatctctggacagcctcttacaccctgccctcttggtacctgagtttttgtctagcatccaggaagaatcaggtcacatggacttgaaggatgtggagattttattgagtgatggaagtggctgtcagcgggatggggagctggaaargagatggagtggaaagaggatcttccctcatctccaaccrtccccagctgaactcctttcgacattcagttgcttcttctcttttctccttctctgctgcaatgctctgttcctctgccaatggagtttggggtttttgtgggtacaagatgtggggcatggcgggccagggtggttttggaaaaagcaacatttgagcgggaaaacgggataactcttctcatttagggctgtggtttccaggcttgcrggtggggcctttgctggggaactgccctcttctatctaatatttccctgcttctggtccatatcaataatattccattatatggacattttgtttatccattcatcagttggtggacatctgggttgattccatattttggttcttattaataatgctgctataaaaatttgtatgcaagtctttctgtgaatatttgtttacaattttactatacctaggaatggaattgttggatcatatagtaactttgtgtttaactttttgaggaactgccaaactgttttccaaattagctgtaccattttatattccaccacgcatattgggcatattatttgaaatgtaactsatttactaagaaaaaatagttttaccctttctatcttgccttttggacatcatctatactggaatgagttactgtctgatactttgaaaggccataaaattgtagagcttgagaggttctaatgaatccatctttctactggaatggaaaatccctgaagtttaggcaccttgtccattttgttcacttctgtatccactccacctgtgtcagcactgtaaatactaggtgcttagcaaattttactgaataatgaatctaatccaacccgtttgtttcgtaatgagaaaagtgatgcccagagatgtcaggtaactttctaaaggtcactaagggatttaatggtagaacaaggactagaattctggtcctgatttccttgccaaattcttgccttcaaagtcatcttgaattcactgttcttcctgaacttcatggtccattgctgacctgatacagaattttctgacagttttatagctgtgctttgggggtttattgacatttaatgagtgtttttgttcttgtgaagtcatttacatgtttactgctgaggctagcattcataacaagaaaaaaacatttaaataactgcattttacccagggaagataaattacagttgcctatcaataagtagataactttcattgctgccaagattattagattgtggaaggcaataaatttgtaccctcccttgtgagtcacttgccttaaaaaattcacaactaattatctgaaagtgagacaggttagtacaggtttgctatctactagtattcctttctttcctaatcactcttgcagatggaggaatccattttatcagcctttcctccttattctgctcttccagagtaatatatgtgtaaattaaatgtagcatagcttaagtaagcatagattaccctgtatctgaggcgttgtttttagagccacatttgcatgttaagtggagttgtgtgccatgagggataggtttatagaccggacccgtaatgaagttgagaatcattgtgcaaaagctgcagactacaggtagacattgagagcctttgaatgtggagagcrtatatttcacttccttttgacaaagactttattttataaggctttatgggaaacagtgtgttcaattacctcagttaaaactcattccagggagcagactattaaaatactacttgaaagtactgagatttccccctttttgtaacttttgatcaactgattgatacctggtatttaaaataacatgtttaaaaaagattcctgaattttgttgtatctgtgagagataccctagggaggatcataagtctactatgatcataattgtgttcctggtctagtctatccctttaatgttgggagttgagaatgggagaatataaaagaattcttttggttcaggtaaaaaagacatttttagaaagttagcatgggatagtgaggaaaaaaaaacaaaacaggcttttatttagaagatttgtgttcaaattctggctctacatctaattagttatataactttattaactttaccaaggctcactttactcatttgtaaaatgtggatrataataataaattcctaccttacaacacagctttgtatttggtgagctaatgtatgggacatatagtaggcatttaatagctgatagtgaaatctgaacctggggttcattggaccttcttaagaaaattttggtagatagatatataaatataagtatcatgtttatgtaatatatgtattcctctcccccctttatatctgcatcccatgtcttgtttccagtaggatttaactggtatgtggttgataasttaacttttaaatgtatgtaatagccagagccttttaaagttatcttaaaatgttcactgtaaagcttcgttaatagctgctstaaatctgtttgtcaagtgctttccactctcttccagtttctgctaatgctactrctattgcttactacattatccaagttggaaaccttggtatgatctttcctgctttctcttttctttgtaattctgctgtctagcaggctatttctatgcaaaactaatactgcataaaatattgtcaatgccaatgtaaggtagacagcttagcaagtacatggacttgaaacaccagagtatgctaagcagcactctatagctgtaatgtattaccctttgtcaacagatttctgagacatcaatgaaactcctaatcatgtccgtttatacgatataataccaattttacagtttttttctgcttaattctcattcttattttcgaatggtagtagtatcaatggcagacttctgtaaaactaggactgacatacttagatgatgagatcttgttattccataagcggtaggataccagatgtggtaaacaaataacctctagcagcctgaatggaaggatgtggtaggytggattattgttcagcaaatattcattccctaacctaccccactcccaatagccccccacccaacctatgagagcagtctgtttcgtcatccaattgctattggacttggtcgtgtgacttgatataaccaatggaatgttagcaaatatgccactagcaaaggcttgaaatatgcttgtgcagttggacttggtctttgcacttctattgtttgccgtgagaagaacatgcttctagtagctgctaattcaagaaggatgaaaagcactggctctggacctgatctgcagcttggtaccaagcccagtgtagtccagcctacagccaagtcccagataatgagcatatatgtgagcaaggaagatatacttgttgtatgctgctgaattttgaggtggtttgttactcagtattgtggcggtagctgacaaatacagaaggatrctcatttcttttaaagaccttctttaggcactgttttggaagctgcagctttccatgtagcatcaagaactttattgttcaatggcacctattttaatgccagttttgtctctggttactggcaaaactgttcaggattgaaagctcrctttaaagaaatgcttacaattcagatgggaagaagagtgctggttgaccctggctatctccacaaacctgtctgtacttggaagttgtttctaggaaaatataatggccagtggctcctttttttgttgttggatcagctagttgtatgtccttagtggtacaaagggcagtgaatacacaaagatagtatctttaattatggaaggagcctattaaaattccattttatcttaagaartaaacatgtaaaggaatctggaggaggccaaacacctctttaaaataatgattgtcttgggctaattcctttactgtgccttcagcatcattagatgccaatcctactgtgtaggttcatttgcaaacaaaactgattagagactggaggctgtgtgcatgagacctccctaaagcagaggtttcagaaacctgcacattgtttaaactggttaccctcagcactacttttatttattttctctctacatgggggggaaaaagaaggttgtttatttcaaagggtattagaacccattcttcaaaagagaataccgaaaaagagaaaaaaagatattgtgtaaaagctcagaaggttttcagaatttcccttttttgcccattgtaaacatgatctttccctttgctctgagctcccccctctggcattaatggtatatttctctttctgttactacaaacttcaaagctcccctccaagtcattttgcaaactgtaaagtaatggtgggggctgcttttatttcccagagtttgtggtgggggtggactgagaaatgtagaggaactgttggcaacatttattaacttttaatttggtgcagaaaaaatcggaaaccaagtaccatacaccattgatgttgcttcaaagatactttgagcttgtttaaccaattttttaaagcttgtgtgccggactgaaatgaggtgccttttatacagacctcaggattgtgctgtcataatagataaatccatatgtctctttgtttttgtaattaaagctttatccttcctcttttttgtcttcaatggctatctttgttctgatagagaccgattgctttattgtaagtaaactcctaactattgtgtgatattctctttaaaaagaagactggygatgcctaatttatttagcaccatctaggaatctgattttcagtgtggcttaattttccagaaaatagtctctccccttttagcattaaagattgtattttaacatctttaatggaaattttataaaatacatttctcagatttggtccttttgtcacaatatactgagcacattcagactttttctggtgactgaaggactgtcattttgaacctggttaatcgatgctttggttgcacttttgcacactaccctttattgaatgtattgtgatacgtcagaggtcatcttgtcacatgtgaaggcacggacaacgttccatcgtgctgaaccagtcccagacttccattaaaaaaaaaatcatacttgttcactcttcataccctctgtcttttttttccttgctttttgggggtaggttatcatgtctagctattgatcgtgtctgtttcagacaagctcctcttgctaagttgctcaactattgtggtataagctgcaaaggcagagaaccaaggtggttagaattgtgtgtagaataagcgaccagaaagcactctgtggcatcatgcacatgaattctcagctatggattgtataacataaggacattttgcccctggaaatgtcccttttttcttaattctctcttccttagtttctgctattcttagtggtccaggctgccaggtaaattaggtattcttctgttaacaatggcagtcaaatgatacctaaaacacctttattgtagaattctctatcctagtcccatccatctgtatttgtgttacttaagttttagctattccatgaagatccatttctgggaaaaatgctccgttatctagtgatctgttaatttctagaagtatctaggttgagggtaaagtttttgccgtttattttgccacctagattgtgctgaatggataagtgaatgaatatgtttcttttgatactgaagcaagtgggttttttcttttattttttgtgattaaatatttggttagtttcttttttcctcttaatttgttcttacttgtcctttattccttagagccacataaggaagggcagggggaaagaatttgaattatctcagtgttttttttttttttgtttttttaaaggagatagaatttgctcttgctattyatttcaagaaattggtgatcttgcatcagccggcttgtttttgaaagatgtttttcttggcatccatgcaaactaacgatatgaactgtatcaaacccagagtggcgtgggccttccttgtactgccttctgacttcttcagctgctatgtctgtacttgccctcctatgtgccctgagctctgccctctgactgagaagatctagaatttgactgtcctctttaggccagagctatcattactcatataaatgatattctttttgagatagctttctcctttcctcttcatttggcatcaaaactaataaatgatgaaactaacttcctttccagtaattagaacctttctctttttctcttttttgtctctcttttcctgagtgaaggcagtgtggtgttaaaaaaaaaaaaaaccctaatattatccatatcttatgggatactctactggcataatacttctttactaaagcctagaaccatagacttcagttttggggacctgatcaaagaaataagacagacctatgaaataatcagcctctttaagtatcatcacatacccttcgtgtgtacgagccagtggctttcaatttgatttaatcagtgtatggttattaatgtgcactatatggaatgcactgtgttctatgcaaaaaaactccaaaaatgaaatcttcataccctccccctttattttagcttgtaggaaatgcatttcttctgttttgcttgtgtggataattactttagagtaacttatgatcttttcccatgagcttagtgtcaatttcctggaggcatataattttatataaatttacctgtttgccctgtctrtaaattgaggatgaactgataaaaaaaaaatacatctgagtgactatggatgggtttgtgtgggagtgtgtgaggatgggagaaacttccatgattcattaagatatattatggtcatagtaaaggctcattttaaaattttttgatttctttttaaattttgcgtgttatccaaacatgttagaggatttcattttaaagaaagtactgaaaatatttgcccaaattaatatttgtgttctactttttttctcttatagtttctcaaatttactatatttgtgttactagagtttttagatttttattctgattatggcttatgattatccaccagatgtttaagtattttaccttttgctattatttatgagagaaaaaaatggactgtaagctccctgtggtacaattttctgttcagaagaaatggaaaagtttggtggcattcattttctagctcatggtcttttcccattttcgattatctggtgatcacttactatttgctctaaacttcagactaatgctggacaatgaagaagaatgcctgtgacctcatggagctcacatctggatgggaaaacagtgctattggtttcaccactaaaattttccgtaatatttctttgttaccattttaagatcgrtaggatattttattatctaatcttttttccacttcacatcttttatttccccgtttttctgtgatgtttccatactgattgtaaatgactccacaagtgtgtgcatgaattcccttaagctcctctgcttcccatcatccaggcctgctgattggtatgagttcagtattgtcaagtgttccccatctgctttttgtcagtcgctatttttgcaaagtcttccttctctctaattatacaaatatgtctttttcatttttcttgtcaaagacaaattaaaaagaattagttcagtttcttagctagtttagtcttcattaattccaaaccccactccatttttagcaccatttttcttttcctagtctttgtcccgctttttggtaattttaaaagctcstcttctcttgtctgacttatttaagtagcatgaattaatttgctacctctgactcttttctataagttttagctaactstaacaagatactttttcactcttctccatatttagttcagatctgtctttgtctgtagatctttgaagagtcatttgtgaaactacattaggtgtttyttgttcattatcattttccccaagaggaattttaatcctatgtgtgttaattatttaattatcctaatgatgtctcatatggtacccctggcctcttgcacactgatggaattaatcccttatcccagggctcctcagagttcctgattctttaatgtttgtacatttatatttaaatagttcttatattagtttttaagtaactttcccctggtttttccttgccatcttgattttgtctcttatttctctaatgccctatgttctttcgatttaaatattatracattagtttcttcctttctgttgcctccaatgggggttgttattatctaatatactctggtttcaagctttaatagccatgagaatcgyctggaatgcttgttaaaagtccagatttctgagtcttagcccagaaattctaattcatttggtttgtgaagagcctagatatgaagagccaaacatcccaagttttaatgaggtggtctactgaggcagtccactatgactaccacctgctaactgccatcctttatcttaaacgcagcagccagatttttcatctcagaacatttataaaatgcctgctctctgtaaggcactgtgttgggcactcagaatatcacagtgagcaaactggacattgttcctgatcttgcagtgcttatagtatgttgaattgttttccttmtctcaaaaacttgattacctgttgcttacagatgacagtaggtcagttcattagtatattttgctgaggtgctgatagaacataagaacaatgactgggaatcaggaaatttgacttacaggtttggttttacttctgcctctgtacacgtgtgtgtttgcctatgtatgtatatgtatgtgtgtgtttcacttgtaaaatgaaggagattgggttggattaccactgttcctttcagtcagtatttgaacctcggttttggtttccatcttcaagatgttatagttgtttaaaggaaatrtaccatatttcatcagttctttttttttttttttttttttttgagatggagtctcgctgtctcgccaggctggagtgcagtggggcgatctcggcttactgcaacctccgcctcctgggttcaagtaattctcctgcctcagcctcccaagtagctgggattacaggcccccgccaccacgcccagctaatttttgtatttttagtagagacggggtttcatcatgttggccaggatggtctggatctcttgacttcatgatctgcctgtctcagcctcccaaagtgctggggctacaggtgtgagccaccgcacccagcccatatttcatcagttctaatgtatcatcacttatcagacccctcccaacttcagagatgttaaaatgtgaaataatatgtatcatatatccatgaagtatagtgtacgtatttatgtgtgagtgtgtttgtatttgtgaggataatgataccacacaaagctaccttctgactactgacacatggttacttgggaccaaaaaagctgtatcactggtctgacactcctgaaagactcaggatttattaagaaacataaagcctgtaacacaaaagaagcaaagatgtaggaggagattatcagtctctcagcccagatgacccttcccatgttttccctggacctgcctcactgttgaattgtgtaatgtgtagagattcctaacaatgaagccatcagggagactataactcattgggtaactcttccatctatcactcagctctgacatctccaagaaaccaaactcagatgagcacattgcttattgtgagttatagcttctttattttttactttttaattcaatatattcatttaaaggcattaaaaaaataaatttagtgattacattgaataatcacttactggcaaccctctcccacccccacagggacacacagtttaaccatttctgagtcaaggccttgcataggtaacattaactactgtttacactcttcaggaagttgtcatagttcttgaacactacaatggctttcttatttctcttcatgttttcactggatctgagtcttcctgggagggacagtgacttattcagggattcagaggaaagtaaggtactggaatcaattctgcatttttgtaaaagctctcattctgttatttttcccacctttatctccacccccacccccccattacctattcaattctgtcttccttccaagtacttttagccttagaattaacttctcatgctacagttggtcatcagtgttcatgatgtgactggaaatgtcagagacatttgaaccagagcaactccatcttgggtaagggctgggtaaaataaggctcagacttactgggctgcatttccaggtggttttaagtcacaggatgtgatcagaggtcagcacaagatacaggtcataaagaccttgttgataaaataggttgcagtaaagaagctgggcaaacccactaaaaccaagatggcaatgggagtgacctctggtggtcctcactgctacactcccaccagcaatgtgacagtttacaaatgccatggcaatgcattctaacttccatagaggaagttaccctatgtggaagttaccctaaaaaggggagagatgaataatctaccccttgtttagcatataatcaagaaataaccatggaagtgggtagctatcagcccttggggcagctctgtggagtagccattctttttattcctttactttcttaataaaacttgctttcactttactctgtggactcaccctgaattatttcttgtgtgagatccaagaaccctctcttgggrtstggatcaggacccctttctggtaacagaaatattttagtactattgggagattttggctgaggtcttctatttcagaagttttaacatcaatagccagtggcaaatgctaaataaatgatacagactgtaagtaccaggggagttacaggaaagtagagatcactgagttgttggaaaatgcttcaagacgggagagatatttacagcaagtaagatttggagaagtagtaccagaaagagagttaggaaggtacacggaatatgtggaaggaaggaatgtaatgaagggactagcagaaggtaggttgggactggctcatagagggcctagaaattccatctgaagattttcagttgcatattttatggagcaagggtttctaattgtctttttgccttgtttttgagacatagtctcactctgtcacccagtctggagagcagtggtgcagtctcggcttactgcagtctctgtctcccaggttcaagtgattctcatgcctcagcctcccgagtacctgggattacagatgtgtgccaccatgcctggctaatttttgtatttttttctgtagagatgtggtttcaccatgtggccaggctggtcttgagctcctggcatcaagcaattcacccacctcggcctcccaaagtgctgggattacaggcatgagccaatgtgtgccaccgtgctccgcctctagttatcttgaagaggcatttatcacttcctctaaggttccagtcatcttctaagatatatggcttgcaaatgatacagtggggctaattttgactcacactgttaagcctgtgtgtttgtgtgtggggkgtgtgtgtgtgtatgtgtgcatgcacatacacgcacacatacctatgtaaatacaacatccctgctggtgcttattcctgagatgggattccttgagcagagttggggacagtgcattgctgctggctgggttctcctccagtgaacaatcctggaagactgtgaaatgaaattctgaccacttggtcattcagatctaccagtaactaatgattgacccacttacaaggcttgccataaacaatggcaaaccattagaggttttttggttagcttatttttttgtgtattatgtttgttttcatgtatgttttttaatacctgccattgatggtttgaaattattgttttagaaaggatatactgggcatagctggtgaattggaggtgataaaaacttaagtcaaattaaaaagacccttttgaaagcctagcgtgaagtgaggggaacagaataaggacaatgagaatagaaagaggtggttattagacagtmgaaaggatgaattacagaatgattggtgggataatttattcatttattaaacatttattgaaatttattacactgtggagatttaaagctgaaaaagttggactccacttcagagagcccccaagagcgggcagtctgacaagttaagtagtgatggtatgctgtgcttaaggatgaagcaggctgaaacaccctcgaggcatgaagtgatgcctcaggctagtggggatggggaatggacaagagaagagcttgtggggtggtatttgagcctatttataagcaaaaagaaagaacctagtagagaaaaagagatttacatatgatctgggagagagaagggatgattaataaagtgagttatggaggaggtgggagtagatggattttgaccacaaggagaagggatttgaaggaatcgaagatttgctggatactgaagaaaggaatgaatcaaagatgaccaaggaatcagttttgtgtgttttgtgtgactgaaagaatggtggtcccatttgtaataaagagaagatgaatctgtttttaaatacatttgagtttgagataatgggagtccaataggaggcttgtactgaaggttgataaggttgacctgtgaaagatgagggtgaacaccattgattacagaggagtgtaatgacaatgtaatctacaatacaaagtgcctctctgcaggacttgggtgtttgtgaagtagtggagtgagaagccccagttgctgtgacgggagccagggagtgagatttacaacagtttatttccctgtaggggtggtgttatagctgctttttcttcacatcttcttccgtagtcgcatttgtccaggatctcaggcacaggcatggttgtggaggctagacctcacatgggtaatagaagcactatcagacacagaaatgtccttttcaaggctggggttgggttccgaggagaccctagcaggagaggcccagggcaaggggaaagatgaacagttgacacacctgcctcttggtaaagtctcttgcgcagtacagaatgkgggcccatctctgctttctccaccagagagcaactggatagccttggatggagtcagaaatcagcctgtagatctgtgaaatgcctaatagttgtccctgagtctattgtcacttcagtctggtggtagaaactcaaataccaaaaactcctcagtgaccttccccatggtcaagcaccagggtgtagaatccagcagatgctttgggtgagtgtttgtctctgcagctctacagattcacttccatgcaggttgtcttgacctcctgggggcatcagtgggtggtgtgagtggcctttatcaaaggttctcccattttcctggctgtgatgaggagtcagaattagttacagtatctaaggaccccagagctccatctttctctctcaaagttatattcccagaaaggtcatttgggaaacaccccctctcaaaggggcatgtagtgcttaagtgttggcttctatacacaaaaagctcaaactgtataagaagcacctgtgttggaagatgatgcccagatgaggaaagcttggagtgtggcctttattttggccattatgccaggcaggaccagggacaactgacagaccgcaggaactatgtagttcagggaattaggagcatttcctattctcttgggtcaggagacctgtgtgtactgatatcctggcccaaaaggtatgctgaaaaccaggtcctcataagagtggagtgtagctcactttctgattgtgcatagccatgggttcagtctgagtgtttcttcaggagaagccaaattataaagtcagcctagctgaccagaggaatttcagtccaaaggggcaagagagattctgaatgagagccagcagaatggaccaaggagaccagcaaatgaagaatcagagcacagggtagcaagtggggcttggcgttttctccaggctctttattcttcctgaatctccctccttccatatgcatcaatttggacatatacttagctaggtggagactaacatttattgaggattgactttgtaacaggtaacgttttatgtgttggggccacagcagtgaacaagatagaacaagatagacagtcttacaaccccctgcttcctgccccacggagcttatgtcttagtgggcatgtggagacggtaaactacacacatagggtaattccttactgatgacttcctatgaaaaagatacaattagagaaacagcactgtagggtgtgatttgttctggaggtgttaaagctagggtggtcagcaagccttctttgaagagatggcatttgggttgagtcctgagtgaggagaagaagagtgccacattaagattgagggaacggagaagaaaattgggtcttgtattttggctatgttaaatgtgggatgcctgtgggacatgagatcatgagcaggttggtcggtggtgtcagcttgtcggtgttcaggtcagaggtctgggatgacagattgcagggccttaccagatagattgtattttaaagtcacaggactggatgagatggcgttttcacacttttttggagctctttttaatcatgtatatttgcctagagattaacaacacgtaagattcttattttaaatagaacagattttttgttgaatgaggcagaactttgggggcatgaatatgattttgtgtgtgtatgtttttttcatgtttctggaccgtatgtgtactgattgacaagttcctcctgtcatgtacttgatggctaaaagacagcaattctcaaagttttcagcttctatcctgacaaattgaaaattttctgaactcattatagaatctactcaagtgtacatatgcagtcataggtttctgatcttcagatttattaagagtccctgaaatctttcttagtaaatattgtatttgaaagagatggctggaacgtgtgtcaagtgctttatagttaacacacatctgaggttccaaaacctgtgtgaggtaggaagatgttgtactctttcctttgcagttgtgtagggtaggactttggaatataaaatgactctgaygggaaaacacaactcaaaattgttaggaccaatcttagaatccaaggctttgattcatatgccagcgtctttccactacttcagtggttctcagccttggccccatgttagattcatcttgggaagttacaaaataaaataaaacaaaaagcccagcaattgtgcttccacctcagaggcctggacagttactacaamcaaacaaacaaacaaacaaacaaacaaataaatcaacctctcctggtaattctaatgtgcagcagtagctgtgagtctctgccctattccacattgccttaccaggagctgcgttatctggtgtgttgttaccctgtaatcccagcagtttggaaggcggaggtgggaggattgcttgagcccaggagtttaagaacagcctgggcaacatagcaagaccccatctctacaaaaaatacacagaaaaattagccaggcatggtggcgcatgcctgcagtcccagctactcaaaagtctgaggtgggagactcaactgagcccagaaggtcgagattgtagtgagccgagattataatactgcacttcagcctgggtgacagaacggaaccctgtcttaaaaaaaaaaaaaaaagatgactgagccaaccaggatacttctaatgaccttgttaaggaagatctcttttctttctttaagtctcaagcagagtccttcctctttcttgtgactgtttctctttctggttgtgagtttgcaggtatcccacattctttctctggtatcaktattctctgtgcttgtacatgagaccagtgaagctggactaacccctttatttccacagcctaatttaattacaaccaaaacctctcaataaaactgttttcttatttacgagggagactttattccattttttggattgagagagatgctttttatttttcgccctactstgtgctgtaaaattatctctggagatttaattgtgtttttgaatggttattcctagtttttaacgcagggctgtctgtaaaatgaagatagcttcttctctagtttgctcactgttagctagtgaaaacatgccagcttataacttggcaagattactctgagctactcagggcacggtcctcagtmcagcgacctgtctgctcactattacccgtccttgatgaaataagtacagaaatcgagatgaagccattagaaactcctagtgatttggaaaacgtaactttagattttgttcatctttgtctttttaaaaaatatacttttaatgttttataaagtatcaaaaactgataatcctcataggtaatttcagaagccatggactggatctctgaatccagtagtcactgagaggactaataactaccgctgcttttttcacgagtagaaataatattcttgatttgcaactattttgaggatgtagggtaacacagtgtaagtggtaaatttcaagttctggcactgggcattagcctagagcttagctttaatctacaatatgcatttctcaacctgcttctgatactttgccacctgtcctctctaggctgcagtttacatttacagatgtttctataaacctttgaagactcaggaacattttggttggtttttaaccataagtgaaataataaaggggatagatttcagtttgctttggcagctttagttttcagttttgagtgattctgaccaagtcaactccacagttcatcattttatagtcacttgtattttggctgtacaccagtatgttctataaaatacatcattttctaaagtacattgaggcatgaaaacatcagtgttaatccttttctgttacacattgttttaggcaatcaaagacttctgcttgctttttcctaactaggatatatagatcttcttacatatgagaaatgaacattgcttcactctcttgtcttctgtagagtctaccaggcaagtgctccactctgtttttgtatattattattcttactgtaagaataatgcatgcttattatagaaaatttggaaaatacagaaaaatgaaagaggagatttaacttttttatattcctagtacttagagagttcacatttttatgtatttccttcttcaaattttgcttcattaaaaattataaaattttcaacatattgggagtacaaaattctatgtgcttatttaaataagcttttttctgtttatcaataaatgtagatatgtatattataaaaatattaagaaaatagagaaaacttataaagaagatttaaaaatcacccagaatcctttatcccagggataatttttaaccttcatttatatttacttactttttttattggattcatatcataattatttttaagtgtacctaatacaggcattgtcacaggttatggatgagagaagagttaataaaaaaactaatgactcaagtcattcagtttgagtttcaaagatgtgaaaaattatttctgaagttcctaagcaaaaaatgtctattatgttgtgatatgtaattcttccctttagagagaaagatgtactttttatttagtagttgtcatggaatattgtcccaaatgtgtttaaaatagttgagccactattagtaaagaaagaacaacactgctgttgtcttgggtgttcaactaaaatattgtgactgtgggttaaaaagtggctctaggtgagggacagagcaggaaaaagcacagtgtagtgaagcatttctgggtctccttttgcccttgggctgtggagtgtgccccactgcactcagtctagttagataactaatactggagctgggaaaccccaccagtcctatataytgtgacttccttatgctttgaattctaatttttactcattcttcatatgtcttttttttttgagacatggtcttgctctgtcacccagactggaatacagtggtgcgatcatggcttactgcagccttgacctcctgggcttaagcaatcctctcacctcagctaccttagcagctaggaccacagacacacaccaccatgcctgtctaatttttaattaatttatttatttttgtagagacagggtctcactatgttgcccaggctggtctcaaactcctggcctcaagtgatcttgccacttcacccatccccaagtgctgkggttataggcatgaggcaccatgcccaacctagagcaggtcttaagcctctttcctccgcttatggtggatagagttgtatcaccccaaaagttatgttcaaatcctggcgtctggtatatgtgaatgtgacctcatttagagatagggtctttgcagatgcagtcaaattaaggtgaggtcatactgaattaaattgggtcccaatctaatgattagtgaccttataggaagatggaaatttaggccaggcgtggtggctcacacctgtaatcccagctctttgggaggccgaggtgggtggatcacttgaggtcaagagttcgagaccagcctggccaacatggtgaaaccccatctctactaaaaatacaaaaattatctgggtgtggtggcacatgcctgtaatcccagctattcagtaggaggctgaggcattagaatcgcttgaatctgggaggtggagtttgcagtgagctgagatcacaccagtgcactccagcctgggtgacagtgagactctgtctcaaaaataaataaataaataaaaagaatatgggaatttggttacagagaagacacacaaggaatgccatgtaatgatggaggcagagattagagtaaaacttgtacatgccgtagmacgccaaggattgctggctaccaccagaagctaggaaaaggcaaggaagactcctcccctagagaccccagagggagggtgactctgccaacaccttgatttaagatctgcagcttctagaactgcaagagaatacatttctattgttttaagccacccagtatgtggtcatttgttactgtagccctgggaaactaacacacctctcaagaacacctatgttctgaactgtctcaagtttttttctgagctttcttaaatgcaaggataatttcttttaatacactgttttttctttaaaaatctatcaacattgctccttagtcttctcacatttagtgttacaggaagtatatagctatcgtgatttttgttctttttgtaagttccttattctatctgtatctagataagtgttatttcattgttttccctggaaaatgcggtaaactcttttgtcttactcatggtgtttttttctgtaaagcaagaaaatacatttgtgtgtgtgtgtgtgtgtgtgtgtgtgtgtgtgtgtacatctctttttacaaacattatttctgtaatacttggattgaatccctgttctgaaatttttatgtctatcatctctcctccagcttttcaatctttattattgctgtttttcccatctatatttgggagtatttctcaatttgttttttgcatctctgattttattttatggaatatcaattgttagtatcctagttcctttattatggctttctcttctgaagttgcagcattttaaccttccttacaattcttctctttcccttgtcccctctttaaaaaaaatcttatcctggtatcttttccttccagcctgttttctctttaaagatttcttttactgttgcaagaagctatgtgttcttgtgtgctactgaggatgccaggatttactgaaaattttttgtttctagtttttgggttattattattttttttttgagacagagtcttgccctgttgcccaggctggagcacagtgcagctcactgcagtctcaaactcttcggctcaagcaatcctcctgcctcaggctccttgagtagttgggactacaggggtgtgtcaccacacccatttaatttttattttttgtagagatggggttttgctttcttgcccagtctgatcttgaactcctgtcctcaagtgatcctcctgttttggcctcccaaagtactgggattacaggcatgagccacygtgccaggcctctaatttcttgaaatgtatcttttcctcactttttcttttccctgtttactcattctcaaatgagaggaaatctacctagaccttgtgtctgctgactgttggaatatgaagactgccttttagcctattatttaaacatatgtgctaatgaaatmattttctgagttttactgctagtaatcaatttcatgtacacatatgccagctcaactccttgttaccatataatgcaaatctgtttttctgagatggaacttcaacctgtatcactatctggcttcctgaaacwcataaaataataaatgaattactaaggtaaacataaatcgttttccatgattatttttgtatttacagtattttacaaaagatgattctctttgtcagaattccattgttagtcctctccacttcttagtagattgtgtaattttaagtactatttctaatggatgcaggacaagaagtgttcaggtgggatggtgagttcgggagggccagctgcctctcaggccagcaactatgtggtcgtgaacggttgctcactttggtttggagaatacagacagtgcaagagtgggaaaggctttttgtacctacttccaagtaagcagattactttccttccactgatgcaacacaaaccattcagtatacgtgttaactctcttccgttgaccttgtatttagtggagattgtttaaagattctggctgtattgtgtgtgggtccagatttttttttggcattgtgaagcttttttttttttaaatcttttgcattcatagatatttgagtgggtacgtgggagagatcgtgttgggtattaccagacaaatatcattttaatttggaagtctgacatttgttcctcatttctacttgtaggtttcctgttgacttgtaatttagggcagtatcctcttttgatcttattttctttagctctaaatgggatttcaaatttaaatgtgctttggttagcagattaacataaacgtttattaattcagatratttactaatattttatttgttaatataagagaaaattatttctcttgtattcctgaatgaatttttttctttcatttgtttgatggactcagtacttaaaattttttactttctcttctatttgtatattttcctctctcatccccaggcatattttatttaaaaaccttgagtcagagaaagagttacacggacttatttggggatttgagctgatagccacccatagttcacccagctgaactgccttcctaggaacacgatgaaatggattctcaattctgatgtttcttcactaaggtctccagcatgatactagtttccagtgtgttggtagggtagacctgctcagcccatagctaattgatatgatggaaagaggtcaatgattttgagttggaaacacagctgtatgtcaggataattacagagaaacctgttgccttgctattacctttttaaaaaaaatattttaattgtagtaaaaaacataaaatttaccatcttaaccatttttaattgtacggttcagtagtgttaactatattcacattagtgttaccttttattgcctttacctttgaaagctttttgtcctactcagaagagctgaggctttgataattagcctgatgcacygtgaattgctaagagtccaacttttttcatggaaggaaccgaagacraaatgagagaataaaagcagagaggagggaagaggaatacagcttagattagaaatggtccctacagcagcattattagtaaatatctcattttctggattccaagaccctaagaagtataagattaggaaaaaaaagtaaaactaccttaaatgtacacatctatcataagataactgttgatttttggatatgtgaaaaaatgtgagcaaatgtgtaccttagaatctgagaaataccaggaagtctcccacatggtgatgagaagcagcaaatgttgtgtctgaggaggaagttggtgaccagagtagaacagtgccacagcacaggcatcaagaagggtcacaagccatctacccccaatagcctctgccatcctcatgctccagtcaacctttagctctctgtgcatctcgtatgtccagaatagctaatgctcatccattctagatagcagttttattttttctataaatgttatttttaactaagttgtttgattctctactattatggattgttgagagcccctgacagcctgacaaatgtaccctgtggaacatgtgcttagcagtgatgacagaatagccaacagaatgttacatatgtaaactactcagctttgtgttcactctgggcaaatgaacaacatatggacatttgaaatatatgtgtgttcaaaattctgtcatgtgaggttagttgtggaattcgatagtccattytgtatttgttccatgtgaaaagggccttataatggcatcaccagttgttcattaatctcctttcccttatgtaaagtctccttttgtcctccctctgccagtctgtaagttttatcatgacatttatacatggaayggattgttaccttttytgggaggagaataaaccataaatatgaacgaggcattaaaagagcttaacataaatcactaagaaaaatcygtagactgtgagaatataaaaatcgctgtgaattataaataatacagcaaggttatataaatcattttatgtaaaggcagacatatatttctacttctcacagtaaggcccagtgattttaatatcattggttggccagcgtctatagtaggaatataggcatggaatatagtagaaagttccatagtgaaaattctgggagatcattggtagcatggaacagtgatacttactttctgttggagattgcatttgctttatattgttatcaaagtatcaaaagaaatcttacattttctctctatatttgctcttggataatagcacgcagatctgtaatcatttaaagaatgaaaatgtgtattgaaaaatttaaacattttgttttaacttaattaaactgtcatttctctttaattagtaattaactttcagactacttttctagaaagtatccagagaatctccttaattgttttttttcctattgtatctactttaacaatattttctagagaaaattaatcataaacatataactttatgtaagtttgcataagcttatgcataccttttaagcatgtattaaagagagtrttctttttactaaagktatcgtctcttggttaattacttctgttttaataaacagattattctttgctgaagaaagttttccttataatatgtaactcttacacagttcagaattatatgttatatgttaagtgcataactttattgtgacagctagatgattttctttgtatataaaaaatgcttcattcatgtcactggaattaagtcacctctatacataatacaagagataaagaagaagtgtaagacacaatattgttcttagattgcttcctagttgagatcaaactaatrtaattttaacagcactggcatttcaagacaatttatgattaagttttaaattctgtgattcagattgcttttaattgtcaatcttaaagaaaattaaagacatgctactattacagtttcacccctactcacacataactagactgaaaacgttataaatattcagtttccagtagataaggaaatcttttccttaattcatttctgaaaggacatctttttcatactaaaagaaccttttgtttagtattatattttaaataatttctccaacactgctttcatttattttatttattttattttattgagacaaagtcttactgtgttgcccaggttggggtgcaatggtgtgatcttggctcactgcagccattgcctcctggcgaagcgattcttgtgcctcagcctcccaagtagctgggattacagttgtgcgccaccatgcctggctggtttttgtatttttaatagagatggggtttcgccatgttgtccatgcaggtctcatactcctggcctcaagtgatctgccctccttggcttcccaaagtgctgggattataggcgtgagccaccacgcctgaccactgccttcatttcttctgaggagtagctttgtttcttgttaggccaaagtttatgaaacaaaatttcttccttgctaataatagaacttatttctaagatggcaatatgtgattacagtagtcctcccttatccgtgtgggatatgtgccaggacccccagtggaggcctgaaactaaagatagtacagaaccactctatatactatgattaagttataggccagacacagtggcacctgtctgtaatcccagcactttgggatgccgaggcaggtggatcasttgagctctggagttcaagacaagcctgagcaacgtggtgaaaacctatctctacaaaaaatataaaaattagccatgyatcktggtcacagctacttgggaggctgaggcgggaggattgcttgagctggggaggttgaggctgcagtgagtcaagattttgccattgcactccagctgggcaacagagtgagaccctgtctccaaaaaatatatataaaataaataaaaagtttaagttataaattagagtgagaaattaacaacaataactaataatagaacaatgatagcaatatactgtagtgaaagttatgtgagttatactctttcttaagatatttgaggaaggggtgaagtgggccagtacaagatttcatcacattactcagagcagcatgcaattaaaaacttattaattatttctgtaatttttcatttaatttttttgaactgtggttgactatgggtgactaaaaccgtggaaagcaaaaccatgggcccaggggttaggggaggtggggatgggactgctgtattatttagtagtattattttcttatcaaattttatctgacaaagtttaggaataccaccatctagattttaatcgtagattttcagttaaaatgtcatggttgatatatgagacaaaataagtttattttctagatttgttacttgtagaacctgtttattatagagagttctaggcttctttgaaagctgttctagagttgataaatctgaaaattcaagtggtaggatgaaccaatatcatggataaagctgagctaatggttgtccaatgaataagtgctgactagagctttaaaactgcatatataatatgcataattggcagtccatagatttatgggttttaagttactgctattttgacttaaagattgaacgatctatctgtagtgctagtgatgtttcaaacatcaaaagtaacagaacttcttgcaacataagcagtgcaactcttgccatgtctattgtatcccaaatcatacacctttattatttattaactgagaattattgcaataggtttaccctctgagaaaataaattataaggaataaattatgtgagctgtttgtctccttccaccttggaataagccagaatgtctttggttgatatgcttcattctgtaatcaatatacgtgtattctgcttttattcatggaggctattttgtaaagataagtacatttttatcagttgaaggtaaatgcaaaggaggtgaaagcacctctattccagccattrtcattatccattatcattaatgatcctaatttcttcttgcaagttactgtgactgaatcctagaatcactgtatttatagggatcaccagattctagagaggtcaccatgtggctggaaaatatttgggttttagttttatgtgcccagaagaaagaatggctgcaccaaggtcaacaaaatgggcaataattatatctccactgtgtgaaagtgccacagtatcaggaatcgtaaactttgttgcctttatggagcacactaccataattcacattcatgcgatcatatcattgaattggcttaggagggagaaaacttgagatggaactcccctggtattttggtaaataacagtaagccacattctgtactatctaatcaatgtctgatatgagaaaacttaggaaacatcatgaattgaactctgcaaactcccctgaatggtgtggataatcatcttgaacttgaaggcaggtgtaccttcccaagttctctgagctcatttttgggctgcagctcctgccagtatggaatcaggtatcacagagcccaggatgaaggacatgataggtggtttggagaattgagtcactccacagatcacctaggtgacgaagatacttgtggtgtgtagcacacagaaagcactcataaatgctgtttaagctaataaaggaaattacaggaataggccatagaatttgaagaacacagataacacttcaggataattttatttgcaggattatttgtataagccagcagagaaactaaatgtagttcaatggaatggaagaccactgaagaacactgagagctccttcagagcataaactatcttaatcatcttttcgtgggcaatacctaacatagtgccctgcattcaataaatgctcgtcgaatgaacagaaactttagtgaaacgttaatatttgtgttgggccttgaaaggtggttgaatttgatttagtgaagggaaatgacatggcttttcagaatagtaggactcaatgaataaaggcacagatgttggaatgagcttacttaattttgtgagacacaggagaggtcagtctgatgagaggcccgtggtgtatgttgtggtggtaatggttgataagaggttgttattgattgaacacacacaaaaagactcagtgcaagcttctttggggaaatacaaagggatgagacatttttgtactgagaaattctgtctcacagactagtctcataactcctgatcaatagccttactataggctgttgatcttgaaagggcaccagcaagaagcaagtgcagtatatagctcagcacacccatcttccttaggtagctcgccatattgagtgggatcattttctcaattaggttgcgtatcaaaatttaatacttgttggattgaatcagatttaaaactctgaaatgctattcttaggaagagggaacctttctccttagagttggtgtatcccattatccttgagaggcaaccagggactctgccggaaggacttcacaatctggcagagacattttctgaaaataatgatttaaaaattcttcccttctctgcttcctcttcttttttcacctttaattgaataaccattatattgtattactttttcacttatggatttctttaaaccttaggtattttggttagttctgtggccaaatttaatcatcatagtacagtagtaggtatagcttcagtaataatgctaacaatgtatgcttttcttctaaagtgtgctgttggtacttgaatttagcagacaccgaatttttctcagacttttagaagaaataaaagaaggaagaattagaagtataatcagagaccaatagtggggttgacagaaggggtgtttttcttaataaatgtatacctaaagaaaagttatttttactggctagatatcacactacaaatattttctgactttgagttctgtagttattttgtctagaccactacgcagctattcatctcattcattattgcacttattggttgttttacctagctcctctgaagctggagaatctgagattaagtattagagctggaataaggacctgactctgggggttgggattgtcatttatcctattgcaggatgcaagccctcgcaaattttgtgaagtgcactccaaagacatggttttgctttcaactgtgatgacactataattgatcaagtatattctttcaaagaatcataaattcttattggagtttgaggagatgtcatattcatttgtcaacatgtcactccagggacacaggtgcagcaaatttatggaggaagcaccttgtgtttctcctgagtcacataaatatgaagcagaattgattgaaaacgtgtggttttagattactcctcaggtggagagcaattaagatctctctgtaaaggcatttcactctgcttctcaggttttcttgtagcataggcagagatcaggtctgaggggacaccagagaaatttttgaagacctgatggtgtcttctcagaaaagaatactaagacatttctctggcagagagaatattgcacatttttagtcaagtgcatgattaactttgacatttggaaatggaacttcacgtaaaaataagcatggtacttctgcatgtttaattaagatgtttagttcttgtcaaggctgatagccctccctcccacccccacacccccgccctgtgaagggcaatatattctcaacttctgaaatttcagaaacctgtacttaacctttaattgtcactccatttacatggaaatctgattaacaacttttaaagttcatgagctcctggtaaatgcaattaagacctttttggagtttgttattaagagctggcatttaaagaagactaggccctggctactgttgctgtcttctctgtagcaggatgtcttaagcaattagcagagaacatgaggtacatgaattgtatggtattgcttctgcgttaacatggttggtatttaaatagcatgctgtcttttttcttttctgtggcttgctttatggtgtgagcttgttactgaatggtagggtagagctgagaataattaggtagagctgtggtggttttcataagtaccgagttaggcacagttcctcatcccattggatgttctctagttatgtttacaaatgctcactctcatgtcatatggagtcaaggctaatcctactgtgatgaatttattgtatccatctcctggctgtggttgtctttttgagagttaaaattaaaagatgtagttattggagagaaatgatccaggtatacaattaatttctgatatcaggcatgtgagctgttcagccattgcccttgcctcatgggggcagaagtgggggtgaagtttgttggggcagacatgcgtagtataatttacaaactgagatgtgctgtgataaatggaaaatggggagtaaatagttgaaagacaggatcttatcggatcatatgctgccaatcatacagtgtgattttcatttactgatagaattgggctgtttgatggatgtatataatgcatttcttcggtactttatgtatgcaggacactgtgcttattagaaattgaggaatgatgagaaaaataatgaaatgataaatcaacagacatatcatttaaatacattgcatatgattgtgctattaaagtatacttgaatctacatatttctgtcctctttgaaatttttatgagtatatattgcttttaaataaaagatcaaaataaagaattatttgggaaaaaagaaataggaaagccaatgcaaaagaattaaattggatgccagaaataccagtgaaatagttctccatttttgtacactagagcagtggtccccaaccttttttggcatcagggaccagtttcatggaagagagtttttccatgtatggagggtggctggtgatggttttggaatgaaactgttccacctcacatcatcagatattagttagattctcgtaaggagcacacgacctagatccctcgcatgtgcagttcacagtagggttcacactcctgtgaaaatctaatgctgctgacgggaggtggagctcaggtgataatgcttgctcccctgccgctcacctgctgtgtggcctggttcctaacaggccatgggctggtgctggtaacaggccacagaccagtaactctagtgcacaggaacccttgcgctagaattttcatatttactgtaaacttacttaaaccagcagtgcagttcatttgattaaccttttaaattttaggctatcctcaagtgtagtgcgtaaataaaatagtttaattccatgttttgaattaacacataacattcagtataagtaatgtataataatcaaatacctattgtagatgtggaaatttttttttggcaacaaaactgataaaatagtattactttttgtttaaccaagctgtcgacaggtatttttcattagtttagtagcttgctcaagggacacacacacccacccacacacacaccatcaccttcagacagaagaattttccttatttcatagacagaatcttgtagatgcaagagttggcgaagtcaagaaattggtgatattaagttgttctttcagtcataaagcattttaataagatacttcagtggaaatatcattagacatgaattttgtctaatacatgctggtattagataaaatgccttctgctcaagtcgtgttgggaggtgaagagagaaatacaggaaaagttaaatatccagcagtgtatgattaattgccaagtccaaataatcatctgtgggtcctctaggaatttaaaagataactttagatagattggtcagagaaggttttgcgcatgggttagaggctgaactggtccttgaaagaaggctagaatttaggtattttggaaagatcattttagatagggataatatgcatatattcagaacagtgagcaccttactgaatttaaccacattctgaggaggctgcgatgaattcggttgagatgttctttgtggactccttaaagaacagaaccactgtatttgtctctgcattctggtgccttgtactctcagtgcttccaaacccccttatctcctggtctttacaatgttccccttaaattccaatgagaaggtatgtaacacagttcctggcacttagtaattacaaagtaaatgctggttgaatctgaatttgcaattgttatctctaaaaattctattttgaatgaactataggcaaatatttttttataagtgtgacaatatttacatattacagataaacaatataaaatcatctttagtaactgaactgctaattgaaaatgctgggtcttagccacttaattgagtaaactgtctccagagagtaatttgggtcttttccaagatgcattaactctttcaggtcgttagggtggcacttatctcattggagcagaaatgtaataaatggtattcctataatgtaagtaaattaatgtacctcaaaaagcctgaagtttcaccatgggtgttgtagttgtactccaaggagctcatctgtgaatgtgaaacagcaataagtagctgctgtttggagcatcttactttcaatttaggtaacttaagacattgtgcctagatgttgacagagatacaaagaaaagacctggctgacaggcggcagagaaggcaaataactgctaaatgaaatycttgagagatacaaactgctgtatgggttttaattagagtgagatatcatagttgacagtcgagatagatggtaatctcccagaagacaggcatcatggcttttttacacaatatgcttattcatgtttattctcagtatatagacatgtataagtataaatattaatatgaacaaatatatttgtaaatatgagttgaataaattgtaaacatattttacaattttcatatgtgtgctttttttccttgtgagaatatgaaatattaatgtctggcattgatctaaagtgactatagtaagtaggtggaaaccagaaaaaacacacggcatcttttagagatatatgctactcacaggttccctgtaacctcaacttgagtgtcagcctactggtgggggatattgacckttagctagaaaagaatataagaatgatttattctacccaccagcatgttacagatttacatctgatgggaagatagaggcacatagttgtcatcgtaagaccaaggggaagtgacataaaaagaccaatgcaaaaagaactttcaaaagaagaaggtagagataacagctccatgagaagataaaacttcaaagctataagcccctccctctgtttcctcatgcatggggttggcttcatctccatgcatgtaactctgattagtaacatctgaatggaggaaaagtagtttgctaagatccattaaagtctacttagattcactttcttgatctcataccccaagctttaaaaaaattttttatatttttccctggtacctgatgtacagctaacattccccatacttgataaatggaagagtagttaatggcaggaaaaaaaattagataaatttagacatgatggaaagcctttgggagttatttaagaaacaggaaataaaactttagtttaatcaactggtaatgatataaaaagaaccaataggaactcatcctatagaggttgattggggctgtgttgtgagaggcgctgaataataataagatagaggtttatttattttgaaggcatggaggaagccattgaaggacttgtcagaggaatgaaaacattgggtttaatctggtagcaggttgtgggatagactgtcatgagatgcatgtggcaggatatggccggtgggagactgttttaataacctgcatgaaagataatgaggacctgatttagaaagatgagtatgggaatgaaaatatttagaagagggactggacatgaagtgtgtagtattaaatctataggatttggcaggtgatttggagaacaagactgagaagagccacaactaactacacattttgatcccaggtgatcagaagaatgatgacattaaggagctcccccgctttggtgcccttcctccctttgaggagaggtggtaatrgagagtttacctggtcagtctgagtttgttggacccatgttttagcatttcctaaacatctgctgcattgttttgacctgcttactgtgatatggatgtgagaacccagacattcttacaagcaatggcagtgtatctttggagcttgagagaaagtatgatgtaagagggataattgggaatcattcaaaatgtagaaataataaaaatggaagagagcaggagcaagggttaggatattttacttcctaattgcattttacagcctaactactaatacttaagtaatagtcttaagtattagtgttagttcttacagcctaactactaatactcaagtagttaggttgtaaaatacagtaatcaaactcattgaagtgaaagaaaacattccaaaagtttagagaatgagtattagcagaagcctggatttagtaattgagatctttattgtagcgcaaaggggaagaaggaagaaggagaagaatgataactttgaggagatgatgaagatatacagataatttcatttacccattcattcactcacttacacttataaagtgattgctgtgcttcaggcagtgttctaagtggaatactcatttgaccctgatgatagtactagcaaatagataatattatttctgttttacagatgaaggaactgaggttctgaggcacagagaggtaatatcatagatatatacttactggaatatattagaaaagaaacagatttctgagccttatcctgatagataataatagtctgttatgtactaagcattttgtatgcgttattaaaaaaattctcatttaattctatgaagtagttctttttctgtttccaacttttaagttcaagggtacatttgcaggatgtgcaggtttgttacataggtaaacgtgtgcttctatgaagtagttctattattatcttttattattatttttgtttcacagatgagggaagtgaggcttagaaagattaagtaacttgaccaaggtcacataactagtaagtagtagagttgatttcaagcacagactttctgcgtttttatatgactctctcattttgtagttctaaggcaggcacatgaatttctattttaaaggagttctccaagtgattcctatgtgcagaccagtcttcccagaatcttagcacaaactgagaaggaagaggtctgtatttttttggaggagataaaacattgtggacagagagaactcagagttggtgaccttatagatggagtatttcctaaggacacagaatcctaaagaatagtagagtggaggttatcggaatcaaggagactgagaaagactctgtgatgatagaaggagtcagtatattatgatgaaacatactagtcttaaaacagagtaaaattgtgttagttaattagttaattacagaattaattaacacaaccagtagctgaagttttttttktttgttkgttkggttkgttttttttttttttttttttttttttttggagttagggtctcactctgtcacccagactggagtgcagtagtgcagtcatagctcactgtagtctcgaactcctgggctcaagggatcttcctaggtcagcctcccaagaggctgggactacaggcacatgcatgcctggctaatttttaatttttttttggtagagacacggcctcactgctgttacccaggctggtcttgaattcctggcctcaagcaatcctcccrccttggcctcacaaagtgttaggattataggcatgtgccactgcacccagcctgaagtttttgtaatggtgtaagataattctagagtttggtagtcaaagttgaaaagaaaaggggagaaagcaatgtaaataggtagaatgaactttaaaatatgtttaaatgaaatggacagagaatatattgaagctatagttaggaatatacttttggatgttgagaccatttttgtgccatcccctagcattgtctcttttatttgtctttgttttttaagagtgaaagtagaaataacaaactatcagaataccatgagatccaaaatacatggaggaaaaattgactgaaaggagtagtggaaaattcagtgattatggttggtgattttttaaataatgaatacccttttttgataattaatagaacaactagaagaaaatacagagaagacttgagcaacactattaaccaccctgatttaaactgacatgtatggtacactcaacaccatcagaattcagatgatctcaaggtcatatagaatattctccatgtgagtctatatgctagatcatcaagtaagtctcaatacatttaaaagaattgaaatcacayaaagtatatcctctgaccgcaacagaattaaacaaaaaaagggaagaaatttggaggtccccaaatatttggaaataagacaacaaacttctgaatataccatgggtaacagaagaaagacctaaataatcatatgttttcatcccaagagctagaaaaaggagaaaactcggccgggggcagtggctcacacctgyaatcccagcactttgggaggctgaggtgggtggatcaccagaggtcaggagttgaagatcagcctggccaccatggtgaaaccctgtccctactaaaaatacaaaaaattagctgggcttggtggtgggcgtctgtaatcccaactactcaggaggttgaggcaggagaatcacttgaacccaggaagtggaggttgcagtgagctgagatcatgccattgtactccagcctgggcaacaagagtgaaattctgtctaaaaaaaaaaaatggagaaaactcaaagccaaagcaagcagaggttaggaaataataaaggtaaagtgataatcaatgaaataaaaatcaggataactgtaggaaaaaaaagtggaaccaaatagaggtcttttgaaaagatcaaaaattgatatatctttaagtagaccaaccaattaaaaaagagaagtctaaagaataccaaaagagagaagtctaaagaataccaaaatcaggaaatgaaagaggagatataactacaggctctacagaaattaaaaggattctgagactactatgatatgccaatcagacgatgtagatgaaacagaccaatttctacaaagacacaaagtaccaaaactgactcaagaagaaacagaaaatctgaattgtcctataacaaataaattagtaattaaaaattttcctgcacatacataattcacacaaatattctgtcaaacatttaaagatgaaataataccagtcctttgcaaactctttcagaaaatagagaaacagtttccaatgcatcctactaggccagtattaccctgataacaaagccaaagtattatagaaaactgtagagcagccttacaaacataagtgtaataatgttgaacaaaatattagcaaattgaatgtatcgacatataaactgtattataccatgattcattgggatttattttaaaagtcaatgtattaccataaaataaagaaccaaagtcacataatcatctcaatagatatagaaaagcacttgacctccattgattatttatcaaaaaaggaaacatactcaacctaataaaaggcacttgtgagaaacccgcaactagcatcatcaaggaactttttgacctaatgcaaatttattaatttatagatcatggaaataccatcaatcttaacctattcacattatgtatttcaagttcacgggcgtatattccaaacaaaatttattgtcgccatgtgctatgaaacccatttttcatgcattcttaattattgtttatagaaccataatttttaaaatccctcaaatgagcaatcttttagccattgcttttatttctccttttttttttttttgcagaatgactgattaaattttgttcattttatcttctctgcattgactcttaaatttgtcctaattgtataatcttattgccactgctttagtttaaaaccttttaattttttaaattgagctgtcttggtcggttgtctcttcttgctctccttcctttataggattttcctgatcattcatttttgcccctaatcccatttccttccagtcaataattttgtatactgtcagatcaatttacatacagcatatttatcaccatttcatttgcctgtttaaaactctttttcattgcctcattttgtatttggcttcagttcgtaatttgtcattacagattcttttttttttttttttttaagattcttggaagtttgtcagtgtactccctttccaggcttacctcttgttggtcattttaatgtcgcctgaaatattcgttatttactgaagatgccctaaattttcccatcactatgtatttgcttgttctgttctgtgccttcatttttttttgtttgtttgtttgttttcacacattctaagattcaatttatgtccttctatagttccatgatcttgaaggctttttttgttgccctagttaggagccatcttgtcctcctataaatgctcttagccatatttttgtcctgatgttttaccactttctcctttgtattgtactcattcatgtgtgtctcaattaatagataaatacactgagggaaggacttatttttgagtcctggttttatatctagcacaatactttgcatattttctgtgttaaataaatatataatttaaaatgaatgaaaacatttggaagctattaaactgggctttctttgctaagagctattctcttgagaaaaagaaaaaaaatcatgagtagttygatcagatgttcgatacaggaccaaaaatacatgtgtactcttggaagtttttgatttgttttattctgaacaataatgaaccattcacaagaccatagcgttagtggttttaattgtgcaactgccattgacaatgagtataattgagcaggcatctgctttattttcaaaatgaagaatttttcctttcctttccttactgcagaatattttagrttttatacaayggggaaattagactgctctattgaaaaaaataactttttctgttattttttctgttattaacattctattcatagtagctctatgaggaaaactcgataagtttttgtaatttaaaatggacattctaatttaaaaatatcattatattatttcagtctcttggctgtaatgttttcaggaatcaaggttataatttggtgggtatattaccctgattttgtctcctgcgcttttcaaattcctttgagacatcctccatygggtaagactatactttctgcttgggctcttcccttgctccatgaaaaccgggaggcgccttctgggagaaagccagaggaattcgcctactgtgctccgttgtttcttccagggatcatagctgtcagtttctgctgaatttgattcccctctagggtcttcaaattcttattttttagtattttttttggcttttacagttatcagcataaggaccagttaaatgagaactgatttgctgtacccagaatacaaactcttgggcacttgcattttaaaagagcaagttattgaaaattccattatttaatataggcacatttaaaatattgcccaagagaagttgagtcttagttcatgttgagagcttgagacaattttttcatgttactatttctcatgtcatgagaagcagtctattatcagactcatcaaagaggaccaatatactatggcttaatgtaaatcactgaatacgtgaagttagtagtcaagaaaattggggcaggacgcagtggctcacgcctgtaatcccagcactttgggaggctgaggcaggtggatcacgaggtcaggagatcgagaccatcctggctaacacggtgaaaccccatctctactaaaaatacaaaaattagcctggtgtggtggcatgcacctgtaatccctgccactcgggagagtgaggcaggagaatcgcttgaacctgggaggtggcggatgcagtgagccgagatcgtgccactgcactccagcctggatgacagagtgagactccatcttaaaaataaataaataaatgaaagaaagaaaaaaacaaaaaggaaaattgggttcatagttgtacagaatgaaatttgtgcaaaccactactcctgtttttatgagatgccagtattttgcaaagacagtaattttggtataaatgtcaatagattcatattagtatatactcatcaatccataggtatcttagtgaaggaacaaatactcatttaagctattataaggaagatatattagatactataaagacataytgcaaactcatagggtagaaaatctttgaccytatcagcaactggatgtgagacctataacactatggaaaacatttaaagtttgcagtgttcaagtctgtctcctctgggtttcctatttctctctctggccagctagttcattctttattctccctctgcggattgacttctttgatttttctatctgtaaaaggtggttgccccaaagaatttacatctcctcctttacatggccagtagagaatgtattccccaacacattcctgagaaagataattaactggctaattaggggttggttgtctccctggtgaacattttggctgtggctgagagggtggaatcacaggttataagcatggctaccagagtccactatgtggttggggaatagttcttagatgaggagagggttttgtaagctgaaaagttgcctgaaagggatctaccacatcaaatacctcagagatctgagtgtttaattgagtagctgggataaatggagaagctaaagacagaagatgtgttaattctaagcctatgactctcatatttatttaaaaaaaacctctgcatgtataaccacaaacagttataggcaaaaggttaaaggagattaaatggtaaatgaggaattaattcagaatgatgttaccaatgttagcaagttataaatctcaaaatttttgtcctgctttaataccgtgagattgctaagtaacatcttaggaactactaatcaaatatagcagaagagatgcctaaccaacctagtttatatgttctttaaaacactctgtatctttattttgaccacagagccattcaacgtaataggtcctcagaaaaaaacagtgaatgatgatatcactggaatatgtagacttccaagtgctttccaactgttttgttgttgttgttgtttcttgcctttagtttttacagattataccttttaagttgacacacccatcaattttsactattatttttggggctcttgatgaacaacaaatagaaattcatggtacttaaaaatagtaaagagattagtatctaagatatgaaggaattgagagccaacaagaatgtgggatcctgcacattttctgtagacagaatgtatttgatattgtaagtaatgctctttgttccagaatttcaatcttgggtgattttcttcacgcaaatgttaatcagaatagcttgtttacttttatgaaaattaaaatttgaacccataggtgtgtgcttagaatatatacaatttggaaggtgcagtacattatccaccatgatgtggaatcatcaataamttatatagttatattttaatactaggcatctgatgtttgtgtcaagactgtgtagtagaagatttagcccaattcaaataaatttcaggtatcctagaaataaaggcttttttgttctttgagatactaaaaaattctggccgggygtgctggctcacacctgtaattctagcacattgggaggctgaggcaggcagataacctgagatcaggagttcaagaccagcctggccaacatggtgaaacccagtctctactacaaatacaaaaattagctgggcgtggtggcaggtgcctgtaatccctgctactcgggaggctgaggcaggagaatcgcttgaacctgggaggtggaggttgcagtgagccaagatcgtgccattgcactccagcctgggttacaagagcaagacttcrtctcaaaaaaaaaaaaaaaatccctttactaatttgaatatcaaaataaaactttacctaaatttaaaatagtattttccagctggtgatgaatggtattagacaagagaggcaaacaatgaagcaaacaaacacaaattgcaaacatttagcctgtggttaaaaattacacccatcctttttcttttaaattttatttgtattgtagatttttgtactgaggattaatttacagagttcattctactttgaagactttttaatttgcatataacaacatattcattaaagcttctttatgctttttttaaaaagttcagcaatttgttgtatttttttgatttgctggtctgttgcatggccctatggtggaagtaaagaaatgtaatgctttaaggaacatataaattgggggtagtaagatgtctttattattaaataaggactaataatatcaggcagtttttgatgaatacttattgaatgatgtagaaaatgggtgttttaggagttcaggaaagggtatagccaactagagtggcctggcaagggctccttgaagaaaaaacactggaattattcttggaagtatttgttggtatttatttaggagagaaggtaatccagattaggccttctagaaatgagaatgcccacatatattcagggaagagttaagtaattttgattgcagtgttgggtttacgtttgagagaataagatacgcttggaaatatgtactaaagtcagaatgttgtagatgatgaaaggagtagccttctgatgatagcagcagtgttttaggactgtcagtctgttgatattacgtgagaaggactggaagggaaagagatgagaggcagaaaattaaatgaaaactacatgaattgaactaagttggtggctgtcaaaatggacaggagtgggcaaactaatagggagttgaggaacagtcattaatgatcttgaggactaattcccttatggacacaaaggatgtggaaatgtatcaaaagatggttctgaagttttaaacctggaaagtagtgaaaataagaaactaccaacaaacaaaaaggagacagaaggaattaatgtttttatgggaagatgatttaggtttcagaggagttggttttcttagtgaaatatgtgaatatatatcaagcatgcagtcacagatgtgggactggagctcaggagagaaatgaggaataaatcacattgtgataaagggaacagtagatgtaaaggctactttttaaagtttgggactcaaagacagaaggaaaataagattacagataaagcataaggaccaatgcaagatttttgttgagaaagtaggaaaagtgtgtgtttgcagattgaaaggagaagtgggtggataggaatagactaacaatgctgagaggtaacaattaaggggactttactgatgataaggggactttactgatgatgagaaaaagaaaaatgatcttaaaatacctgtgttttgaggtcagtattttattatacaaggccccagtcattggattctagaacagcaagtgcctcaaaagagttacttggattagtgtattttcatgctttggtagaaacatcactctgtcatgttgatgttaaccatctgaaatatgagtgaaacaatgcatttatatacatctttctgtgttatattaatttgaaattcttttctggtttaccagtctttttttgatcacaaattgctgaaaatcttattagcagcagtgccaaatatacagtataatttagtccctgagttgagttgttactagagacccaactcaatattctccctgatcattgggtagtttgggtgatgtattaacagagctagtacttatcattatattatttcatccacataccgaataatactctagtggcttcataaataaataaaaaatatttaccagtctgttgacatgttttgtattttccaagtgcaatccttattggacagaaaattaaataaagtacatttactgccacctatagacctgtgcttatttgggtgctctggtgtcaggtgcatatatatttactattgttgtattctcttgcagtattgacccctttattaatgaccttttttgtctttttgtacagtttttgacttaaagtctattttgtctggtatyggtatagcaaatcctactctgtwgtgttttccatttgtatggaatatctttttccatatctttacttttagtcagtgtgtctttataggcgaagtgagtttcttgaatgcaccaatattactgggtcttgttttttttttttaaaacggagcctcactctgtcgcccaggctggagtgcagaggcgcgatctctgctcactgcaagctccgcctcctgggttcacaccatcctcctgcctcagcctcctgagtagctgggactacaggcaccaaccaccatgcccggctaattttttgtatttttagtagagacagggtttcactgtgttagccaggatgctctcgatctcctgacctcgtgatctgcctgcctcsgcctcctaaagtcccaaagtgctgggattacaggtgtgagccactgcgcctggcctgggtcttgttttttaattcattcagctactgtgtgtgtttaatcagggaatttagttcacttacattgtgttattattgataggtaaggacttactgctggcattttgttacttgttttctagttgttttataactcttccttcttattatctttctttgtggttacatgatctctctggtagcatgttttaatttgctgccttttgtttttagtgtatctattatgggtttttgccttgtgataattcttagattttaaattggattgattttataagtagaacctattggcagtagtagattttttaactttttaatttttttgagacggagtctcaccctgttgcccaggctggagtgcagtggcatgatctcggctcactgcaacctctggttcaagtgattcttgtgcctcagcctctcaagtagctgggactacaggtgtgcaccatcatgcccagccaattttttttttttttttaaagtagagatgagctttcactatgttggtcaggctggtcttgaacttctggcctcaagtgatcctcctacctcagcctcccaaagtgctgggattacaggcatgagccactgtgcctagctagtagttgattttttaaaaagcagctgcttttcttgtgttgaagctctcaatatgagtagtggctatggaaattctttgyaggtcaggacttcgtagcttcctgtggcctttctatatctctttttgcaggtttgttttagtatttatccactatgtgtaatagtgagtggtaacagcatgcactccctagtacactagggatcactttacaggtcktgaacctctgtaagccccatttctttatctataatctgtgaatttatctgataaaattttgtgctttaaaagagataatacattttacatggattagcatgttgcctgcatcatagtaagccctcagtaaatgttatggcattgctgctaatgctgctgtagtttggaatatgaggattaaattgtgattaaagaggaatgttgattaactcactcagcacaatatctagcacatagtagatacccaataaaaacgttccttttactcccatgttcaaatgcccaccccgcctcttccccatgaataggaacaagtagatgacttactagctataatgaatcttttcttagatccccaacttggaaaatgaatgaccaggttaatatactcctgaatgttggttttagaattagatttgcatggttttaaartagtttttcttaattgcacattaaaaatgtgtatattaacattaactgatttatctggttgtacagatgctattaactgagtacttggatatgaaaaatactcgtacggcctctgaaccatcagctcaactaagctatgccagcactggacgagagtttgcagccttttttgccaagaagaaacctcaaaggccaaaaaattctcttttcaagtaagtattattctgctgttaataggttttaagaattgttagactgaagtaagatgacttcctactttattaatagccataactttgtctagcttaagttgattgaagtaatttagaggaagtgaatatatgttgagttttatttatttttgttttctgtcaggtgaagtggttgttttgggtacagttactggactacctggaactcctaataaaaatttcttgaacttgtttcaggggagttttatttaaaattaagagaaatgaaactccccaattgtttctggggaattttatatgaaatgaaaggaaatgaaatatattagccttgaaaaggccccaagagccaagaaacaacctttgttaataaagttatgcaaatgtttctagctaagcagtattgggccttatgtggttacttgtttaataaaagaacaatctgggtttttttttatctaattataaccttagttaactccatgaacccatgtgcccaaagtgtatatctcttggcaacagctaatagttaataatattgataataacttcaatagtaacaacaggtaccactgattaagtgtttcctaggtatcaggcactgtactgggtgagtttcccaaaataatctcagttaaacatactttaaatttgagtatactaaattttagcagcagcagtagtagctaacgtttattgagttcttactaagtgctaatcaaggcattaaattattctcatagcttattttatttactaattacaacaaccttataggcaagggttgtatttttaatacttttgtacatataaaaaaatagagacatgaaaggttaagtaatttacagaaggtctcatagctagcatgtggtagaaggaggatttaaatcctggcagtcttactttagatctgttttcttttgaggatttagtagatatttaagaagttgtgtctgtaaatataagcatgtaaagtgaccaccactgaagtatcccagtatattgaatttattctttttcagcagttggagatctaatatcttctgttgattcacatttgaggcttgtttttatcttagatttttagtgtttttaataattaaagcttcaacagtttatttattttgtgatctagcagagaggagatttatttagtatatccctgccagaaatgaaatctattctgtttattgaatgcattcctttttaaacagttttattcagagagtggatgcaatatcagttacaatgctttaggctgcaagtaacataaaactttaaatacaatagattgaactataggaaagttactatctcacgtaacaaggatgaatgtggaggtttccttaattcaactgtacaatatcataaaggactcagccctttccatctctctgcattgccatcctcaacacattagtaatgttttctattrcgatcacgaggtgtatccatcagttccagtccagtaaagacagtgtgggcaagaaaattgcatgtgattcttctccctgtgaatctctctctttaaaaaacatatagactttattttttagaacagttttaggtttatagaaaagtagagcaggaagtacagagagttcctttatattccccgcttctctgcattttaccctatttaacatcttgtattagygtctgtttgttagaattgatgaaccagtattgagatgtcattattaactaaattccatagtttacattagagttcactctttgtgttgtacagttctaatgggttttgacaaggcataagttcccaccattacagtgtcatacagaacagtttcactgctctaaacatcttccattcaccacatattcatccctccaccctccctaacccctggcaacctctgatcttttgactatctccataagttttgctttttccagaatgttgtatagtcagaatcagtgtgtagccttttcagaatggcttctttcacttagcaatatgcatttatctttcttccacatctttttgtggcttgataggtgtctctttgtattgctgagtaacattcctttgtgtggatatgccatagcttgcttatttacctattgaaggacatcttgcttgcttccagcttctggcaatcacgaataaagctgctttaaacactcatatgcaggttttggtgtggacataaattttcaactcatttttgtaaatacctgggagcaacattactggatcattcagtgatactatgtttagcttcataagacactgtcaaactgtcttctaaagtggctgcaccattttaaatctttttaaattagtacttacgaattatcagtttattaatcatttctgctaatgacaaaactcttcagcaagttcctattaagctctaggattgggtcgtaagcccattcctaaactagtcactggcaaggggaagcagatctcagtggttgtcttaaactaggcaggtttctctctggtgctaggtttccagctggagaggaagccactttttctgagcacatggctgagtaaagagcaaggaagcagaatgcccagatggaatcagggctatgccagcaagcacaaagatagtagaaggaaaaggtagttggtagaggcaactgacactgtctcagatgcgcctaagcaggcccttttcttttctttttttttttttcttttctctatttctagctcaatttaaccttctaaatatggaatcattgcagaaaacaggctttagggtttaaagttcatgctctcaaccatcaccgctgactttcaacctcagtcagaccacatacacattttcaaacatttagccagtgcttctgaarttgtggtattggraaaaaaaaaaaaagaaattgttggaaatgaacaaattggcttaaataattattacacattttttattattgggcagtaatgaaacttatcacagacacagaattaggccgttattacagatttgtctgtttccagtcttggtgctatcattgagcccatgtgtgtctgagcaggtctcagtatctctggatataaactaaggaggtgagactcaatctctagtgcctcttttactgcaaaattatatcagtctgtgacttgttgcagacataaaaagaattcctgagtaccaaaaatacatcaagtcataaaggattaagattttgactgtttttatcacatctgtggaggactttattaccctctttaattacccttagctaaggttaattaagtctgtttaagtcctgccttattgtgctatgtgtgcctctctattctttgcttaagagtttatttattttttttctttgccgtatctgatcaatagctgtcagcatgctttttggaggtcagtggcttcttttctgcacttgactggcaggtggcatgtttgaagtactgcacactttgccttctttcyggctgttagtaccctcttagttcttggcagggtgcagagaggggatcamgtaacccaagtgtttccctcacagactgacattcatctcagtattcatgttccttgtcaaggaaaggataaagaaggcataattaagaaaatgatggtgtgcctgccttgttgccagaaacctatcccattagcactgttgctcgtactatgttgctgcttttaccccttagtggcagtcattcttagaaggattcctccatctggcaggttgttatcctgcctttgaaatctcagtttgaaatgggatctcttatcacatcaaaggatttactgtttgatatgtcataattttatctgttttttttcttacttgcacgtttatcttaagactgatttgtttttgttatttctttttgtagttattattttaggttttagaaacctgttctttatcatgagtctctccctccttctccctccttcaccagtgtttctaacctctgaaatagttcctgggtaggtgtgaacaaatattgcgtagcttggtatttttgagagtattttatattgtaggcagcacgtcaaaaaactagcagccatttagaaaagaaactgttttttaggccatttagggagagattatagctgccttgcttttctggtgctgttattcagccacatttctagtatgtcctttgtctagtcctctacctgtggaagttaggcatgagttctgctctgaggagccagtgtgtctgtgttggtagctggcagtcactggtgacttctgagctggatggtaacgtaattagaatgacttcataggatgctttcgttgctgcatgtataaggatcctggctaaaggctgatgggggtctgaaagcaaaaggaagttgggacagatcacagttgtaccagttgaaatgcagaataagcaaaagatccaaatacggttgtaaaggagccttagccaggaatatcgctcataaatcaaggtctgcggcagctggccctggccctgtcatggtatagccaaagtgtcttcatcacggaacatcggggagcaccacacagaccagagtagaataatgtggaatacagagctggtcagcacttaattggtttacacctgcttgtctgtttcccctgtgtttctctgcaggttcgaatcgtcctcccatgccatcagtatgagcgcctatctgcgagaacagagaagggagctctatagtcggagtggagaactgcaaggtgagtgattgagcttctctggaaaaattaattttctggaggagtatttcctttattacacatgagtttgtgtcctgcattcacacgatcctttcaaggtaacaaacacttagtgacttaataatttgtttcttctgtaatttcccagcatctgctgccaagcaggtaaaactattactgtggccataggacttgtagacctgctactgttcaagtgggaattcaaagcaaaaagagatgaggccaggctcgtcttgcttaaacagaagacctgagtccagtcacaatctaggagaatgttggtcttctgcgactgccactgttacttctaattgttgtttttgacaccttctagaatatgacaggagtacctgagatttgggaaagggaaaatgcaaccactgtcattatttaaagggaaaaagatgcctctaaatagtatgttataatcaatataactgtgatgaacaggctatttgatacccatgtatagttaccaaagagttgtaagctgaagaagaaaatatttagaaaataaattaaatataaataaatatattagactgataacatttccttctgtgacaaaaagatgctgatcatgtaaatgtaatgagttaagaaaggtttggaggtcaggtgtggtgactaacacctgtaatctcagcactttgggagactgaggcaggcagatcacttgagtccaggagttcaagaccagcctgggcgacatggcgaagccctgtctctataaaaaaatacaaaaattagttggacatggtggcacgtgcgtattcccagctactcaggaggctgaggtgagattgcttgagcctgagaggcagaggttgcagtgagctgagatcatgccactgcacttcagcctgtgtgacaaagtgagaccatgtctcaaaaaragraaaaaaaaaaaaaacaacaaaaccacattggtgagggcctgctaagtgtaagacatcttaggtgttggaagtagtggaagttgggtacaaagaaatataaagcttaaagatctagttatgaaagtaaagtatacatatgtgtgtgtgcatatatacatacacacacagagatacacacacacacacacgtcaataacaatatcaggaagtaaatactaacaactgagtgggtggtatggataaattgctagagaaattacaagaaaggagtgattacataaattgttttagaactctgggcttttctccatgagggatgggaacgaatacttttactgtctttgatgcgttgggctcacktagcattttgcagtgactggcctstgtaattaaatatttagtctttaagactcataattctgtaccaaaacactatgaagtaaccactcaacctttcttgatttaaagactattgccttgtcattcctaacttcacctttgttattaatagaataacctgtaagtttttccaaagatgctgctgtactctctcatatttatatcacagtaatagttctacagcccataaatgtggtcaccagaagtaaaagcctagaagtatgtttagggtattaggaagaggagattagcctaccaacattttatttaatatgaaagggttgtcatgcattctggaagacatgcaatgtgcatgtcgagagtcttgatgtagaggagtacagactgtcattagacctggaacaagtgaaaggacagaaaggagtgaaggaggagggtgactcatgctctagcaggctttctctgcctcccaggagaagaggctaggctgccaagagtgaaaggaaatgatgataacagaacatacattattgcaggaggtaggattgtgctcgaactgcccttagcaggctatctaaggctagtgtatcttccacactcacggtatcctaattttaatttctcttcagatttgccttaaggaatagtttaaatttgcctccatattttctctacacctgtcttctaatacacataaatttatttgatggtgacaaagcatctcctttcttctttttaggttgagtcctaattattttctttcttaaaaattaataaacactatctgttagagcagttataaggtcccagctaaattgagtggaaagaacagagttcctgtgtgcccttgtccccacacatgcccaccttcctccagtgtcgacatccgtcagcacagtgcagccttccatttgacccttctagtgaacaggcagagcatgtccctatggttacatagggaccgaggacctctcatcgctcactcacactcaagcataaatagtcaacaagggcacaggactagtggcagattctttatgcttgtatgagtgagaatggagagcactctgcagcagccgtgggaaggcttttcagtcctgccccagtggtccacgctctcttgagagacagtatagggtggcagtgcagagtaggtggctctgggcccaagtcacctccatttagatacctagctccccagcacttgctttgtaacctccagcaagttccatggtctctgtgcctctttttccttttctctaaatgggaataaaagtaacactccctactccatgaggtggttatgaaaattaggtgagttaagctaggaagtgtttcaaaaagtgtctgacatatagtgaatgctatgcctttcttcttctcctctatttctagtactgtggtgtgacttcagagtattcacacacattctgtttgtcctttctgtcatctttatatggctaagccctcctgagctttccaagttaaatttaggtatcgctcatttggatgggcttccctgttggtccctcctctctcagcctgtcacaaatacacacacattctggggttgtggcccctgctgtgtgttactgccacatctttaatgatgttcttctgagtactttccatactgcattgtggaacaatgctctcttgtttgagtttgccacgaaactataagctgcaagagcaaaatactattttatttcctgtgcttctcacagcacctggtacaataaatgtttgataaatactggttgacttagtgacagaatgaatgaggacagttaggatctaaaataggatagagagcaccatggagaggcaggaagggcctgaaaggaaccactttcagctttayagttttccattagtctttaagttgaaggcaaagtagagggtatacatatatggttttgtcctctgcagttataagctttattaaatagaaatattgcccttgagctctctggcccaggacaaaactactgtatgtaattgaaaaacattttaaaatctaagtgacagaggaattttactctgtgaggatggttaatggagaaatcactacaatctaactaggaattttcccatccttcaaaaagttaattgaaatatgggctttcaagcacaagtcgattgaacttaccagttttcagcaaggaatatttctggttacaacagaagaaaagtaatagttagcaaccacattatgttcctaataatcattaaaaatactttaggtgagctgacatattacacacttggtgagagaataaatcagtggaccagtttttgtaaaagtctgatggtgtttcattcaggaggaaaagtttctctgatgaatgcttttaacatttcaacaggaaaaaagagaagaaaatcatacctgtcttccattaaaaacggctgtcctttttcagttattccattaatgactggtccaaggaccacaatgagatctgcatttcagcttgtccctgaaaaggcataattgaatagttcagtcaaaccgtaagagactaagggaagatttttgtttcttctgttaacaccatatagcggcaggctttgcttcccagtaatttcggttcrtacgtcaacttttccttccgttgcagggtagcggcgaagaaatccaccagaaagacaatcaaagtaacattaaaaagctcaaattttacaaaagttaagttcctgccaacattttmaatttatcatacaattagaaatgtgactcagtctaacaacacccaagaggataaaaggattaaaaaaatgagatttctttggtgttatcaatgcatctcaataggctctaactgttatggtacagatggttcattatatagtctgctgttggcagttgggctgcggagatgtgggtgctgcttcaaaatgtgtgagataccaggtggagatctaacttgtgggtgtgtcagtgttaatcataggcttcctgtggttttagtctctgccgcttcattgtacttagcagtgctgggagtgaagaaagatacaagttttaatgaacattttatttgaatatagcttctcaggtttaatgtataattcttcaggggaatagataattgatgaacacattatctggtgagggttaaaaaaaaacaaaaacaaaaaacaatctaaagactaccactcatgaccaaaataagctcacaggtttatcaatgacattctgcctcagatttctcataggaaaaaattagaactgttttcagtcctgactactttaggggaatgttgtgactattaacttaaatattaaattattagtattagaaatttctaaattagaaacattagattagcaatgttgatttaaatgataaagtgatgttttaaaaaatcattttgggccagacacagtggcttatgcctgtaatcccrgcactttgggaggcctgaggtgcacagatcacttgaggtcaggagtttgagaccagcctggccaatatggtgaaaccccctctctactaaaaatacaaaaattagcctggcgtggtggcggacacctgtaatcccagctacttgggaggctgaggcaggagaatcgcttgaacctggaaggtggaggttgcagtgagccgagatcgcgccactgtactccaacctgggagacacagcgagactccgtctcaaaaaawaawaaawaaataaataaataaatraataaataattaaataaatgagtcagtaataaataaataaaaatttaaaaagtatcatcatggagttaagggtgctgcatctacttcgttacttcccattttctcttcaactccagtccactgagttagctctcctccaagtcaccagtgacctctgcttggtagacttaatattagctttttctgacattcatttcacttgatctttccrctgtttttcttttcttatcctcatgttctttctgagtcttgtcaaaagcctgttggagtatctcatgatttggtcctgggatttcttctgtgctgactttgtagactctccccagatgatctcagccaagaccaagcttcactcagtgcccgagcacagctgacctccatgtctgtgtctcctgcccttttctcattgttgtctaaccttttctagcatcccgtctccctacaatataattctttatcacaatatttaaaaaaattttctcattgtacttttcttaatatgtacatgtcttttttaactttgttaacttccttcacttcccttgacccagagtgcaagccttattcacgggtacatttcagtacctaggataatgcttggcttgaattaggcgctttaagacatatatgatgaacacatatgattctatctttaatatctccttatttgtaggtacaagcctacttatttgagaaaccctagtggttgtttaaataaacagactgggagtcctgtgatttgtcttttctcatttttaaggataataaaactcatgaatgagtaagagtatattaattgccattgattcaaatagaaatgtatactcaatttccattatgttttcttttctatctcggggctacttaatacttttgtttttattcaatgatattacctttagagtgccatttttatttccattagtttaatgagtggcctttctatagccctgacattaaaatgttctgtaaatctccaaccacttgagacctcacttctttaagatgatttgcattacatagtaaatatggacatactggcataggtaaaaaagctcttatactggcctaacctgaattttctgagtttttctctctaatgggttgtcggtgactgggattgtgaatacttgtatgtaattaatctcttcgggggtgtcttgccttaagaaaagacagtatttgagatagattcactctgagttgattatccatttytactaaaaggatttataataggagtctcttatatagcaagctgttctataatggagcatttaaggcaatatttcacttttgcacacattttcagggtcactttgattgaagtgaggtgcattattttgtatagcaatattatgcttatgacatatatttgttctgcagccttaaatataagaagcactttcaaaactttataccctgaagtttgattagaaaattctttgttgccttctagaatttgcttaatgacttcattaataactatgcaacaatatgcagggaacatgaaaaaaagtacatttttcttctgaaaattgcatataattattacaaaataacttttaatctttcatagtcatcttttctgttttagcctctaaaatagtgtttaaaaattgattccccttttcttcatggatttatattcttgcttttttttaaaagaatgaccttaacttacttatatgtaagatttgtcttataataaagttataatagaatttttacaaatgctcatttctttgtctatccctaagacattgtaactaataaatatactttcctcaagtcatgaacagattgcattatttcaaatcatttaggaaataaaaatattcttatgccaagattgttatcaagtgtactactttttagccttarttgatgtagacatttatttaaaaatattctttagttatggatttactttatataagttggatttkttttctgaataaatctgatccatgcagtattttgtctagccagtagacaaaccatgcatagctgaaccatatggaagagcctggaatttatggtaaaatggatcttgagaatacaaaataaccatcacaaagccsattactcagtgaagcctaagaacctcgctcttgagatatgatacttggtcatcacacagaaccagttgatgacatctaaccttatttctaaaaatattctattcattcatacagatgtgagaaaagaaggaatgctggtaaatgaaacgtaatgtatttgagttttaaaagttgaacaaatgcatttctctacatttatattatatggttttttaaaaaagccaaatttatggctgcgcatggtggctcactcctgtaatcccctctctttgggaggccaaggtgggtggatcacctgaggtcagtagttcgtgaccagcctgaccaatatggtgaaactctgtctctactaaaaatacaaaaatcagctgggtgtggtggtatgtacctgtagtcctagctagtcaggaggctgagacaggagaattgcttgaacctaggaggtggaggttgcagtgagtcaagatcgtaccactgtgctccagcctgggcgacagagtgagactccatctcaaaaaacaaacaaacaaacaaaaaaaacgaaatttgtgtaaaaagtttttgttttcagaacaaaaacttctgaaatgatgcaacagggaaatttaaaagttaacttatatctcatattttcaattatttggttcacattggttttttaataaggtaaaaataacagctttgctcatcttattagacattttttaggcccacaagaaagtatatttttggctattctaatagtttatataataccactcattatgagttaagccttgttaaaatatggagaagaccacaaacatttatggcatatggtaaagaaagtaattattagaaacagatgaaaatactaaataatgaatttattattgtcccaataaacacaattcataagataattttatatttgaaaatgaagtttggatccttttaggaatactaatagtatcaatagaaattttcctttatgaagggagctattaattaacaaaattcagaagaaatttatgtaaacatgcaggtaatgtgatatctggaaaataaaacagtagattttagtgctagaaagtgctttagaactcatagtctagtgctttttaaattcatttttagttatagaactcttcttctatttaatcttatttcacagttcaaggtagacaacaggtaaaagtggagatagtttaacaaagtgggggtgaggattcaacctcacttcatctttttctttttccttcctctgtgtgggcacccagggtactatttaaaacactaaagactcagaggcagacatatggaaatattatatgagggagaaatgactttacaaagtttaggaagaggacagaccagtcaataaagaatggtgagacaattgatcatgcatataggaaaaaaacaaagaaattggatttgtacctcatatcatttagggaaataaatttccaataggttgataactcaaatgtgaaaggcaaacctattcagaatgttcatagcaacattgttttagtagcaaaaaccgagaaacagctcaaatgcccatagaaagaaggatggatatgtaagttgttgtagagtcacaaagtagaatactatgtagcaatgaaaatgaatgaactatgctatacattgagttggttgaatctcaaaggtagtcatataagaaaatattagataatatattagaaattagattatatatagaaatgtaaacatttataatgtaatatatataaaatctctatataaagtctaatataaatctaatatcttacacatgtaaacttaatatgtaatatatatgaatctaatatataatatctaatatatttaatatatataaaatctaatgtcatttgtatgaaggtcagaagcaggcagaactgaatagcctatttcataggaatatatcctgtgtgataaaaaaatgaagaaggtaagggcataaatataaaagtcaaggaaaacatcacctctggagaggatggaggagggttgtaaccaaagagaggatctcgtggggattcaaagatcctagtaatgttctctttcttaagctgttacagaaatactgttgttttattcttttaaaaactgtacaaatgtcatatgcactcatacatttcataaaatgtacagatataaacaattttttaagaagcctcttaaagctttagagacaaaaccatgtatgtagtttaatgttcctgtttagaaatcgagaacaaatgtggagttttctggacagcagcacttttgttgcaactcctggtatgtgccaaagctgtgaactacccstgaacgagtactgtaccttaagtcgtccatgagaaggcatctttgtggttagaagagtttcctcccaacttacctgctccctccatcatcctccatctgggatgtcagacacctaacattaattggagtcagcagcgattatacttttgtttcctgtgttaagggactttctgtttatttgttaatcctgtataggtttattgtatgtttacttgtgctggatacttcactaggccctcaggataaaataatgaacaggactgcctttgaaggccaaaagaaaagaaaggsaccataaatgtgtcacttatatggtcacctgcctcccagcatttgttctccctttcctccaaattcatagagtccctgatatttcgctagtcacagggccacccaaaataggaacatttctaacttgccttgcagccaacatggacgtgtaatttaattctggctaataggatgtgattgaaagtaatgtgtgtaactttgggtcattctcttattgggaagaaagaggctgtctttctctcccagcccagcctgtgtgtgaaggtgtggatatgaatggaatgtggtaagtcctcctagaccatgcaggtgaggcagcactgaaggaaagctacaacaacaagacagagggggcctgggtttctgatactgtgtagtgccatacctcagtaacttcctggaccagagtcaccgcatcatcccggacttctgcatgagagatgagtaaactctgacttgttaattcactagtgttttgattcatgttacatgcagycctacttatatcccagttaattcagcaggaacacaagtgatcacagctctgtgatacacactatcacggagttgtgtgtatgtatatagacaactgggatgcatatacaagttctgggaaaggcagggaggcatctataagtatttaaagcttaaactcggttataacagatgaagagaagttttccaggtaaagaaattgaggcaagcatttcaggcatcaggcacagtatgggtaaatgtatgaaagtatgagagtataggctcttctctcatcagagtttcacaacatgaatcggatatttttctactaattaaggaactcagtttatatatacagatttttactgattataatttgttactttcaggagtcagatgaaagtacatcaaagctattatgaatggctttggccattgttcatcctagtaagagattaagaattgataagaaccaatggtgtactggtgatatgggaaaataaaggtcattattatacctgagcaaagaataaatgtaatcacatacaggattttccgagtattgttcaagtgttgtagctatgcagctttattattaaaaattctataggaaaaaataactttgttttaaatgcacttattatagcatattatattagactctgcatggtagctgaggctggaaatattggtagggcccacggcacaacctatttctaaagtaccttgcgttaaaaatagaatgttcagcttgaactgcaagtgatcatgatggcagcctggttctatatggagattgcagagctctgtgtgctcacatctgatttccagcttgtaattttggtgtggatgaaaatatgcattaagttacttttggcttctccacaattttaaactggaaaagcccatattacagtaatatatgatagtatgtatgaatgcgacatgaatattgtaatagtcataatataggatgttcattcctagaattgtgatgacatctactgaattgcagccagtaatttgcatattcatgcccacttagctcaaataagtccctgtttgtttgcacattaatgtctgatttcagcaccagctaactcatttacatatcctgttcagttggttagtgatgttcatatgtggaatattggtgcagctctgtttgggctttgagtagcttggggtttagtagaaggatcacctgttactcatcctagcttttctaggcaaggcactttacttttctgagctctaggttattcatctgtgtaatgaagttaatgctggttagttcttagggctgtcatatcagttgacacactggaggttatggtgtacagtcaacatttctaggccaactatattctggggcctgttcctggaacattttctgcgtgcagaggggttctagatgctgtagaagataagacatgcaaacagtcacagtttcagtgaatattagaagtactttggggagtacagaagagaaaacacttaacattttcaagggaagtcataggaggtattacaaaggtggaattcttacgccgaactggtaagatgagttgaccacactgaacaaaggaagggaactcgcggcaagtagggagaagatgtggatgaacacacagatgtttgagaatctcatggaactggaaatattttattgtggttaagcataaagtgtatggggaagattgaacatagacatggaagactggtaggcagatctcaaaagacctggtatgccatagcaagaaggttcggtttttgtcctgcgggtgataaggagtcctccaaaggtttaaagtaggagagtcgcataatgaaatgtgcattttagaaaatgttttctgatgactgtgtggagaatgaattgagtggaatgagagtgtagacaaagaggcaagttttgttatttcaggtgagagctcatagaagaattcttaggtgaggtgggaagtgacccagaacctattttggaggtacaatcagttggacatggtgactcattctgtgtggtgtttcagcaagaagagatgtattttggtgtcttgggtaggtaatgatgtcatttgttaagacaggaaatataaaaagaggagtagtttttatggagtgttagataggggtaaagatagcatttcattatgtatgcttttatggttctcttttggttgtgtttagttctgtctaatctaatctagcccaatataattttactacatagtctaatcttttatctttccctcaagtgtaaggctttcagcagtttgtgattactcataaccattcctcttctcaagttcagagtaatggagttacggttttcttccatcccttttcctctttttattttttaattgcaaatactactttcttttttttctaggctttcgttgatgtattagttttagtgcccactttagtctcttaagaatatgaattctttaatttttattccttgatgtaccctgtatttttattattaaaatcaaactattagcgatgtctcttgataacttgctctgactttgtgcaagtcacttaaccagttttctcagttgtaaaaggaagaaggtaartgatttttttttttkgaatctcatttatctccaaagctctaggttcttggattatcagtcactkgcccactatatgttcctcacagcagagtctggggactagttagaggttcggagtgtggtctctggaattkggcttactacctaggtgactttgggcacagtaactccttctatgtgtcacattcattttcttaaactgtgaatataatatacctaacctcatagggccatagtgatgacgaaatgagttaacacatgtaaaatgtttaaaactgtgccttgggcctggcacggtgactcatgcctgtaatcccagcactttgggaggccgaggtgggtggatcacctgaggtcagcagtttgagaccaacctggccaacatggtgaagtcctgtctctactaaaaatactgaactctactaaaaaattagctggacatggtggcacacgcctctagtcccagctactcaggaggctgaggcaggagaattacgtgaacccaggaggcagaggttgcagtgagccaagattgcaccattgcactccggcctgggcgacaaagcgatactctgtctcaaagcaaaacaaaacaaaaaactgtgcctggcacatattaagtacagataaatgttaacaactattattttacccgtaacctgtagcacctggcatcattcgtcacacataggaggcactcagtaaatgtttttttaaattaatgaaccaataagcctgttagtgaacaagtaagttctagtagtatctcttagaatggtccctagaaactcctccccccacccccatttttcctgttttcttctctgacagaagtctttctagactgttgagaaaatgtgtttacctcagagattgtcccaatcttgtaatgttaagtgacatccattttgagaatgtagttgtgattcacatatacctctaactaagagggccacacttggtgacctttagtgaatttgtctttctggcctatattcaccccagagataaatattaatggccatgatgaacgtggccatttttcttcaaaaccatttgrtctgcagtggcacgaactctaaattttactacacaaataatttaggacggttggaatatggctagtaaagaggttaaaagggaaaggacagcccttctatttatgaattaatggcagctgaaaatttggcattgttttatgtacattattgttttgccttcctcttgcctccagtttgacatcactttcttgctgcttgtgaaaacaaaaataaaaatgcagttgtaatcctttaacggattgggtaatacgttggtgagggagagcttctttcttcaagtctatctacagattggaaagctgacctcttcagaagtacccttatagacacactcagaaataatgctttactagctctgtgagcgtccctagcacagtcaagttgacatataaaggtaaccatcacagaaacaaagtttgaaaaaaaaaggttacagctgatctgaaagggaaatttttgacttggcttagaaagcaagcaataaattgtttatggatatcattccccacarcatgtctgctgaaagaggactgataaaagcaaggcaattgatgggatgaatcattcrctcatttatgattatctaccatttctagattataggaatgttattgaggaccattaactccatatccacttaaatatgtcatgaatcattttttaaaatttctcaagacaagaactttttccataagaattctttaacatgtaaattgagtggttgactatcatttctaaattatggtattcaccctaacacaatagatgtagttgccctaaaatagatacagaatttggtctaacttattctaaccaattgaaatcctttgtcatccccaaattataatcagtatgatcttctttttactgtcacttccaggacattttttaggcaagtataatgcccaagaggaataattagctctttttaagtaacktctacttttctatctgttttagatggtttctgtttagttattagccatatttgttgcattttacactttgaaatttgtagttcctataatacttttagaagtaataataatatacattatattaaaaaaattgggygtggcatggtggctcacgcctgtaatcccagcacagtgggaggccgagctgggcagatcacgtgagatcaggagttcgagaccaacctggccaacatggtgaatataaaattagttgagtatagtggcacatatctgtaatcccagctactagggaggctgaggcaggagaatcgcttgaggctgggaaacggagattgcagtgagctgagatcacgccattgcactccagcctgggtgacaagagcgaaactgtctccaataaaaaaaaaaaaattgtrcgtaacactggagttttagatgcctgtacactgaatcttttctgttctttctccccttttttaaccttagtttatttattaatattattattacactttaattagatttcacttattattgaggtgaatgtacctgcagtgaagtgtgtaatgtgcactcatcttaaatgtacagctaaattcttgcacatatgtattcccatataactaccacccagaagatttcctatgcttcttaacactccctgagggtcaacactattctgatttctaactctatctcttagttttacctattctttaaataaatagaatcatactctgttttgtgtttctggcttctgtaactcaacaaaatgtctggcacattcattcttgtggatttgcatatcagtttttattattgcatagtattttattctatgactataggacaattcattcattcaccttttaatggactttcatcgtttccactttggggctactatagataattctcctatgaacagttgtattacaaatgcactaatttctcgtgggaatatacctaggaatggaattgttggttcataacataggcatgtgtttggctttaggagatacaaggattttaccattatagaaattgataagaaattgtatgacaatatcagttgctttacattctcactaatgtatttttatgggctcaaatttttaccattctcttgagtgtgtagtataccttctttttttttaaagaaaaagagtctaagctttccttacttctgctactcttcccctgcccccatactggcaggaatttctggatatgattatttgctatacagactatctgccaatttactgatttacagtacagcattttttgttgttgttgttggttttttttgagatgcggtcttgctctgtcccccaggctggagtgcagtgcaccggtgtgatcataactcactgcagccttgatctcctggacatcaggtgatcttcctgccttagcctcccaagtagctaggaacacaggtgtgcaccaccgcatgcaccatcacacctggccaattttarcttttttattgagacaaggtctcacttttttgctgaggctggtctcaagctcctggcctcaaacagtcctcctgcctcagcttcccaaagcactggggttataggcttgagccactgcacccagccaatatagtttttcatagttcagtgatcttgtattccttctagaagaagtcctgatcatgttcatacagtttctacccagaattctttagcggcttttcttactagaaatcacctaccatatttcttcgcaccttcgaggtggaagataaaggtatctcctctctttcaactttttgtaattttttggccagtggttttctattttgaatgatctttttattgcatgtttcttactgatattcccactggtagtaggcagaattctagaatgaccccaatgaccagacccatgcccatgtatttataatttttcccctttgggtggtatccatgattctgacagactgtcactctcggggttagttttttatatggcaacactgaatggattttgcaagtgtgattaaaatccctaataatttaaatttgagtcaatcaaaagggagattaccctggttgggcctcacatgacatttgaacccttaaaagagacaaaaagcagcagaaggtgctcttctgttagcctcaaagtagtaattcttgtgaatagattaggccatgttgtaaggacctggggtcatctctgtctaacagccaacagaaaaataggacctccatcctacaaccaaaaggaacagaattctcccaacaatcagaatgagctaggagcaggtccctatgccttagataagattgtgaccttgcctgacaccttgatttcagcatagtaaaaccctaaacataggactcagctaatccatgtctggacttctgacccacagaaattgtgagatcatcaatttttgtttttctgagctgttaaatttgtgaaattgtccctttgagactcccatgtagttcctaagactgatggatggaagttgctaggctagctctcttgttgtaagaaaggcaaacaactcttttccctaccttaaatttattccaactctctgtcagtgttttttttttttttttgagacggagtcttgctgtgttgcccaggctggagtgcggtggcatgattgcggctcactcactacaacctccacctcctgggttcaagcgattcttctgcctcagcctcctgagtagctgggactgcaggtgcctgccaacaagcccagctaacttttgtatttttagtagagatggtgtttcaccatgctggccaggctggtctcaaacccctgacctcgtgttccgcccacctcagcctcccaaagtgttgggattacaggggtgagccaccacgccctggccaaagtaacactttgcctccttgtctgggaatcgaaccctggtctcccgcgtgacaggcagggatatcactatactaatgaggaagacatgtctatcagtcttaaaatatctccttgcccctccagttctctatggcttttatttaatttggaagctgaaaggggctttgggaaagaatggaggtctaataggttttctgtgttactgtgggctttatagtatgagatacccattttgaaaacgtttgtagttataggtatagtaaagacatcgttgtgatgatagccccctgaggaaagcagcacagattatcatgttacctttctgggctgtctcatgagaaccaggcactgaacatgcccaaatcagactcatgattcctcctccctaccactcccaagcccgcttttctttcggtgcacctgattttgttaaatggcactattgataaacctgaaaggcatccttgactcctccttctttgccatagacaatctgtcaccagatcctactgatgctgcctcctaartgccttacaaacccatttactgtttctttttaaaatgtcccttgcggctgggcacggtggctcacgcctgtaatcccagcactttgggaggctgagatgggtggatcacgaggtgaggagattgagaccatcctggctaacacggtgaaaccccgtctctactaaaaatacaaaaagttagctgggtgtggtggcaggcacctgtagtcccagctactcgggaggctgaggcaggagagtggtgtgaatctgggaggtggagcttgcagtgagccgagatcatgctactgcactccagcctaggcgacagagcgagactccgtctcaaaaacaaacaaacaaacaaacaaaaataaaatgtcccttgcttctacccaggttctaactgccatcatctcttggttgttcctgcttctatctctaatccctccaaaccattctttataccagaactagagtgagttaaaggtatttaataatttcgtatgtactagtactaaaccccatgtcctcaatatgcctaataaagttctgcatgatttagccaccactacgtgcagcagcttcttggcctcttttgaaaatcataaccttgtgggcttctcagaacatgctgtgcttgttcaggccttggaggctccttgcatgctgctgtctatacatggaattggcttcctttcatattcttgataattaatgccatctttaagataacgttctctgtataataagaattttatatcgtgcttattaagtacttaccatgtgtcaatcagtattctaaaacattttaccggtagtatgtcttcttcttttattctcttaaccattattttcttgggggagctttttgaaaaaaaaaaaaaaattaccccagaccaggtcaacttccttctttgtagcacatggcatacttacaattattcagttggcatacttagtaatttaattatttgctgttgtttaaaatgtgtgtttatcattcattttaagttccttgcagtcagggaccaagtcagtatataccaatcactggtatagtaagcacctaataaataatcatgcttattaaaagtaaaagaagttcaatattattaaacaaatgcctgatttagacagtagcttaggtattttcccttcaagtttagagcttttttccataagcggataatatttggggatatttaggaatgtatcatagattaaattatattaagaaggaagctaagagaaactaatgttacttgagagaagaggatgcagtgactgagatggaattatttagggtatgtatataattattttgttttcataatcattttgtcaagtaggccttatgatatggtttagatatgtgtccctgcccaaatctcatgtcaaattgtcatctccagtgtgggaggtggggcctgatgggggtggttggatcacggggcggagttctcgtgtaagctttagcaccatcccctctgtgctgctcttgtgatagggttctcctgagatttttctcttgctcatgccatgtaagaagcgcctgcctcctctttaccctctgccataattatacatttcctggggccttcccagaagcagaagccgctatgcttcctgcacagcctccagaactgtgagccagttaaacctcttttctttgtaaattacccagtctcgggtatttcttgatagcggtgtgagaacagactaatatgccttattatttcatttctattatagctaaggaaaaaaaaaacatggctcatggaggttaagttacttgattatagtcacaaaaccaataaaggacaaagatgttacataatagttttattatatagggtttgcaaaataacttgcatttgaaatggcttgtgtattttccactttattgagataatttctatataatccacatttatttaaaatgaacagtttgatgagttttggaggatatatacacctgtgaaaataatgtcactattaagatacagaacattttcattacctagaagtttctttgtatccttttcagtctgtttctccctcaatttcaagcccttggtcactggtaaaatgctttatgtcataatagatgagcttacaacttctataatttgatataactggaatcatacaatagacaattttgtgatcagcttctttcactccacataatgatgttgacattcatccgcagtgtygcattcttcagtagttgttcctttcactgctgagtaggactctgttgtatggagatactgcttattgcttatccctgcagttgttgatatacatttgggttgtttccagtttttacttattgtgaataatgctgccctgaacatttgtgtgcaggtctctgtgtgggacagtattccctgaggaacacatacgagtgggattcttaggttatatggttagtgtatgtttaacttttaaagaaattcccagttttgtaaaataaatgtattattttatattcccagcaacaatgtgtgtcagcacttggtattgtcagttcttttaattttagacattactctgggtgtgtagtggtatctcattatggtggtttatatttaatataacatcttattgatgtaggaggccacacaaatgtggattcaggccttggaagttagaatcaacctcaaatcctttttctcttgtgagaattcatctagacctcttattatatgtcatgtcttttagaataacttgtgtctacctccatgaagyttttaaatacagagaaaatacatgtaactattttacaagtcaactggaaagccatacatgtatgtatatgttcgtgtgtgtatggcatatatgtatatataattattcattaaaaataatgcttactaaaactactcatactcattattgtatatatctatatttccagcatcttctgaaagtttgtaagttctgaataaatcctgctttgaagctaaaaattctaaattgttgctttattagtaatcacagggctaatgcaaagctctgataattaagactttatgtttttctttgagtgccaccatggcagcaaatggtatctgaaactgacagactgtagattaaaactttcagaatgtaaggcctagtctagggaaaatgaagttatgtataggtgacttgttccatttgaattaatcaaagggctgctggtgtagaccagctgtgttctctgatgacaaaaacgaatcttgacattttagataatgaaattcagttcagcacctcttagagatatgtgtgataatatatgtcagtcagaaacagagagaaggggagaagctcaaaccttgtcttattaaaatagacattgtgacaagtggacattgctgaatctctggtttctaggggaaaaaatgtcaagggaaacctctttaaaaaaatgatgggaatggctgttttatggaagctgggtgaaaagatttgacttctgatgcatgacctctttgacagttgcctttgttcatgattcctagtttcctggtttattttattggggtacagggtgaggtctggaagacctggaaaggaaactcacttttttggtttgacagtattaatgcaatcatctagttcataccttgtaagcccacttattatttcctctgcgtgtgttttttctggtttagcggattagctgcactgtctcttcaaaggctatccaatcaaggaggggttattaaaaccagggcgatttatgactgagaattaattagagaagcattttcatgcacaacatccaattttttgattagcaatggagcagggccgcaattaacactcgaggaagcttaaatttccagctttttgattctcaggaaatgagattatcaaaccagggtcagacacttgacagcaaagtgggagtgggggagtgtgaaattatatgtaaaaaaaaagaaaaaagagtcgtttgattttgattctgagattgctattaagacaatgggaaattcagaggagggaaagaacaaaaaatctgaaatggaagaacctgaaaggactgattctttggtggcctatttgctatgcacaatatctgttgtaaatgtttgctggaagtatgttttagaagcacagcaatattgttgtgttccttcattgttacttattattcagtttttctctcataaatttttcttggatattcagtggctgaacaaatatttaaaatgtttatatatgttggagagaggccaaaatttttcttgttagaaaagagagcttcttttctaaatgctaatttgcttttttgtgtgtggggggagtctgcttcttttcattggtgtttttaattttttcaagtcactcaagacacagtttaggtagtgagttatgtcaagccatagatgaccacttattgctaagtggccttgtcaagcttaggtgcctgagataagaagtaaggcaaccgcaggtttgctgtaaaacaaagtgtattctgtcatcagtgtaattggtgctccccaaggaatgcaacataatgaaaattcatttgttctggaaaatatttttcatcttgtctcctcttaatttggacatctaattttcatggagaaatagcagagcagcaaatcttttaattcattctgccaagttaaaactcatatgcatctcttctttattcagtagattctaagatttttaagagaccttgtcagtatttttgaatcatccaaccctctcttcattgccctgttttcatatttgcatgtatgatgaattgcctatctataaatagtgtaagactagtacaatctaaatattaaaatagtaatatgtactatttatagattgcttgcctattggtcttagggaaattgttggcatccagttctaagaggaaacacaagtgatcaatgtgtctttggcccagggtgggagagggactgagaattggttgatagtcttgtgtgactctggtttctctcatattctcctagcattggtttctctatttaaataagggtggggctttttgttacaatctggggagttattttaaaaaacatcttcataagcagattccagaatacaccaaaaatgaatggaagagaccatacgtcatttatataatcagagattgttgctatggcatttttctctctaaagcscctctggtttaggaacatgatccattgatctagcctatcattcttgcaatcctactatggattctcagctttatttgtcagtcttgcttaatcctccttcctttgttgatgaagagtatctatcactggctggatgaaaattggctgcagtttaatcttggggaaaaaggaagaaaactgccagtcagaggctgaagagttgatcttgtcagatttatagtcatcagttatcagtgctgatcttcatgttcttagatgttgatgattacatgcttttcggcatccaataaacatttgcggaaataatttatagttatatttatggatatttcctttgttgggaaatgttcctgcatttccaggtccatagcaaagggagcctaagcgtatgaattagggattcttaacctatgtgtgttatgtgttgggtggtttgggggagggtacgtgggtagccttcagggaatctgtgacacccagcagtgtcttcagattagaggggtggggagcaggaagaagttaccaagttttcattaggtttacaaaatgctattgttacatgtgtgtgtgtatacatagacacacgtatgtatatgtgtgtatatatatatatgtatacatacacacacgtatacacacacacacactcacaaatacgtgtacaaatacagttcccgacttggagagccttattatcaacagaggaaaacaatgtaacaactttagtaaaagcatatgaaatgatatccttttgtaataaatgtgaatgaaatacatctaacctatatttaaatgcttagtaacatttaatattaattatattaacatcacaggtaggcagaaaagttgaatttataaaaattgagaaaattaatcaagagaggcatagtaattaagtgtgaatcattttaaagaaagcaaggattatttagtggagtagaaaaacagaaaagcaaagctattctaggttggtttgtttgttttttctcctttaatgtgaagatttttaaaagtacagtttgatatagctcaattgatcgtttaattaaggaacttgatttgctttaagaggctcgcaattgataataatcatattatcatgttgaattcccagtggtgaggtgagggtgtcagctgttctactggcgcatttttgctttgcttgatttgctgtatgctcagtttatatcgtggtagatgacagatgtgcaagaaggctatttaaaaatcattgctggtgatgggtggaaaagaatgcctttagtttttagtatgatataattaatctttaatagtgatcgactaatgtatgtttatatgattatatctgaatagatatttattaaatatatattattgatatttctgccggggtaactgtgttrttattgagtctctgggactcttttccacttcccatctgaatacttgctttaataagaatatcctactctagcagaagtagtgtaggtacaaagaaccccgttttcttaggttagtggtcaatctatgaaattagatttttgtgagcatgaaagtagagtgtagcccagtgaaatgaaatatggaaacctcagggttcaaagcaatgggttggcagagtcaggtcggagattgaaatgttgtgagtcatctatgagatagatggaaacactggagttgttgagcttttaaaacagtaatagatggaaagaaaaactctagactctgcataaggaaaaggctactagtttgttgaagaagagtagcttgtgagactcgaggagtgtcttgaataagttaggggaagggcaggcaaatggacacttaaggtttatagtgtgaatatcttctatctgctttttgaaaaacacatttaaatgagttcttaatgattcccaggaaccacagtccgattttggcttttgtttcctgtgccctcctgtcagttttgataactgtacctttgtctctgagcccatttttttcaaaattatggtttcattttaattgtttaatagtctgctcttgtctgtaatttccagagtttgaattgtatgatttttgcagcctctatgaaaatggtcagtgaaaaagaatttttggttaactatgacatcctgtatttaatggaaatattttgttttaatgacatgaaaccatagccatgaaaatttttctaatgtaacatcaagaacttctctttgtatattatatgaaccttctgtgaggtccagctaattgcaagacgtcctaagttagatatctcgtgcccattctgattcttctaagaatttactactattttagatcacattaaggttttcagatttttctctaattgcttgataatgtaacacaagcttaatagtgtaataacaaaagcttgatgttctgtagttagattcttttaaataatgtaaaaaaaagttataaatgatttgtagcttggatgactttttacatttctctctgggagtttcagttgctatgattttgttgttgtgttcagcttaattgccattagctactgctgaagtctcctccttactcaccgtgyaggcagtgtccatcagcagcatttagtacaggatgaatgaacgattcctttttgttatgttcaatggaatatgtaaatactttcaaatggccttcttcaactagagttttttaaaaatgagagatacgctggaaaaatactttgaaaaatattcatattctatagtggttagcttatttgttagttgtattatatttggcagttggatgacaggatatgttttagaatacctgaataaattagggaggatatatttctttaatatgattgttttaagttgtagatggcactcatggtaatgttttagtaatctaaatgtactcrtgtatgtaattaaagtttggataatcattagtgatattaaacccctcaaaaaattacattcttccctgggtctaggaagcatcttctgagttaatctacactagcagttttaaaactgygtatgttccctagaacagttagaggtctggaaaggtataagaaattgggtgatcagaattctcagttccctcttgaaagcttcatccagggatgcttaatttttttggttttgtatgttgggatttcacacagacatattttctaattttgctatttcaaaaaatgttgcagtacagacttttatgaacatctgtgatactcctttaatatagaagatgaatcattgggtaaaaagatagtcttatctaaaatttgatagactaccaaattacttcccgaacagtgtttcctagtttatacttctttcaaaatctatggaaacatcatttcttttcatccttgacatcatttaatattaccatttttttaatttaaattttagatcttaaaaatttgaaaatttaccaacttgattagagtgtgtacctgattactagccaggtttagcatattttttgcatttatttgacatttgtagtttttcactgaattattatcgagtctaaaaataatccctaacacctctttcctatttttattggacttttttttattactgatttttagatactctatatattctagatacaaatgtgttctaaatacttttcctcctagtcagacatttagataagatttaatttggggacaaagatgatttttctaaaaataatttcaaagctattagagtagtattttttgatactatgatttcttttagatggatgtttttaaaagaccataaagtaagtagatattacagttttccttgggtaatctgttctagtgtctcacagtccttattaactttctcaacttaaaaaaaataaatgtgttaattaacatcctacattagtcgatatacctatcttgcttatttggtactctaaaaaaatttcctattaacatgaagttacaagatttcattaagtttttaaattaaatctcaaatcttttgttactaagtagcaacatgactgcttttcttcttaaaattcatctgttttataaactgtcagcatcatagtatccttctggataatttgtgagtgggcagcatctgtacttttcagaagggaagaatagatatttaataatttactcaaggttgtaccgttgcagaatcagaaattagaatctcagtctgttgagatgtgctctcaagataaaatacatgtgccatgcaaatagggcatagctttcttgtctagcaatggttggcccagtatgtggcccaacatatatttcctgtagaaggaatgagaatcactcctatgttgatgaccatagstgaacatgactggaagaattttagcatgaccagttgactttttttcctatcaccactggctagttctgaagtataaagtgttaagttataaactgcagcgttataattcctcttctggtaaaatgaaaaatcagtactgtaatcccagcactttgggaggccgaggcaggtggaccacctaaggtcaggagttcaaaaccagctgtgccagcatggtgaaaccttgtgtctactaaaaatacaaaattaactgggcatggtagtgcatgcctgtaatccagctactcaggaggccaaggcaggagaatcacttgaacctggaaggcagaggttgcagtgaaccaagatcgcgccattgcactctcagcctgggcaacaagagcaaaactccgtctcaaaaaaaagaaaagaaaagaaaagaaaaatcagtaacaaatacacagattttttttttatccatgactacaaaggtacctaactgaataatacatcatgatatttcttatatcattgtccttgagaacttaagtcttttcaatgaaagaaatgaaatatgaagtatttcccgagacagtgttctctaactttggggtgcatcaaatgcctggaggtcttgtgaacacagcttgcaggaccccattacttgaatttctgactcagtaggtctgagatggggtctgaaaatttgcatttctaacaagtccttttatgatgctgatggagggaccacactttgagaaccactactctaaaccttgtgataaaaatgatgaaaggtgatgctaatcaggatagccttgttgcctgtgaccaactacttctgtttcctctttaacactgtagcacttaggaattatcttatttcccctggagaagatcaaacctaatagaattatgcatgygctgtaagagatcatcaaccttacaccttttcccttggacctagagcaatttgaaaagagacatttccatcaaaggacataaaacctgtagctacagtcacaagttaacaattatcagggtgtttgtacctgtctcctccatttgggttttatgcatgaattataaaactagagatgggaaagtaggaagaggatgaaggagtagcttccaaactgttactccaatagagatttcatactaattttgaattgaaaatgattagtcagtttagattcttataaggcataccacactattgaaaaataataaaatgctatagagagatattatcattgtgctacatgttttgttgtacgttactgttgagtttttattccagactttcttttgattatttttggtcctgagcaattttaaaaggcacatagtagaaactgctggttgcttagtatccarttacccaccttttctcctccttttttaccccttcttattgtatttaaggtggcagtgtttccagtgatacatttctcagtgttttctgcagttgggtgcaaccattgaaatataagcagaggggccgggcactgtggctcacgcctgtaatcccagcactttgggaggccgaggtgggaggatcatgaggtcaggagatcgagaccatcctggctaacgtggtgaaaccccatttctactaaaaatacaaaaaattagccgggcgtggtggcgggtgcctgtagtcccagctactcaggaggctgaggcaggagaatggcttgaacccatgaggtggagcttgcagtgagccgagatcacaccactgcactccagcctgggcaacagagcaagactccgtctaaaaaaaaaaaaagaaatataagcagaggtagttgggtagggcttctgataaaattccttaaagaaggctcagctggaaggttctcttttataacccttcctcttcctctctccctggcatttggatgtcttagtggccatcccggactctaaggccactttgaaattggaagccaagcactagtagagcaggaaggagccttgatgccaaatgaccacagacgaacatttccagccctggactatgtactgtcaaattggagagagaaataaatgtctctcttgtttaaccagtttatttggattttctgttatttgtaagcaaaccttgccatttatgttgaagatggcattgtctgtctttgttaatgaggggtgtctctttaaaacctacgaggtgttttcacaggtgactttgtaagttcattgtaaattattccacatgtatcactggatcccygtcatcttacatcttttctttcttcttcttttcacctagtgaaatagtgtgtcttttggagtcaggtacacctgttttatttttaacaagtttattgaggcgtaattacagaacataaaattcactgcttttaaatttacaattcagcagtttttagtgaatttactggtttacaaacattaccgtgattcagttttagaacatgtcaacccatttacgttatcccttgtgcctgtttgcagtaaatccccacctcagcctcagaagaccaccaatctaatttccttctctatatatttaacttttgggacatttcttataaatagaatcgtgatgtggtcttttgtattaccttgttttagtgagcataatgttttgaggtttatttataatttagcacacatccatagttcattcctttttattattgaacagtattttattgaatgagtatactgtattttgtttatccattcatcagttaatggacattgggttgcatccacttttcagctattgtgaatatgctgctgtgaacattgctcttcaagtccttaacacacctggctttgaatcttagctctgctcaataggctggtgacctttggcaaattgcctaactactggtctctaaaacctgtgattttcttatctctaaaaggtgatcatacagacttcctcatggagttgctgtgaggattaaatgaaataccttacgagatcctttgtttagcaatctaaacactggaaacatacgagcaatagaattgtctcaaaarcatgtattaaaacaaccctcactgttatagtgattttcagtaatgcactgtgggtggtgatagtgggacccacagggcctcaaataactacttagtattgtcttgatagtttattcattcactaaggacagagtggtacatatcacaccagaagctgtagtgactgtattgtgatagtcctggtattgcacaagttgtgactttttcattgctcatatggtttggcaagtaagaaccatcttaaagttcagaattgtagtgtgccggtacataatatgctcttataacttatttataaaagaaggaaaagccgaaagagtatatccacaagatctgcatcattttttttttctcttttctttactggtaggtaaaatacctaaagtttggacatattattaatccagaacatttaggctccaggcgtcctggctacataattttctattataccctcttaggtgtgtgcctgaggtctgtgaattaaacaataaaaaagacaaattcacaagattaaaaaagaagaagcacaccagttttattttaaattttacatgtgtggaatcagaaaggaagtgaaatctcaagtagttagattggggggcttatatacaattttaacaaagggtactaaattgttgagaattgactagacaaagagggtttgggtttctaggggcaaaaaaaatattgtgggaagatgasatatatgggggaaactaatgacaggtaagggttatttcgtaagggttgattatgcaaactcatttcagtgttctctctgtctctggtgataaggattgttcttcatttgctggcacgggagtaggagcgggccttcacaagagagaattaatgcccrcttttaggcagatgggggagggcagagagctattcctgtttctgttttttctcagttgccttcagctcaaaatcatccttattccaatgtggcatattttggggtgacatattctggttcccttaagtataatcattgtagagcaaatgcagacacagtacctgtgatgtaaatatttagtgaatgaatttagtcctgtgtgaaatcctccctcccctcccttcccattccttcccaccacttcacgcttaaccacagtgcagcattcttactttttgrggtgacatattctggttcccttaagtataatcattgtagagcaaatgcaggcacagtacctgtgatgtaaatatttagtgaatgttagtcctgtgtgaaatgctcctctccccgcccttctcattccttcccaccacttcacgcttagccacagcgcagcattcttacttttctcctcctgctcagcttggagaattcagatgtcgatgagacaaaatggatcctactctcctggagattacagtctagcaggggaaatgtatattaagcaaatatcacacaaatagttgttaagttgtgataactgctgtgaaaggaacgtatagagtgctttgaaaatgccctggcatggtggctcacgcctgtaatcccagcactttgggaggctgtggcaggtggatcacctgagggcaggagttcaagaccagcctggccaacatggggaaaccccgtctctacaaagaatacaaaaattagccaggcgtggtggctcgtgcctataatcccagctgctcgggaactaaggcagtagaatcactagaacccaggaggcagaggttgcagtgagccgagattgcgccactgcactccagcctgggcgatagagtgagactccatcttaaaaaaaaaaaagaaaatacatagtacaggatctagcctagtctacagagtcagaaatcttctctggggaggatctctgaaggatcctagcatcagggagatggagcagaggcaagaaagggcatgccaaacatagggaagatagttgtgaaggctcccagtgaagaagaagatcaatgcgcacaagaaattgaaagaaggtagcgtagtgagggagagcttagctcaaaaccaaaccaaaccaaacaaaaacaaactggagagttaacygagcttaggtcattctgcgctgtggttaagcgtggtrttagtcatctgatttttggcaagttactccttctacgcctcagtctgttacattaaggttgatcattctcatcttcagggaggcagttaaaatggaaaataaatcatatgaaactggccaggtgcggtggctcacgcctgcgggcggatcagttgaggccagaaattcgagaccagtctggccagtgtggcagaaccccgtctctactaaaatacaaaaactagccgggcctggtggcacacacctgtagtttcagctacttgggagactgaggcaggagaatcacttgaacctgggaaatggaggctgcagtgagccgagatcgcgccactgcactccatcttgggygacagagcaagacttcatctcmaaaaaatatataaataaataaagtatgtgaaacttttaactgtatgtctggtatttttaaaaatttttatttttaaatttttatatatttacttatttttgagacttaactgggttatgagactggctaatttttgtatttttggtagaaacagggtttcaccatgttgtccaggctggtctcaaactcctgagctcaagcgatccatcgccttggcctcccaaagtgctgggattacaggcacaagccaccacacccggcttgatattatttttatcattaaaagttttacctgttttytaggaaaagcattctaagatattttacacatttttctgtctttttgaacataatattttaaacatgatacaccttttattgataacttcaggttgtcattatcagcttcaaacagcatactatactaaagtttaggtctgattgtccttgatttaaatgatccagtatcctgtctttttgtgttcttgggtctgatttgtatttaatttgttatttgtttccttattgtcaggcattttcttcctgctcatagcttactgtcttctagtagtctttgtttccttctttcttttggagttagaaattggatataagaatgtgttgctctttgtaaagttaaagtaaatagacctgaggtgagtaataaggcttgtgaaattttaacatctgtcttgtcccttgagaggccatttttgtttactttcaattcttggttattatgaagattcatgaaattgctggatatgtgagctgtatctgctctccaatttgccggacagtaattggacagaggagaaaattggctgttccattgggtagtgttttcctagcacattgtggctggctggctcagggcgctatatcatgcttattaatttatgtatgtaatgtgatacttagcatttattgtttgttatacycagacattgttctaggtgctttacatgtattaatggtattgataatattttayttctattgtgtaatcaatttgattaatttagttctaatatccatcttattggaacatcgttttttgtttttttttttcttttgagacaggagtctcgctctgtcgcccaggctggagtgcattggcgcgatctcagctcactgcagcctccacctccccggtttaagcgattctcttccctcagcctcctgagtagctgggactacaggcrcatgccaccgcgcccagctaattttatatttttagtagagacggagtttcactgtgttagccagcattgtctcaatctgctgacctcatgatccgcctttctcagccttccaaagtgctgggattacaggcgtgagccactgtgcacggcctggaacatctttatacttaaaacaagtaactttctttttctccatgtaatttctgataaatccactcctggaatgaatgttttagaaaatttgaccaagaggtgcttttgagcagcattagataaccccttcagtatctaaatgattgatgagaggagagactccttaatctagatttagagactttccatactggcagcaagatgtaccagagttcttaagaggagactaatgaaaatataaacatttgtacagaagaataggttaacattttttgagttgattacatagcaaggaaaacttgaggttttatacttaggagtgctaggaactaggcattgtaatgagaaaaatctgggccctgcaggagaatgtgaattatttttgatccagtactttatgctcattgtactatgataaatgatatcatttcatataagggcattttaatctgatgcattagactaaggatagtctgaacttttttgttgctaccaccacttcagtctttatcrttaatgagaagctcagattgataaagtaatattaaactattattcttaatatattaatgtcaaaataacaattttttagagcacttttttgtatacatctctacaagatagtttattttgcttactagctgctcagcttttttatatgtggaatatggatttacttgattgttttagattattatactgagaggaggataaagaactggaccaatattgtttgtgcaattagttaatgctgatgcacagtgcagtatattgcaagaacttcaggacatacttttttaggtgggtttgtaaaacctgtatatcttccaaccatggagattactccaatcagtagcccaagtgtgcatacacacacacacacacacacacgtatacatatatgtgtaattatgtataaatatatgcacatatatacatatatatacacgtgtatatatgtacacacatttatacgtgtgtattttacatatacatatacatatagtgagagagaaagagagagagagactgtttcattctgttaccttggctggattacagtgacaaggtcatagattactgcagggtagaactcctgggctcaagtgatcctcccacctcagcctccccattagctgggtctgtaggcaagagccaacatgtctggctaattttcaaattttttgtagtgacaaggtcttgctacattgcccaggctggtctcaaactcctggcctcaagcgattctcctgccttggcctcccaaagtgctgggattccaggggtgagccagagttcctgacyggcactgatttttttaatcaaatcaagtttttacagaagtaaaaacagatgcttcactatagccagtttctaaagaattcaccaacaacatctcttcttatatagtcattctttatagtcattatcaaaattgtgtacaaatgtattgaagagctttattgtaattgtggtttcatcaatctgaatagaaaatttgtcacctagttgctcttcagtgttaattgacttattatctgtgtatctgcgaattgaaccattgctcaatggcagtgctttaaaatactggaagactatygatgcatcactattgaaattacagtctctaaggtggataatatgacagtcttagcaactgtgtcaccactacaaggttttggggacttttttgttttgttattttgttttcacgttttaaaaagcagctgtatggaaatacaattcacataccatactgttcacccatttcatatgtataatttagtggtttttagggtgttcacaaagtatataaccacaccacagtcaatttaaggacattttcgtcatcctcaagagaatttctgtacctgtcaacagtcactccctcttctttcttttctcctctagtcttaggcagacaaaattattctgtctctaaaaaattgtcttttctggacatttcatgtaatggaatcttataagatgtggtctttcgtgactggcttttttcacttaggtcttcaagttcatgcatgttgtagcattggtctctatttcattgctgaataatattctgttgtatggacattttatatatctcttcatgaactgttgatgggcatttgtgttttttccaatttttgggtactatgaataacattcatgtgcaggtgcaggattttatatgcacatgttttcattctgcttgggtaaacacctagaagtggaaagtctggatcatatggtcattcggggtttattyttttgggaaactgccaaactagctgctcattttttttttttttacagaatttataccacttatttacagtcgaaaacatttagttaagatatttttactttaggccattgtcttcaaggtgagttgtttattcttccctctttgatgtgtgaacttgtccatttgtgatgtagattagtcatcacatcacaaatagtaaatgtaaatataccatttatacacatccacctaaatctattctttctaaaatgcatatatctatttatctttctgatgaaccaagggacataagtatgccataaccataatgagattgatactaatttggacaatgagagtaaatgagtccttcacagagcaaaaggaattctatwcatttatttaaaagacaaatatttgatttgtaaaaataatattaagacagttggaagacatgtttgaaactgcatgggagggagtgtgattaatagaaagtgtagggttgggaaggaggattagttatggcagttccacaatgagtctggaagtttaataaaggaagtgtgcagggaataacagaaaaatcaaggaaaaggtagtacctgctactatcaattgtctgttgagatgggaaaatgaagcctacaaatctattaatcatttgaagatattaacaaagataatatataatttttgttctctgagttccttcccccgctccatgtgtattagctcattttcatgccgctgataaaggcatacctgtgactgggcaatttacaaaacaaagaggtttaatggagtcatagttccacatggctggggaggcctcacaatcatggctgmaggtgaaaggcacatctcacatggccacagatgagagaagagagcttgtgcagggaaactaccctttataaaaccatcagatcttgcgagacttattcactatcataagaatagcatggggaagacccgcctccatgattcaattacccccccactggattcctcccacaatacgtggtaattaagggagctacaagtcaaggtgagatttggatggtgacacagccaaaccatatcaccatgtaagagttttgaatcttgtctctaacttattttggactcaaattagaaattagtctttcactgggcatatgcatatatcagttagcttttactacgtgatgaatcaccccatacttagtggattaaaacatcaaacatttttattgttcattggtctgggactcgactatgtagttcttatgatttggactggctcgattagggttggatgatctaggatggtgccagatgggatgcttaggggctgaggtcttcttctctgcattggttttcatccttgaagaggtcagctggggcttattcacatgggagcaagcctgctgtgctcaagcagtcttcacgtttgggcttgcatcatatttgctagtatcctgtagtttaacccagatttgatgggtggagaaatcggccgtattttttgatgggaggtcctgcaaagtcaaagtccaaaagcggtgtgcacgcagagatggtaagaaattttgccccccacccccttttttttttcgttacagtcttctatactgtctaaagaattaagattattcattcatgccctctcctatttttttttttcattctcctaaggtagttttatgttgagattattcattcatggcctctcctattttttttttctttctcctaaggtagctttaggtttctttcctgaggaaattgtgtgagatatagaagaaataacttaaaagaattgaaaacagggactcaaacagatattttatacccatgttcatagcagcatcattcacattagttaaaagacagaagcaacccaaatatccatcagtggataaatggaaaaataaaatgtagtgtatacatagcatagaatgttactcagcctttaaaagggtggacattctaacacatgctacaacatggatgaaccttggggacattataataatacagtcgcgaaaggacaaatattgtatgactccacttatagatggtatctaaagtagtcacattcatagaaacagaaagaatgatggctgtaaggggtgggatggaggggaataagggaatggagagttatttaatgggtagtttcagcttgggaagatgaaaaaagttctggaaatggatgatggtgatgattgcacaacaccatgaatgtacttaatactactgaactgtatacttaaaaatagtaaaaatggtaatttttatgttatgtatatttttcctcaattaaaaaagtatattcactgcaacagtgaaaaattggcaacttctaaatatctaacaagagagaaaaggtagctaagtaaatatttcatttaagttttagtaaatattggttattaatttaggttgggtgtgatggctcatgcttgtaatcccagcaatttgggaggctgaggtgggtcaattgcttgattccaggagtttgagaccagcctaggcaacatagcaaacccttgtctctataaaaaatacaaaaattagcttggcgtggtggcatacacctgaagttcctactcaggagctactcaggtggctgaggtgggataatcgcttgagcccaggaggtcgaggctgcagtaagctgagattatgccagtgcgctccagcccgggcaacagagtgagaccctatcttaaaaaaaaggaagtattagttactcatttaaatgtttgtgaagactatttaataagagaaaatacatcataaataaaatcaaggcataaatttaaacactacagcctcaaacatgtaaataaaatgcataaaaacaggtatgtactgcctttcaaaccatgagatacagttatttaaaaataggagaaaaaaagccaaagaggaatcaatccatagcctttttaatagaaaagaaaaatatgatagaagttgagtacaacctaattagcctccaaatgagaattcaaaatagtttagagaagttgagcatttgtcggaagtcaagttgtccagccagtaccgttaggaagttttcagatgaacttcccagtgtaaagcagaccatcagatcaatggaaatgaatacacatctcagtttctataagaacagtaggttcttactggaaaggatgtagtcagtaaatggtactacagaaatttggaaaaatctcacagataatgtgtggtttaattcacctcacattagctgataaaattaattacagatagctaagtagtaaaatataacaaatgaaacaaaaaaattagaaggtaaaagtaaatatttattaaatgcttggatatacaaatacttcttgcgtaatgaaagaactctaagaggaaatgatagcttaatattaccacaaaaatgtaaaacttttaataatccaaacatataaaattaaaagccaaaaaatttaattgaataatgttgccacaaatatgacagaaaggctaaagttcttaccagataaaatcctcttttgggtgaaaacctgagcatgtatcttattcctgttcttgccacaatattttatagttactgtttttgtatcagtctcacttggggtggggtgtgtgtgtgtgtaccttttagatcttggtattttcagggacaaacacaaagtctagtccagaaggcattttgtwaatgtctgagtatgaacaaattggattctggggctattattttactgaggtctgaaatgctgacaaatgcatttgttaatcgatgaagcagatttgagaaggggatagaaaaatgttcagttaagttactgtgcaaatgcagcatacattaactttcttggtggaaaatattttaaaagatgaaatatatattccaataaaatatttggtggctattgaagtcacattacaaaatgcagctaccacacattgttagtttatatgaatcaattacaggggagatctttctggtgccatttttaatttttcctccttccagttgctgaagccctaccttcattcctcttgtcttaattttcccgctcccttctctttacctccttttttctctattctcccttcctttcttttcctttctctatcgccttctccacaacagctcagtaaaagagtgaagtttttgagtttcatttatgcctttccctgttttgctataaaaatcaaccaaggatgctttyagatagcaccagtatgatgagggaaataagctttcattgcaggatgattactgttggtgatgatgtataaaataaagggagggatgttatgtggaatgttgacccttcagggcttgtaaatgcacattacgtggtctggatggtaaactaagtgaatttaatattagctactggaaatgacagtgtttataaattttcaaaatgacgtttgtatctgtcaggctttagcttttattgtatcgaatacacttactttattttaatatttttctagagctgctttatgctatgggaaacactagttggaaattgaaaaccctagacattagatgatttttatttaacattatcttttgtattagttgtaattataattttctgtttgtaagtcactctcccaaagcacaggagaaaaaaacaaatttttcttccatgattttctcactgagaataattcgtcttatctacttaaaaatacgttcttttaaacaataaaagtggctctatctaaggctgttactttataaaattggaaagtatttatttgttaacacttatttatttctgtagtctttgaaatttgtattctcccccaatgtattttagcaaaatgggagaaatgaaggataacctagaattacattcccagagcaaaatatactgtatttattatttgtgattcatttcagttccgtgttttttttttgttcgtttgtttgcttgttttttgagacggggtctcactctgtcagcaggctggagtgcagtggtgcartcttggctcactgcaacctctgcctcctgggctcaagcaattctcctgcctcagcctcccgagtagctgggactacaggcacgtgccaccacgcccggctaattttttgtatttttagtagagacgtgatttcaccatgttagccaggatggtctcgatctgctgacctcgtgatccgcctgcctcggtctcccaaagtgctgggattacaggtgtgagccaccatgcccggccccatttcagttctgttttatgtatrtgtttgtaactttaacaatataataataatggtgtggattcagtttttttttttaaactggatttgagtagtttatgactcctgtttattaaatcaaaatcagcaaaagtatttcatcaatatttgtcctcttcaaacattttagtaaattttagraagttaaagtggagttgaataccagtcgtaaagctagtaatacctcttccaaaacaaacatacaaacaaacccctgaactacagttgtggaccttcattatctttctgagtgttgtgccttaatgtgtttgagtctctctgagatgcataatacgtgttatttgtttgagtttcagccataacttagtagtgatttttctccattatagactttgcacataatgaatttcaggaaatacacaacaacagcttcttccgcttgtagataaagacagtaatatgatggagtgatcaaatacaaatgctcctttaatttattttaccaagacatttatccatgttttatttataaggcaattgaagtcattcattttgtatggaactcttcctcttctgaataacaaataatatattatcatatatagcgcattgggggagggagtgatgaaagccaaacttgaaaataaaagtttaatattttgggctcattgggcacaattatagtgttactatctttgttttcaactgaatcataattgtgtgtgcagattttgaaaaaaccaggatggcatacggcacagagtagtatggaaaagagaaaattctttgttsgaagagagggttttttttccctccagttgaagagcattttaaatgcacaaaatctgtctcagaaatatccctttgaaagatctttgcatacacaagatttaaaatgctttcattctgtgggtgactagaatgaaatgggagcctacattcccaagaatctctgatatgaccatataaaaaccatgaccaactggtttgtttttaactcttaccatgtacgagcccatttgaagggcatgggcaatacttcgtttctgaaccaagtcaagttgactgctggcatttaactcaccaccttgtgtttgctgttgcctgatgccagtaagaaatacatcgaaagctgtaatataatgataaccattatttgccctcagttaaaaatctagctaatgggtctgatgtgcccacagcttcatattgcttgagactgcccccttctaggatattttagaataaaagatcagaccagaaagaaaagtttaaagctcaggatatcatagaataaatggaagataaccagctagttctgttaaagcagactctatattttaaattcagtaaggatttaagtatattaatggttactagtttcctataaattagtttggggaggtccatgtaacattgaagtcatagttcactgccatgtttttccaaagtatgttcacaggtgtttggaatacgtatgatctaatctgaaaattaagagtatatatacctttcagttcttttttttttttttaattatactttaagttttagggtacatgtgcacattgtgcaggttagttacatacgtatacatgtgccatgctggtgcgctgcacccactaactcgtcatctagcattaggtatatctcccaatgctatccctccccccytcccccaccccacaacagtccccagagtgtgatgttccccttcctgtgtacgtgtgatctcattgttcarttcccacctatgagtgagaatatgtggtatttggttttttgttcttgcgatagtttactgagaatgatgatttccaatttcatccatgtccctacaaaggacatgaactcatcatttttttatggctgcatagtattccatggtgtatatgtgacacattttcttaatccagtctatcactgttggacatttgggttggttccaagtctttgctattgtgaatagtgccgcaataaacatacgtgtgcatgtgtctttatagcagcatgatttatagtcatttgggtatatacccagtaatgggatggctgggtcaaatggtatttctagttctagatccctgaggaatcgccacaccgacttccacaatggttgaactagtttacagtcccaccaacagtgtaaaagtgttcctatttctccacatcctctccagcacctgttgtttcctgactttttaatgattgccattctaactggtatgagatggtatctcattgtggttttkatttgcatttctctgatggccagtgatgatgagcattttttcatgtgttttttggctgcataaatgtcttcttttgagaagtgtctgttcatatcctttgcccactttttgatggggttgtttgtttttttcttgtaaatttgtttgagttcattgtagattctggatattagccctttgtcagatgagtaggtggtgaaaattttctcccatkytgtaggttgcctgttcactctgatggtagtttcttttgctgtgcagaagctctttagtttaattagatcccatttgtcaattttggcttttgttgccattgcttttggtgttttagacatgaagtccttgcccatgcctatgtcctgaatggtaatgcctaggttttcttctagggtttttatggttttaggtctaacatttaagtctttaatccatcttgaattgatttttgtataaggtgtaaggaagggatccagtttcagctttctacatatggctagccattttcccagcaccatttattaaatagggaatcctttcctcattgcttgtttttctcaggtttgtcaaagatcagatagttgtagatatgtggtgttatttctgagggctctgttctkttccattgatctatatctctgttttggtaccagcaccatacctttcagttcttactatatctttcaacagtgagctcttccttagtactttgagtgtatctggcttataaactactatttcaagaatatctcttatatagagatccaagcatacctgattattataaagactctaggttgtgattgttttaatatccagtttgtctttcacaaagttactctattgtcagtgcatttgaaatcctttctttacgaagagtctgtgacatcttgtaagtgtaacatatagctttcttgaattgtctaccatactgtaagagctatggttcttggagtgcttcatagtgtcccttctggggtacgttaggatggaggacgcaggattttggatggaggaaaatgtgactcctgatattgtgtttgctgaattattaatatcactgagctgcctttttcttagaatagccactgctggtaggctaatatttctaaggtcaaactgattgctagaaattattcctgttgagatcagctaggccatttcaacctttacttaggttttattgtaattttcaagtgagaataataagctagtgttgcttcctaacttttctgtgtgtgtatttcagaacagaacaattgcatatgtttcttggcagattctttttcatgatgtggtttatgctggagttggtgagactgcttcagagcatttcctcttccccatcttatgcctttctgaaatagagtttttaatactttttaagtcatggaccccttttgacctgtcaggataatgctgtttactgtgttaatgaatgcaaagagtacaaaagraaacccactatattgaaatacaggtacaataaataagaagatctagtgtcaagtctaataatactataatttcaaagtagttatgagtataggtgtaattttgagatacctgcaacacctgtaatatagtatgaaagtatttgttatttctgttggtgacagaattgcaggtatgttaatactgttgtagttgtctgtaatcatagttgaaggaaatgctaaatttcagtagaggttagtgaaataaaagatacgtgttttccccctctaaggtcatgccctttttgaattctttccatggattccagattaagaagtatttttctaatgggattcctggttttctgattactatttctcctgagccaatattccagagagagagactgcgatttgcctttctttcctaaagggctgagttccccaaacattagtgacaaggcctatagtgctgctgaggctccagtatctttcacttattctgccagaagagacacttggttggtacattattttctttttcccagataattggctctttctgttttgagagaccaatacaatattgttaccaggctgttgagaaattcttatttctttggaatggtataaaccaaaggataaatcagtttttcagaaatccctagtctttttctttctaatatgctcaaatgttaatcttatttataaatcttgatgactctttctttattcaagttgatatcaggttaggaatttgcgatatgggattgctaatttaaaatacaccagttattcactggactaagaagaaagatcaaattggcttgcagagaattctttaaaaacaatgaaaacaagaacaaacaaagattttataaaattttatccattgatcctacattctgttgctcaagagagaagcttaccaggatgtgactttctgaagccagtgaatttatcatgactacctggtttagcacatagattcgcaaaggcatttcatgtccctgggcccagtagagagaatcagcagtaagaatacaattactttaattttactgtagaaacgtaatcaaaagtagatatagccgggcgtagtggctttcgcctatagtcccagcactttgggaggctgagatgggcagatcacgaggtcaagagatcgagaccatcctggccaacatggtgaaacctcgcctccactaaaaatacaaaaaaattagctgggcatggtggcatgtgtctgtagtcccagctactcggkaggctgaggcaggagaatcacttgaacccaggaggtggaggttgcagtgagccgagattgcgctactgcactccagcctggcaacagagcgagactccgtctcaaaaacaaaaacaaaaacaaaaacaagaagtagatatagatgataatggaaaagggggcaaagttacaaagggacaataaccataataccacccctgttaactggatttttcttacatcaaactgtagttgttttaaaataatatgtatttagctgggcccagtggttcacgcctgtaatcccagcattttgggaggctgaggtgggtggatcacctgaggtcaggagttcgagtccagcctggccaacatggtgaaaccctgtctctactaaaaatacaaaaattagccgagcatggtgatgggtgcctgtaatcccagctacttgggaggctgaggcaggagaatcgcatgaacctgggacgtggaggttgcagtgagctgagattgcgcccctgcactctagcctgggctacaggaatgaaattccatctccaaaaaaaataaaataaaataaataaaaatatgtatttcagtcatccagttgatgggccctctatgttggttaactaaagactagagcatacagttagaaacttttatctgatttatccaaacatgggatcttcctatggtaagtctgctgttactacactctgagcaataggtaaaggaataataatttaaaaattttggttaaaaactagttagaataaatttcaagttgtgtagaagagaaaaattgtgtttaattataacagtaggtttcggttcattttgtgatgcatagaaaatgtgaattacattaaaaaaatggctgtagttgaaagagttgtgttcagtaggccactttatgaagccctacaaaacagtcatcagtattcccaaataaaatacaacactgataatcaagaatcattcttgtttttagccaaaacagtttgtgtgtgagagtgtgatatagtggggagatatttactgttcatgcttacttcctttttgtacttgatcagacatctttgaatgtatcagtcattctcgaactttatttgcatcagaatcacctgtaaggcttgttaaaacacagactgttgggtaccatcctcagatttctgattcattaggtcaagagttggacccaataatttgcatttctaattgccacactttgataaccactatattgtccatttaatttttcctagcagtagtgaagactcacctgataatctttggcttaatgacaggtggtatctatgtgacatgatagaacacctcattgtattaaaaacaagaggaagcagtttcacagttgaaagaagctgtataataaacctaaatggaactctgagccttgatctcaggaacattcaaagtcctctagattcgagagaaatttccttatagtcttaggaaatatgggggtcaatgagatgttaatatttttaattgtgaaagttctgattttacaaataaacttaagtgcgacatcagtgattgtgatttttgaatttggaattagtgattccttgataggagctatagagatctacagctatatatattttttctggtggctgatcattgtattctcttcagattgttgtcactgtcagttggttttcgggaagaggctttcaaattatctcctatggccttttatatgttgattcattcaaatacygagtgaccatataatattttaagtcaaccaggacatgtgaaagtgctcagagtgagagaatatatgagtactccgtgtatcaccagcttaattttctataaacctaaaactgctctaaaattttaagtcaattaaaaaaaaagtactcagagccaacacatttgtctgaacaaaaggagaagaggtgagaaaatgtacgtaagtttggagaagaaagatcctgaatgtgcaagggtttttttcttcttcttaaatctctgttcatttatacatcccaacatcaacagatgtatgatttagcatttgccctgcacctctggctctagggaccctggagttttgtatatggataccctgctgcagtgaactctgtcattgttctcaacagctgggaatggaatatagctcattaagacaggagatgttatccaagcctcccctggcatcctgaagagtagtgaatatgttttgcttcctgagatctaaagtatccctttcgttaccacctagtgttctcttccttttattgaaaaactctattggccccattgccactttgaatgatgtgtacagtttatgccagctgttccttttcttaatcctttctccttcttctttgcctttttattatgtttatggtgtgtgctgtgccttgtatttaaaaaataaaaccctagtgtaattagtacatatcacttggttatgtaattaaaagaatattaaggacagattttcacaataaacccctatcattcagacatccctgctccctttkgtataaaaagcaactttgctggagagagggttgcaagtttaagtttctcatacttatcaggcgagggaacttatatttgagtttttattttatatcagatgcttagtcctattactccatttgattgtagcaataaatctgtgagacataaagatataagaattattatctcattttgtagatggggccctaagcatcagaaagatctaaaacccaattagtaaattgtgaagcaggtattcatatctttgtctttctggctccgtcatctctctgtactatttatgcaacctgttgctgagttatgtataaatttagatgtctgtattcattttttatgtggcatcgttgtctgcttatgtggcatgattatttagggcaaaaagaaagataagaggaaccatgttaaaaatatcacttttatctggagattcagatttatatctaggtcatcatttttctattcggagagttattcaggctttacaaatgaaataggcagggatgttcaggaatagcaaccaggtgctttctttgcaactggagagaagaaaataccaacctctccactaatgtatattgggagtttactatgtgccagccacatacatgcgttattttatttaatcctgtaggtggtgtgagagtagatgtggaaaatgaggtccaatgcatttaaataatatgcccaaggtcacatagcctgcaagtgtacagctggggctagagctgccatctgattccagagctcaggctctcaatcactacgctacactgccgaggaatggcagtttaagaggtggaagtcgtgtgacatagtaacctagaaaaagagaggtaagttatttgaacacctggacattttgtttttccatcaaccaggaagaaatattgagataatggatatacaatcatgcatcacttaatgatggagacacactcccagaagtgtgttgctagttgatttcatagttgtgcaaacatcatagagtgcacttacacaaacccagatggcatagcctactacacacctaggctacatkgtttggccttttgctcctagagcacacacctgtacagcatgttattgtactgaatagggtatttgtaacatagtgatatttgtgtatataaacatagaaaaggcatagtaaaaataccatagtataatcccatggaaccatcactgtatgtacagtgtgatgttgatggaaatgttgttatgccgcacacaactatacatttatccatcctcaaacgctaatctcctaaagagaaatgaaagcacatgtagagttacttggtaactttttattaatccaagaaagttagttacatgatttctaaatcactcctgttcggtataagtggaacctaggggttttgagagtaaaaaaaggaaagttaaagcagtggcagagaaaggctaaatgggtttggcacgtattcaactttgtcaaagggaatgtgaaggattgcagttcacttttcatgccaaggcatctgtgatgatggagagagtgatgtcatatggtttggcaaattaactgcataaccttgaatgtagtcaaggggcttatcctactcttttttttctagttaaagtgtctctaaggttggcctttctgacatcgtggccagactcatacaggcaggacttaacggaggctaaaatcattagtatacatatacatacaaatacttcttcagatatgtattttctgtaaggaatccaaactgtaggaaaaggataaaataaagtttttagtaaggaatatattttaatggaaataataatatagtacccattagtattcatttcctttaaaatatagatgatattatctttataagacatggtatctttattttattgactataaatgtactagtgaaatgtttcctaagttaactcttgaaacacagattctaacactggtattgtacagaacccaaccatccatgttggagagtgtctgtgctgctttaattagttctgatgtaataaaccgtttcatgtttagcattttagatttataatatggtctagttggcttctgactacagatcattgagtgaatttatatccaattttaaaattttgacaagtaggtgaaaactggaggaacgacaaaggaacattttagtaaaaccaagaaagacttgtctttagtcatggactgtggcactaccacttatttgagacccaggcgagacttgcaagcagatttaccacagtcagggtccaaagttaggaagaaaaaaagacatgagaaaagttcttcttatgtgaaaagtatagtagtccttaggtacataaatcctccttggatttgtgattgagaattcagttgtactgcttctttgcagtaaaccttacttttaataatgtgatagcttttttattttcaaaaaatcttccttttgaattgtttttagaaattagttttggggactagaggcctggtagacctacaagcacagattgaatatcccgtatccaaaatgctttggaccagaagcgtttgggattttggactttttcaagttctggaatatttgcacatacatattgaggtatcttgggagtggaacccaagtctaaacacgaaattcatttgttttttatatacatagcctgaagaaattttatacaatattttaaataattttatacatgaaacgggtttatgttaagtacttgtgtagaattctctacttgtagtgtcgtaacgatgctcaaaaagttttggattttggagcactttagattttgaatttttagataaggaatgctcagtctgtacccaatacttactatttctaatgttggggaagccagtaattccaaaaatattctaaactttttctttcttcattaccttgaacttaactcttatattgtcattcatcaatatatgacccatcatttagtaatattttagaaacgtaaaaggagggatgggctcaaaaagacaagatttatgataaatttcttcagtgaaactcctcttaggaaatgagtattagttccactctcccactgtaaacaggagcagagtaaccacactgatcaagagttggtgcttcgttttgtaggtaatttattttcctgggtgccaagtggtttttatatatggagctatggtcataacttaatggcaaaaaatgaagcataatgctaaaagaaaacatagttctaggagaaagcttgcttttaatacctgtttcttctagaagtgaataggactttggtgtgggcagtttaaaagttggccacatcaggttttaagcttggaagccatgtttgattttgaatcttagcccaagaaaaataaataaattatttattccaatataaagatgtttggaggtgtcagtaattgacttatttagcagcaataaagcaattcagataattttagaaaatttacttttgaggaggaattctaataaaggataatttaaacaattacgtgtgagaaataactatttactgaacaggaaatagggttgctataggtggtttgagtttaaaactagagatttgctttgaatgtagttttttctttgagatttcagggtgaaaattgcatggctggagcatgacccagaaacagccctgccattgattgccactgggaatacagtaattgaagatttgcctgtgttgattgactttcagtatctgattacagaagctctgagcaatgtatcttggtcttttatctcctttgttgcctcctttcagaaatgcttctaaaatgtgtctggtttatctatagatttttggattcttagaaggccacttaaccatttctgtttagtatttaccagttcaatcaatatgaatagtaacaaagaaaacctgaattaaaatgtactaggattctgagactgttatgtctggtatataatatacttctctaatttattctttgtagaacctcatctctataaacgyttgtgttgaaatgctttttggtcttaagtgatggaatgacagcctgtgccaggacattgtagcttgtggatgcctactcttttcaagtgactcatcggtacaggttaatattttgagtaaatctttcggaattaaattcagtactgtcaacaatgagaatctggctagtttatgtagagcttaacagaggcagaatatattaatggactttagtgtttttaaaaaagggacattggtattgtacgctattctatacctagctctaggggtagcatgtgcagtatggattatttatggtccactccttgccacaggtcttctgtgttacctttaaaaagctagggtagtgctcggctgactgtgccatctctgtatggattttctgtttatttgttttataattttgttttatagaaactatagtatgatgtcagaaacattggtggctggattaggtacagtatgttggaaaagagaaatgtgttacctgcttaacaggagtacagtttgactcttctgtttccccgatgtgttaatctaatgatttgtccttgatggtatgggagtagctggtgagaaaaaggaagggaaggaagatgaggtaattgtcctgaattgtccttggataaaggatctaacttcaagtctttgcaaatgacaaaatgagaaaagtccacaaggcatttgagaatacctcttctgaataactcagtttaggtcagagaattttatttcagctcacgtaagaacttcgtttgtttccagtgttccctgtattttcataatcaaaccgtagcctctgccttttgatgttttgttttggtcagcactttggttctatgtattcatgtttttgttgccatttttgatttagtgtaggatttgattaatgactgcatacattttaaatgatgtcacattgaaatgtacatttgcacaaatttatgtataatcagtaaacatatgtttttgttctgtttccaagatgcctgtttggttgtagttgtttccattttgtcctaggttaaagaaccttagctaatttcaatcagccctgagttgtcattcctgttcatcactgtcacattaacatcattcctcttcatcaatgtcacattagcagcaaatctgaacttgctgattagtaaagaggatggaaatcacagctctgtgtgtgtccaaatagctactcatcagcaaagcttgtgatgggrcctgatggtttaatgcaggccttaatcaagggctaggaaatgttttctctgcagtttaacctagtagtattgaattacattaacatgtatatacactcgcatacacatacatagtagtgttacatcaatgttcaaagtcaatcaggccaaatcaaacaaaagaaggaaataaatcttgaagatgactttttttgtgattttagtcagcaaacataaacagcatattttcctttggtctcattgatatcctcatatccagctgaagaactgcttgattaaaagtatgctgtctttggtgacgtggactgaaaaagtatggggtaagcggggtgaattttatgcttggagctgttattatcccatgtggtatctgttgcttacttctcagtgatacttgtatagatgtgtcaacagatttgatgttttgtgcctatgaggcagaatacttaaaagggcatgagagtcattacttggagacgagatgggccctcatttgtgctcacaatatctgtgtgagcacgtggaagaaccgtattttattttttgaaaacaatctttttgagtgtcaaatgcttatctgttgagagcccactgtaaaactgaatgtctttgtggtagttgacatttragatgatgttttttaatgcctcattgtgggaggttaagtgtcattatcccgattttactcatgaagttctgagcaggtaagtgacttgtccaaagttaccctcccggtaagtaaaagccagaccttgaatgcaggccttctgacttcagctacagtaattttgtctttcagccgtgtaacagctgccttgtttatgtggctaacatgatgctagataattatgagaagaatttcatttaaaagaattcctcatacctggaagtttacaatcctatctgaatgaccacagctgtgtgaatcctaacttcagtcaagataagcagtaatactggaaacactgtagaaagcaaggatggcatcacagtgtctaccagcattctgtgggaggattagaggatttgcatgcagaccaagagcagcctgagtaatcaggactctggtactgttttatggaaagcaatttaatgcatatttttaaagcaatatcaactcttttatatgattaaaaatgatttctaccttatacgttttaattttcttttatagatttcagccctggaatcatacatatctatcctccacacatgtcattttcttcctctcaaggctagtggtacacgtttaaatatttccagcatacattttgttgctgttagaaactatgaataagcatcatcattttcttccaagatttctgtcactgtcaacatcatctctttcttttctgatggctcacattaatgcaggcagtgctaacacatttgtttcttttgtcttttatgacagtctgagttttaaaactttgcttctattctgagtttagtagtttttgttyagaaatgaaactttgaggcagcagcatcaggtaatgggaagagtgtaggcttttgagacaaagacctgaatttggattcttgctgctccacttactagctttattgagttactcaaatactcctagtcacactgtcctgttcataaaataggggttggttgtgctattgtgaggatttgatagggcaacctaagagaaatgcctgccatggtcccttactcagaataaatgttcaacaaattacaattctcctttatttgcagtactgtttctcatgctttttaattagatattttactccctctgtttgcccctccctcctcctctttttcttcttctctctctgtttacagccccgaagtcctagtaattcttgagatcacgtacatccactttgaagtttactttgaccatgctctgatcatacaaatagtatgtttccagccagccttcttcaaaatgttgctggtagcaatttttatcacactactttttccagtcatacccattgtctaccccgttacctattttatctgttcttgtttctttctttcttgtcagtccattttaaaggcctccttatctagttgacaggcttcctttatcctggctatgggagtaggtttggctgtgaataacagagactcagcataatagtgatgtaacaagacagaattttatttctcacatagaagtgtgggagtcaagtgctggtgtggggactttgatctgtcttaatgcttcgtcacatgtgtgctccattcctaaggtcccctcctggtccaaggtgggtacttgaactcttactattgtatctacatattaggcagcaggaagtagatggggcaggcagcaggaagtagacggggcaaaagtaagacatatgcttctctttggaagttgcccacactgactaactcttagatttgattcgccagaactgtattacatgactatgtctagatacagtgaagactcagaaatgtatcctgtttcaattatctacatgcctaaaaggagagaatggctatttgaggacaactggcattgtctgccttgttggtaatatgtgagatgtgctatatccttagccaaggtttcaggaaaccaaatcctttaaattcacactgtttatatatcttgatttttttttttctttgagatggagtctcactctgtcgcccaagctggagttcagtggcgtgatctcgactcactgcagcctccgcctcccaggttcaagtgattcttgtgcctcagcctcctgggtagttgggattacaggcacccccccccmcaccacacctgactaatttttttgtatttttagtagacatggggtttccccatattggccaacctggtcttgaactcctgacctcaagtcatctgcctgcctcggcctcccaaattgctgggattacaggcacgagccaccacgcccggcctaatttcatactatatagttatctattgttgtcccatactttatctttctaagtccacactatctatggacatagaataccacctgtactctattttgttcattttcttgccgagagaaaagtgtttcttctagtcagattctttgttttctcctgaactacccaccatggtcagtgactgtagtcttaagactcagacaaatctagcagaatgccatattggatttttttcccccacattcctctgaaagtagtccaacatggattttactgttgttttaaaccaaaataatggtagtataacactctttcatttatttttatcaaagcatctgtggaaatatattccatttttcaaatatatcagtgctcaagtgtcatcrtgaaagaacaactaaccaaactgtattgaagatggggttgtaaagagttttacatgttgatcacaataatacatatttttggttcattttgttttcttttataaataaatgtttcctttctttagtaggaacaactacaagagctttccctgttttttttggtatactttcttgtgactgacaggtatctgaggccataagagtatttttattttaaagatgaggcaattgagttcagaggttggataacttgcccaagaccctataacaggcaagcagcagatcccagaatcaaacccaggccgtttgaattcaaattcacttcctttttcactatggtacaagaattggaaaataagagcattcttttgcatattagagactgaattatcaaaattctttattgctgttctttcattatcggtcatccttcatgggagagccctcatctctatacagtatgattcagctgggatagaattgtttccctttatttgctgttaaatggtttcctttccatccgtagcttgacaaacatctcctttctggttcttaaaatattttactcttagaccttttcccctttcttctctgattgaatgcataatattctttaacagttgtatatatgctctcaaggaattttaaatctcttcagggacacataatacatgtatgaaaaaggatttgtaggaaaggagtggcagctcatgcctgtaatctcagtactatgggaggctgaggctggagcatcacttgaggctgggaatttgagaccagcctgggcaacaaagtaagacctttgtttctacaaaaaataaaaataaaaaaataaaaaactcaatcaggtgaggtagcatgtgtctgtacccctagatagccgggagrctgagggaggagaattatttgaccccaggagttagaggctgcagtgagctgtgatcctgccactgcactgcagcttgggctacagagcaagaccctgtgtcttgaaagaaaaagaaagaaagaaagagagagagagagagagagagagagagggagggagggagggagggaaggaaggaaggagggaaggaaggaaggattacacttagctctgtgaaatagcttgggtttttttttttcttagtcttctttattggtacatttttaatataaactgctgctgatctgtcattctctattctggaaatgtttacttcattgtctgtctttatcttttacccaggtgtcttgtacctgtggtatgcttaagcctctgctctacctcattacttctagaaagaacaattttatacctagacacacacatacatgtcttatattacagagagtgagacagagggcagtgacagagtgtcctgccctccctgggaatggacagagcagcattctttctgtcctacttaagcaatgtgatgcttcgatttggtatgagacttttttttttcttgtattgtcttctttttattgttttattattttattgtctgacaaaaatggccgtctctcctgtatctctttttacccttaaccttttctgctgggttgtatttttttcctattgcataactgcaatgtctgaaccttaaattcaactcaaattattaactctgaaatgaacttcctttggcaagactgattgttaacagagttctagatctcagttgcattctcttccatgttgatttaagtaaagacaggctgtcttagtacctgttaatcaagaataggaaagtctgtggggtgggggggtatatatattctctctaaaagctaactataaaatcaatgtagtagcttgcatgatttaataacttggaggttttttttcctttttttgtgtgacttagcagtttttaagtataggaaaggaaattataatatggttttataaaaatgaaacctgtttgaagatcccatcattgatggggcctgaattttttagttggtctttgcgaaggagatcattgctctgtgaagtttatgaatccctagacctgagaatttctaccattatcttactaaggaaatgtctatatgctctcccagaagattctaaggaggcatgccctaggggcacatgtgctgtagaggtaatgagttcactggaggaaatctcacaatcccttcttgcttgatgattttttgataattctgtaattcaggtgtgaaaaaaaaatcaccaccagcaacctctaaaacctgggaggagcagttcgctatttgctggtagtagttttgaggactttagaaggaaggcactagataaacataaggcattttttgttattactattgccattacttgttatcatttatgtagcacctgcttcactaatgcaattgcttataggagctgcaattttactcctgatggctactttctgtcattatgtaatctgtggtaaaccacataccatctaaatgttgccactggatttcttttttcttcaaactccagccctggaatactgttgctgtcctatttgtcaacgaaccactaatagaaatttcttaggaacatactgtactagatgcctaggaaaagaaaatatattaaaaaccrgtgtaactccaaytgattaccccatcatagttcttattacttcagaaaactattaaaagaacactaataagttttccatgcatggkttcatttttataaccaattgctaaattgctaagttgcctttttattcactttcaaatttacaaacaatttccaagtctgtgctttcatttaytaatgcaaagctctttgcatatatatatgtatgtgtgtgtgtcctggtaaattgttatgccttccttattcaatagctttgggtctcttattctgaaaaattcctgccagcagttatcaatttgcatgttatggaacaatgtattgacctgatagactttgccagttttacttgcaaagctaatagcttcccattatatagyagagaaaggctttgttacatagacacagttattaattctctatttactgctcatcagaaaactaaaaaaaattttgttttgaaatttggaatcttgatgtttggaatatttttacacaatgaatcgaagcacttcttgctatttccccttttttgacgttattaacaattttgttttttttaattctaggaaaaggaaaggttttacattaagatatgcaataataaggaaaaccgtggcacatctgaatatttatgtctacatgaaataatctttgagaaaatacatttttgagttatttgtaatatagtgtccttaggtttaattaagctaattatagtcattatttacctttttcatattgaaaatggttctccatattttttcaaacaatttgagaaattgtgcactatgcaggaagtatcagctagaagtatagttaggaagtatcagttgccgtttctgagaacctatgcccaaatggccttcagcttaatttttcacgtttgaatattggtcactgttacctctccattctggggcactgtggttagaatctccctgatagctatagaaactgttggctgtaaacacttgggaataacgatgcatgatttctccttaaatagttgcctcataaataactactttcaggcatgaatcatccaccaaggtatatttgtttttatgttatgttacgttacattackttatttattttttgagagagcatctcactttgttgcccaggctggagtacactggtgtgatcatggctcactgcagcctcaacctcctgggcacaaatgatcctcccatctcagcctcacaagtagctgagactacaggcaggcaccaccatgcgtggctaattttttgtattttttttttgtagacatgggggtcttactatgttgcctagactggtcttcaactcctgggctcaagtatatttgcatattaaaggaaaattcttagtggatgttggcctctatttggtgaatgaataagcagaatgatagatttaaaaattcggggtaatattgggactaattttttgggaaagaagttttccccaggcactgtaccctgtgtcatgagtgaggggtgggtgtccagtgaggaattccagcrgaggctgaagtcccatttgtggtggtcatacacttttgctttccggtagattcaaggttccagggctcttgttaggaatctttttttaggacacagtgtaagtgcattttaagaacttattttaaaaattattttgaagcaatgtgtgtacaggccaagacccttggccttctgaagattcactgaaaattcaactggcaaaaggcagattaattggagaaaaggcagacaaattttatcttgtgtgtgtgtgtgtgtgtgtgtgtgtgtgtgtgccttcagaatgaagacccaaagaaatggaggaaattgtccatttttatgtttaggttcaacaaagtatagacaatcatgtataattatgattggacaaaagagtatgatcctaattctcatagaaggagtggggaaatccagcaaggcctgtgtgtctctagattcttcctatcctctctgagcatgcatgccttccttctgggtgtagggcaggaccctttctggaattgggcaggggaaggttttatgacctatagtgaaacaagattggtcagataagttacttttggccagtttttacacagaaatgtggagagaaagttagggtaatatttttaggttttatgactggccttggggtaaaggttctggcttctgtgaccagccttgggcaagagggattctagtttctgtgggtagccttgggggagaataggactgaggaggggagaagatcagagaaaaagcagcttctgaggccacttctgaacccttcattttgggggtattgtcttctgagccctaatacatgtcacttggagagggcccacttaaaggtgttcagaaaatgatttgaaatggtttgaaactgatctaatgaatggcatttaattctatgtttgattgtcagtaccattttagtttttcttctatgtattcagaaaaattttattttttttttgaattgttggatgcagaataaaaacttacaggttataaatgttaataatattaagtgtgtttagactagaaatatgctaattgactgcctgaagacgaccatagctatcaaaagaatgttttgcttattttcagttatcccacaaacataacagcttgaatatattgagaaacttgagctttttagatttgtccttgaactcttgattggctttgcaagttgttttctggatggtgtggtaaaggatttaataccctttggtattgattttaaaaggtaatgagaattttttttttgatataatcctcacaaaatatactttgtgtataagttgagtgtcctgacataatctcaatagcctaaggttttcccctaaggcaaatttttaggtttctgttcaatatttatttaagctaattcaagcatcgatgatataatttaattaattctgtttattccacccaagctcttatcagttgatattccctagtgttgagtctcagaggagtatttttatattttcatctctatattttatatttatactgtgggcattttttcccctcattttacctggtctcttaattccatttctcctgagttgctgcccccttgaacagcctcatccatccttcatacaacaagctttcatatatttaataactattattaggttatccttatgctgtcatttcttcagccacaataatcccagttcctttaagctttatttttatcctgcttttatctagcctttaatattttagtggcttcttctagatcttctttagaaaagagtggtgtgagattataaaacgaacctgctgctagaagtgtgcttgtcacttytctatagccgtcaaattctttgagatcctcaaactgaagcatccatgggaacatttattatttgttcaaatatggccataaaaatcgactttgcaatcatattgagtcatcttgacagtgctgtgagtgacagaaactaatcttatctgctggctagcattttaaaaatgataaatggaccctcagtctttagtttgcctgtaaatgaaattaggtttatcttatttctcccagaaatagcattacttagaaaattttgaattatttctttctgaacaaagttaaatggccmaggctaggggctaaattttgattattattacatacatatattttttgccttttatcagcaaataatggtgcattgggaaaattcaagtattaagaaatcagcatatattttctaaacagaacaaagattcctcaccatctatacttgcagcctgagaaatatatgttcaaagtaaattttactgaatatttgttctttgaatttttttttcagatctaaaataaagttccaaatcttgataatcacagcacgtttaggactaatgtcttcattgttttatctgtcttccttttagttgcctaatcatttaaagatcaaattaaattgaaatctaatataattcctgctggtaaagtgacttttatagtaacttccaccatttatttgttttcttagtaggaaactgatttaccttacttctacatgtgtttttggtatctttattctgaaattgtcttttctttgtcaatcaggatctaggacttcagaacccatttgtatcaactcctataagaaactaaattaggtcacctaacagtgtcaaatgcctttttcttctgcgttttcactgacattttagaactccaatactgtcatactgtcatttttttctttcctctattcttaatctctaggaccatgttagtaagtttgttagatattttgtcaaatgtgatttttaaccaaatcgagggaattaaagcaataacctttttatgttctgtttctaaagcaagaggacattgctgtgcagggttgattttttgaaaaaccttgttgtcttccacttgtaggtttccttccctttttttttttttttcccctggtcactgtttttcagggctctttgtatcttgtacatgaaataatatgaaaagaagatttgaatgaatgggaggataactcttcactttttgtctcgattattatgtttttaaatttcatttcactttgggcctttaaaagcatatgtgtgtgtacgtatgtatgtgtgtatgtatttatgtgtttagtatttggaaatttgtgagggatgaaaaggttacttcaacaattcccttgtctatgtggtcgctatttctctgccaaatactcataaatgagttattcttttcctcccccactcttgcattatagaagaaaaaagtaatgcctcatttgttagtatcattaagaaatgaaatgtctctcaaaagttaattttccagataactaaatcctacctctgggaatcatactagctcctccatttttagatgttgaacaagttataaatttcactgaccctccatttcttcttttctaaagatgtgcatgtaatacctattttaatgatttgttcaggggattaaataagtgtaaaatgcctagaaccgcaraaaacttagtatttttgagatatcaagaaaactggataccttatagctgatcaataaatactaggttctttcccttttcccattaaatgccatatcttgatttaaattatctttttcttatttcttcctacactcatagtcataaaatcagttagattttacattcaaattttaaaaaattttcctttctgtatttattacagattctccagttcacattctctttatcattcacttgaaccattttcaatattaaagagtcttagaagcaatctagtttgactactgtcccaatagttgaattctgtctgcatcctttcttcaagttactttgcagtctatatctattgcttaaatgtgctggtgctagtttgaccctatataaccacaaagaatgtcagatctcagtttcatgtggcacccttccaatacatgaggatggttggcatgttctcactgagcctccctttttccaaatgaaaatccctgattaccaatttatattttggggtttccagtgccttgacattygggttactatttcctgctgcttcagttggtttaacttgctcttggattggaatggattctagtctagatatgatttaaccaatccagaggagagtgagatgattacttctcttctagatacttctgttaatgtagcctgatatcactctagataatgttttatagccagtcactctgttgattcatagtaacttttaagaattctttcttatgggtactgtttttaaactatatctattttattttttaagatcagatttattgatatatagtttacatacagcaaaatttcaccctttttataatagctggaaaacttttttttttttttttttttyccgagatggagtcttgctctgtcacccaggctggagtgcagtggcacgatcttggtcactgcagcctctgcctcctgggttcaagtgattctcctgcctcagccccccgagtagctgggattacaggcatgtgccaccatacccagctaatttttgtattttttgtttgagatgaggtttaccatgttggccaggctggtctcaaacttctcacctcaagcgatctgcctgcctcagcctcccagtgtgctgggattgcaggagtgagccactttacccggccttagctggaaaacttgaagagttttgacaaatgtatacagtcatataactatcaccacaattgagatataaattgtttccttccttttcaaaagttccctagtatccctttgcagccggtccatttccccacccccagcctctggcaacctgattcctgtccatataattttgtattttgtagataccattctattcttatatggttggcttctctgctctggtataaaactttatttatttaaaatttctacatcttagtttggatacatagctctagactgtcatgatatttttaatcccaattctgtttttattttcttccctatctcataacatgcataaatttgatatgcattttagctgatcctccatgttattggggataaaaggccaaagataagagccaasgaggaaaaacccacaaaaattccttatttgacactagacaacattatcgaaggtgacatttattcattaatcattctcttttgatattgtgctttaatccactaaactttattattgttcagttcatacttatataggcatatgttggaggtattccaggttcagttccagaccaccagaataaagtgaaaatcactatatagcaagccacatgaattttttagtttctcagtgcatataaaagttatgtttacactatagtgtagtttgtaaagtgtgtgatagcattacgtctgaaaaacaaaatatatatcttaatttattgatcagctttattgataaaaaatactgatgatcatctgagccttcagcaaattgtcatctttttgctggtggcgggtcttgccttgatgtttgtggctgctaactgatcgggatggtggttgttgaatgttggggtaactgtgccaatttctggaaataaggtaacaatgaagcttgccctatggattgactcttcctcttatgaaaaatttctctgtagcatgccatgctgtttgatagcattttactcccggtagaacgtctttcaacattggagtcaatcccctcaaacgctgtcactgctttatcaattaagtttatataattctaaatcctttgttgtcatttcaacagtgtccacagcatcttcaagagtagattacatctcaagaaatcactttctttgcttgactataaaaactccttgtttgttcaagttttatcatgagattgtagcaatttcatctttaggctccacttctaattcgcttgctgtttctaccatatttgcaattacttcctccactggagtcttgaacccctctgaatcatcgatgaggtttggaaccaacttccaaactcctgttaatgttgatattttgacctctttccataaaccagaaatgtttgtaatggcatctagcatggtgaatcctttccaaaaggttttcaatttactttgcccggatccatcagaagaatcactatttatagcagctatagtcttatgaaatgtgttttttaaaataataggacttaagaatccaaatgactccttgatgcacgggctgtagaacagatgctgtattagcagacatgaaaacaatctcgtttttatgtcaacagtgttgacatttcactagtgtttacagcatcttcaccagagtagattccatctcaagaaaccactttctttgcttgactataaggactctttgtccgttcaaattttgtcatgagattgcagcawtttagtccatctttcggctccacttctatttatagagaacaagcagagtagatttagcataattcttgggggccctaggatttttagaatggtaaatgagcattagcttcaactttaagtcaccagctgcattagcctctaacaagagaatcagcctgtcctttgaagctttgaagccagccattgacttctctctagctctgaaaagttctagatggcatcttcttccaatagaaggctgtttcatctacactgaaaatctgttatgtagtgtagccaccatcaatgatcttggctagatcttctgaataacttgctgtagcttctacattagcacttgctgcttcaccttgcccttttatgttatatagatggcttctttccttaaacctaatgaaccagcctctgttagcttcaagcttttcttctgcagctttctcacctctctcagccttcaaagaactgaagagagtagagccttgttctggattaggcgtttgcttaagagaatgttttggttggtttgatcttctatccagaccactaaaactttcgccatgtaagaaatgaggctgttttactttcttatccttttttcttggttcactagagtagcacttgtaatttccttcaagaacttttctttgcattcgcaacgtggctgtttggtgcaagaggcctgtcttggctttctacgtgccttcctcactaagcttaattatttctagcttttcattagttaattakttaatatgttttcttgagacagagtcttgctttgtcacccaggccagagtgcagtggcacgatcttggctcaccgtaacctccacctcccaggttcaattgattctcatgcgtcagcctcctgagtagctgagattacaggcatgcatcaccagtttggttttttttagtagagacgggtttcactgtgttgytaggctggtcttgaacccctgccctcaagtgatctgccygccttggcctcccaaagtgctgggattacaggcatgagcaaccacgcccgtcctctagcttttacagtgagagacgtgtgacttttcctttcacttgaacacttagaggccattgtagggttattaattggtatattttcaaaattgttatgtctctgtgaattgggaagccggaggagagagagagagatgagggaatgatggccagtgagtggggcagtcagaaggcacacatgcattgattaagtttgcagtcttgtatragtgtggttcgtggtgccccaaaccattacaatagtaacatcaaagatcaccaggatagatataataataatgaaaaagtttgaaatgttgcaagaattatcaaaatgtgatacagagacataaagtgaacacaggctgttggaaaaatggcacctataaacgttctgggtacagggttgccacaaaccttcaatttgtaaaaaatgcaataaagcaaagcatacttcaaaaaacatgtgctggtacatgtattttaaccaaggacagcacaagaaatcttggcagatgtcatgttgaaatctggaacatgactttaagcctagatttccattacataaaagtctagtaaccttttctgcctactaatgtgactttgaaagtatcatctggcacactgtttattgaaattcacatttttctttgtcatttttgttctttcacatttttaagtttgaaatttatgtgcctgatactttccatagccataagttgtacaaaaccagtggattttgtttctcagttggctatttcttatgaatgaaatcttctctaaagtatatttttgtatttgaattgaagccatgctttttgttacaaagcccttgttgccttcattaggtattaaacagccctacactggcagggagaggtgttacgtaggaaatcatttatattaatcatttatatttactaaatgagccctctgagagcaggcaccgtgtctcctttgtgtactaatgtgaccccagaatcaagcacaatgccaagtacatagtaggtaccttcaaatcagaatctctgactctagcctaaacctctttcatacccgaatgtactgtattctgttgtattaaatatcaggccctgtttagacttgttttattatacatttgtggctattactcacaatagcagagttattcttcctgcaggaatttaaataataaagattttcttgaaaaatgtaactctaagtttgagactataaaatctatatctcagagcaaatctagcatttaatgacatctagcttttgctcaaaagtaatggccttactgtgttttattaccaccaacagtattataagtataaggctttttatactttcctttatcactcatttttattaatatcagaaaataagagataagcgtaagcaccaaccttaactgagatgcagttgcaagaatactgtccagagttccctaacttcacaaatgagggcatgttcctagcttccacattagaacctgtaatagcctttttgatttaacattgctggactaccacccccatttattcagcaaaacactaatttaagtgctgctgcaaaggtattttatagatatgattaaaatccataatcagttgacttcatgtatgggagattatactagatactctaggtgggcccaattcagtcagcaaaaagttcttacacgaagagttgtggctttccctgaaaaagaaatttcatttgtggacagcatcttcagctgatttccgagacttaggccccaccttcctgacagcctgtcctaatgatttcgtacttgcctacatagctcccacactattctaagccagtaccctgccgtgtatttcttaatctggatctccattggttctcctcctctagttgaaccctgactgatatattacccaatcagaatgatggctcctgataattttataagaaatagtgtgatgctaagcatgattcctagttaatcattctattcctatgcaacatatcaaaaaagacccttgttgcatgctgaattcttggactaaacgtactttttagttgcacagctgccacaaaccttactattgtatacttgctgattttgtcatttgattttttttttaatttctaggtttttctaaggatagattcatcatgttatttttcttgtctagagtacagagaaataatattttgattattttagttgtttcaaaattgctctcttttttggaaggagaaacgtaactgccgtgcattttactgtagtcagtagttaaatgtataacatgttagctcaaagattaaaatgtgaatattctagagcacgagtacagagagttgatacaaagggggatgtcagttgctctgaagttaaattccaggattctgtcacatgctgatatagtgccaaagcatatggatctccatatggtgctgcttttggggtttataccacctgtaatctagctgattttcattcacttaaatttgtccaagaggtaagcaaactaaataaggaaatgaaaataatatgcctgtgttaaaatgccgaagtttgggatgagttactgttattacagtgattaccaagaaaaaaaaagattgattagaggagtgcattagtaatatagcagtagtgtttctatcacctcattaacagcagggaacagtgtatccatttctgactcgtggagagggaaattaatttttttattttattgagtcttcgtgagaagatggagttagatcattttggacatttttaaaagtaatagtaatgaatataaatatgttttcatggttcaggaataatgatattgtgaatggcacttggcattttgattgaatataaaaagtaataaaactggttgcattctgactacatgatattgcagttgttttatatcattaagaacctttgatttcagaaacagagaaagaaaaacatggctcaattgaaccatggtattcagacctcataaaaatgcttctctaagcttgaggcagagttattggtttatgtgtcagctagcattgttttacattgcatcttaaatattttaggctctcttcaaagcagctgttttaatagacagggcagaaatcattgaagatgtctttgtgttactgctgtcacgcaaaaacaaaaaggtgctacttgtctacagtctagcagacatttgacatttttaactgcaggtgttttattaatatccaacatgtgagagaaattgagccataattattgatatttgaaattacttcaaaagccatctatattaggcattacctcctttcaaccacagccacctctagggagagatggcagattggactgtttctgcagactctgtttgctgaaactcagtrgtgacttagaatgggagtaatgaggagggatagtttccttaactagtgatagaaatgatcatacatgtatgatcagcacagtccagctacatggaagtatctgccactgtattcatagcatctggcacagtatctggtgcaaagtacaaaacactgtattttcctgataataacaaatcatattttttcacacttaaatgtttgccattaaggtgtattttacccattaatgtgtrtttttactgttgtttttggcctcctcttaaatttttattaaatatttgaataaaatgagtttggtgcattaataaaggaaggaggaggacttacctttgtaaggtctgatccatttgcttttggtataattgaaggatcattgactgggttaacatgcactgagctccagtactatccttgccatttactagtgggtatgygacactgggcaacttacaatatctcaggcactgattgattctttattgataaggtaggggtagtattatatatcccagtttataggatgattatgagaatcaaataagataatggatatgaagtgttttataaagtgtgatatacatataaagggtattactaatcacagtgtgtctgtaatttacgtcttattttattctgactgccccaactaattcaggccttttgccatctcacacttggattgttcctatcttctgctaaatcaattccgtctcttgcttttataggatgtgttgagtagccctgaaataatgttctaaatatgttactttccttttcaaggctttttgctgtaccacctgtctactcttgtagccattatcttctctttatactccttcctccgatttcattccctgaactccttgctattcctgagctctttatgcttgccacctacgtgcctgtgcatgtgctgttatttctacctaaaatcctttctcccttctaacctcataatgtttctactcaacaaaatctgatttgtctctcaagactcatctcagatatgactttgtcccttaattttttttcctcttttgccaggcctgatgtttcttttatggaaatggaatagataatggtaggaatggggatggcagccggggagagaaagtattaccgaatttgattttctgttgttcccaacaaagtgagaggtgatcctaggttttattttgctgttggagaatttaaaattgtggtaagtttttatcgctcacktaacatgtcaccagtttctcccgcctccacccatgtctattctttggtgcttacatttgtactttaccgatmaggggattttatgtagatctattcttattttatgtaatatagataataaatttttaatacatcatataatataaattccataggaaatagctgtttaggggaatgaagaggtgagctatctagaaagcaaagaaccagtttttacattgaaaaacctcacagtttatctgttatgtagactcctttatattagcttttcttaagtcgtgctttatctcaggtggatctttaggaaaatagtaactttacagcccaggcctattcctgagactattaaaatctttgtagactgtactactatagattgatgaaatgttttattttatttctcagtaatttaatactattccctagaaatcattcttaatattatttgagtatcaaaaataatgtaaatgtcaacagaacagccatctatgtttaaattctaagttcctaagctctttacactaaaaatagaattgttgttatacattttctcaatttaaaaataaattgaggtctgaaagagttgtttattgctctgctcgccaaccttaatctagtgctggggcagtatctgtacctatctgmctgatctgtgtttcaaaatgctactaaattgatgccttttctttgacaaaatcaccatgaatcagaatggcaatcacagggcccccttgagttttaggttttgtggccattgtcatttcctcctcattatttgaaacctgtcctttcctaggcctgctgcttcaggcatcttgtagcctcctgcacgtcacttttcatccatggagccccacctgacctttcctatcccagtagctccttagatgtaacaattggcacattgtattataatttcgcatttatacatttatgtctccaactagactgtgagatccttatgggtaagggattatgatttattaattttctttaatcctatgccttgcacattacatgtagtaaatgtttgtggaattaaaagatggattaacgattgtaagatacctcatcttgttgtttcccttaggtatagcagcatgtcatgatttctatggatagaaaatattggggaaagcagtgaattagaaatgattggaaaaattgaatctagcctgtggggtgtggattaattcctgtgacagagaatggcctgggcaagttatttatctaaataatagtgaacaaatattgagtccccctcagcctaagggactgtgctgcacttgactattctttgtatagaccaagacatctaaatagatggaaaaactagtaatattaaaatacctttttttcttggtcactgagcatgtaatggttaagaagatggtaatatgttagcgatgtgttaactattttcacaggtaagacattttatgtttcaacttcaaagattacctataactttattcttgttagctatatttttctttatagtagtttttgagtaatatgtatatgttcctgtttttatttctttaataaaattgaaagtcatttaagttattcctctaagaacctaggtttatattcagaagccctagggactatttgaaagacacacagacagaaagagcacagacttgataatcaaattgcatgggtttaaattttggctttgctactccagctatatgattttagaaatacttactttagcatctttttgctattttggcatctacaaaataatggcagtagtggtactcacctcattctggggtaattctgagggttaaatgagataatgcccataagattgttagctattataacatatgctcgatagacaagtatttttaaaataaaaattccagtttggcatactgctacatagcatgccaaatgcaattttgaattttcaaaattttgaatttttgtaccttgtatatgtaaggtagttctgcttttgtgagaagattggccagatacattaggttgtttctgatagaaataggatgtgtgcatcacttagaaaattataaccacttgacgtgatttttcataaacttcattttacctgttagttgttgcctttagttaagttgttgcagtgcagcttggtacctacaccctttaacttgtcaccagctatgttcttcgtggattgtttgttgtaactttaatgaaatctagtcttgctgaatcactaaacctgttctctcctagaaggctctttattgggacctgacagatcacctctccagagccttcagacgtcctagctctctaattcttctccataatgagttttgtgctgcatgataaaatattcatgttcaaataggttctaaactaattatctgtggccagcagtygccactgcagtcatttgctgttagcttggctcaagttaatggcttgtatttcagtacaaatagtcccttctggctgtttcctgtcctgattcttatcctaaatggaatttccatacatatctagagttaagtcttcttcttttgaaaggagattttttgccctaccttttttcatctcattttattaagattagcttattttagtgttcagttccttattgtttcttatccatcttcaaatcctacatccctgccaaattcatgactcccacactgtccaaaaagaaatagtaaagcaccaactttaatcaaatataccatgtcagattttggaagaaacmaaaatggggtaccgcggtaaggatgggatctagtttcagtgtgtatgataaacatttctgcttagttgctagagacctacacagggaatgttacgataggaattaaccactttgggaagaattatggggctggacatgagggagataaggcactaatggaatatttttctgtgggtgttgttgaaaatgatggatgacttgctgaaggagtgggagagttcaatatcagaggactaagggcttgatcttcggggaatctgtacttagatgtaggtatgaaaagagctggagcccagctagcaaggagaccttcctgataccctgggacaggtccgtgcctggggccttcttgaatcctttctgcgtccctctgtttcagtgagtgagtgagtgactggatatgaaaggataagtcagagaaagaagatgttattaggcagatagagggtggaccacctttagaaattctaagtgcctctcacctcagcatcattgtggtcactgagctcttcagaaaacagcagctaacctaaagtgcttaactggaatgttggaccaaggagacaggtacccttttctttaactagctattagagcttttgttccacctgactttttcagaatgttgtagtcattaaactctcaaataccaccctggtttctcctccctcccccacaacccctcccttcctaccttccccttcaaataaaccaaacacaaaagtcttaggttgcattttttttcattcactatactctatatttcagttttattttgtttttaattgacatataattgacacataataattgttaagttgtgtattgattctctgccagttaaatggtatatgccatatgcattctgttaatggcctagggatttcatgggcccaaggttagtgctttgattttgaaatcaaaacgttcaatttctcatgaacttcaaattattttattttgaataaatagagtcaatagattcatagtgttagggcttgtcagcatgctggaatcacagatgtgtggtgaataaaacataaatgatttttatggcattctgaatagtaaaagtctttctgatcctaaatgcacaaatccaacattttattctctattgtacttaaaacagcacaaatggccgggcgcggtggctcacacctgtaatcccagcactttgggaggcctagacagacagatcacttgaggtcaggagttcaagaccagcctaaccaacatggcgaaatmccatctctacttaaaatacaaaaattggccaggcatgatggcaggtgcctgtaatcgcagctactcaagaggctgaggcaggagaatcatttgaacccgggaggcggaggttgcagtgagccaagatcagcactgcactccagcctgggtaacagagcaagacttcttctcaaaaacaaaaacaaaaaaccccagcaaatatgggaaattagtatgataagtgttttcccctcatgcattgtttctgacctgtgtcatatgtgtcttaatttatctgcttttttattccttgatcaaagaaacatgcctattaaaacacccacggtgaaatacttcctgaaaggaaatgctagctggtattttggttccttctcttttcttttcttttcttttcttttcttttcttttcttttcttttcttttcttttcttttcttttcaaataaaagcactttttgccctgtaatctgttataaatgtaaatcctgtgaaatatgtaagagggaaatctaataaagtatcagaattatggcttctttgaattcagctataacttggaatttaaagagttacatatgttgctttatattcattctgtatgtataacaccacaataatctatttctttaattaaatgcacaaataatagtttaagttgatgaagtacctgaggcaccggggagaggggtgtgttaaacattgactaatttaatgagaaacgtgtttaatctactccctcctttaatgtagagcgataattttggaaattacaaacaaatgtacgtattcttcaaatgtctttttattttttttaattttaaacatatagattttatttttcttttgttagtttttttccgtaggctgtgactatrcttactgaaaggatatgacatagatataaactgttttccatggagtcccgatcatcttaagatatcagagttaacacttcaaatcatttaatacactttcatttgctcagaagagaaatgctactgatgactgcttccaagagaagcctaaggggcagaaggaggaaaccctgtgcccacctatcctccagggtaatcatatgaccaaccatattagccttccttacttttaagacataggaggagaaatttcctgccttttaaggcataggaggagaaattcttgataatatatgggggctatgtaaaatgcttctcaggtttatgattttaagccgttaaaccaaatactccaaactttgaacttccactttggtgtgcatttggtgtttgtttttatctttccaaattacctgttcttatccctttaccatatttccatacttcttattgatttgtgtatatttgtatatattatgggtatcctttccaagtgtgacaaatcattttctcccagtttgttgcttatattttaaacttttatgttatctgttactatgcaaatgtataatgtttgtgtcgtgaattcttttttctttatagcttcttggtttttaaattttctttggttaagctttctctacactaatactgaaaacacacatttttctagacttcattgtttaatttttctgtattacatstaggcctttaatctatatagaatttatttctttgtaagatattgatttaatttttcctgatgtaaaaaagggtctcagtatcttttgttggtcagttctgtccattcccagtratttgaaatgcactgtgtttcccaattccaaatgcgtaattagaatttcttgatttcagttgtaaaggactcagcttaatgagcataaacaaagttgggtaatttttaaggagagtaggcttttcctcaggaccacagagcaggtggctgtgccttgggaacaactatttacaggaactcaaataccatcaggtttcattctctttcttttttcctttgtcttcatttctyatttctttttcatatatcggcttcattgttctttctcactgtacactttttctgagtggttcctgagtgtttcatctactcagaaatcacttttttggttaccagttgaaaaatctcagatttgtgtcagttgaccttcactgtgttctggaaatgaagtcattaaaaacatagccagccctgaccataaccatgtggatgaaaggctaattcttctttagaaaaattagatagcttaggtacatatatctcattctggactctctagaagttatatctgtttatccatgcctatttcagttcagtgctgtgtcaattacgtcaattactgtagttttatgtttggcttagaaaactgtaggacaagtactttctcattttttttaactttcaaaatattactggctggtatttattcttcacaatgaaatgtagaatcagcatgtcacgttccagtatacatcccatgttttttgatgggaatatattgaatttatagctttctaagtgraaatttgccttcttattttgagattttattttattktatttatttatttttttagacagagtctccgtctgtggcccaggctagagtgcagtggcgcaaccttggctcactgcaacctccacctcctggattcaattgattctcatgcttcagccacttgagtagctgggattacaggtgtgtgccaccatgcccagctaatttttatatttttagtagagatggggtttcatcatgttggctaggctggttggaattcctggcctcaagagattctcccgccttggcctcccaaagtgatgggattataggcgtgagccactgtgctgggccaagattttttttccggaatcatggtgtgcctttccatttaaaaaaatctttcttttatggtaaagtgggctggtgtggctgtatttctgtcaaatgaattcccattactaatctctgcttaattaaataaaacttcattgaataataataatttagaaagcaaagatgagtaaaagaagaaaaagttttcttataatcttgtcatttaaggataactgtatatacatttaggcatatcatggtgctatatcttccacagagrttaaatgtttaggatacaatgaattggcatttgtatcaggaatgcattcccatttaagtgaaaagaaacctgctaagagtatgattttattattcataatcaaagaggtttaaagatactagatcagtgactcagtaaagtcaaagatgattctgtacagttcttttggccttgctctggtagtcacaagatgactgctactaggacagtcattatgtacctggttgaggcaagagggtgacagatgtttgacgtcagtttgttcccttgttgtcagtaaaacgaaagctgttttagggtacctctgtttctgcctggtcacatgaactcttctccatgcaggtaaggttgacaagcaagcacatggctttttaatctctgttgtgggaagtgggattggattggcctttaggtagccagtcaacaccatctgcctttgcaaataaggccagaattactcttgatcttaaattttacaagccaagtttttagacagtggataagttcttccacgtcttctcaaaccagtgtttttctaagccccttaatttattcatttctttccctcagtgatttccaggaagccattacccctatttgcctggcacttatacagtgcggaaaaggtcctgaaaacccgaaaaatcatttatagtgtgttttccttcatttttaaatgctatttcttgattgcctaagactgaattgccttgggcattcctcactgagctggaatgctgactctacagcaggttcttgaataacattgctttgctataacgttgatgagaaaaagaaattgattcctggagggccccactgtctgtgtgaagttaacacattctccccatgtctatgaattttctccagatactccagtttcctcccacatcccaaagctgtgcatgttctttgaattgtcatgtctaaattatcccagtctgagtgagtgtgggtgcgtgcgcgtgccccaagatggaatggtgtcctgttcagggctagtgcccgctttgcgccctgaactgccgaaataggctcctgccacccgccacccwgagctggattaagcaggtaaatatcttacttggtgtcatttatctcaaatgtatgcatagctcacatttatttcagtatttaatattagtgtttttgtcttcatttagaggtttggtgatgtttttgcaaccagaaatatgccataacaactcakctcttgtttatgtcagttagccagtggggaaattggttttgtggtacatcattttgcttaaagttgaagtttctaagaacctatagaggacrttaagtgaagaasttgttgcatttctgcttatttatttgcttttactgtgaagaaatagctgaacttctgtgaagggtgcagttgcttttagtccactgtgtgctgctctaggctatccaagcccaggggttggtttctgctcctatgatatgaaggcagtatgagaattctcacagggccctagcctgacctctggattagggttctcatggtgttgctctggttcctggtttctgcaatgctaggttccccggcttgcctgaccttgccgccttttgcttccggttagtgtggttctctcaatcccattcatctgatacttccagacttgtcatttttattaggtctcattgcttcagcagttatgccattctcctgacaaatagagttctttcttacctaggaaaaatattagctttactttaactagagctgttttcacaagtgtgtgaagacctggaaatttgcaattagtttcagataagcacagctgaaatattcttgttttgtactaaggcaacaaattgaaagaaagattgagggcactgagtcattgtagtttctaacgatacaacgaatacattattgggttcgtgtatcatactgggaccttgttacttacaaaatataaaataaaaggatcttaatgtgtctttagtaatcctcatgcctcttaataagagcttttaatttttagtccctgagtcatcacattttggtattgctagccctgctgtggccaaactgaatactatcctaattaattttaataatagaaagactcattaggaatgcactggtctgctgggatgactgtggtgatgcatgaagtcacgaaaggaggatgaaatcattttgggcatttcagtgacattttttatttaaaatgtatatttcaggccaaggagcactattgtggtcagcatttgggaggctgagtgttatattttaaactgttagatttcatttgttttatttgtactagtgggttgtcacactctggcattagtggtcattttttaatggccatttctaatggcatatgaaattgaaagagactgaagtgttggaaagaaggaaagttaggtttttttttaattattaaagtatcccaaataaaaatggaattttaaagaatgtctcaagaaatgtatgcgttaaagaagtcaatcaaaattgggcaaatgagcttctgctcatgaacatctgtaaagcattgactttaattgccctgcagctgctgttggctgtgcggtttctagttttactcgtttctcctccatcttacatgtcactttatttcctctttccaatgttgcctgggtcacatgcatttgcttgtgtcgaaaaagtaagatgatttagttatttttaagatcccaaagacaaggatgcttatctgttaaagccttttcctccaagcacctgttaagagttgaatttaatctacaccagctgtagcctagttatgtgtagctcgagtaggaggtgtctgatacattgtcttctcttttcattgaaatggattggtaaaactaggcggcataagttagtggggaaaatttagatayatcttagattagatgaagacctttcaaaatagggctttaaaacatacaattcaaatatacgtgcttatacttttacgtgaattacaaattgggtaaagatagaaatttgtttctacagaactgccaggaattatattacacattgagaccactgayttttgacactggccactttgtccatttgaattttgctgctgagttactcttttgggcataattctgcagagtggaagtctttaaagataaaggaagggctgagaatgttttattcttgttgacatatgagtatgattcaaattgagttttatggaaagatcactcacttcatagaaatttttttattttacctactcagtagcaggttgtattagtccgttctcacattgttgtaaagtaatacmtgagactgtgtgatttataaagaaaaagagatttaattggctcacggttctgcaggctgtatgggaagcatagcagcttctgcttctgggaaggcctcaggaaaccttcaatcatggcagaaggcgaaaggaaagcaggcctatcttacatggccggggtagaagcaagagagagaaggggaaggtgccacacactttcaaacaaccaaatctcatgagaactcactcactatcatgagaacagcaccacaggagaaatccacccctacgatccagtcacctcctaccaggctctacctccagtactggggagtaaaatttttctacatgagagctggacgggaacacagatccaaaccatatcacaggtcaaattcaagctcctattttttttgttctccttctccacttattttaaattggaaatgaaaagatggaatataagttgttttagtcattatgaaatacgtttaccaaaccaactacaccataccttaaacctaagtaaacctcttttagtgatcaattttgaaggtaaggcccagtcaaatgctgaattttgatgaccagtaggaggcagactaagatttttcactgttcccttaatattttttaagatttgtaatgtatgaagcttttgatatgtaatatgagagacaaaaaggagacatcttaattctactcttaatgagtggaaatattttctaacctgggagttactgcaaattgtcgtggaactgaaccttgaggcctgtgagcaaaggttgctaaggtcaaggtcagtagtctgaatcacagtgttccaggggttccaggaactcaaacctaacccagccaagtacagacaacctcggggtctaacatgtgagagtggaattgcgatagaaatcgaatttggtgaatagtggtgttgggatgtcgagttttagttagagttagaattagaatcccaattagtgaccttggtaaatacttctcccattttcagaaccatggcaaaatggattgaggttcaggggaactgtaacctaattaggagccaagggaggagctaattcccaaggattggacatgtgtgrtgggctcgatagggaagaccataggcttagtttgctctccgaagcatgctgaatcctgagcttaaccgcctccactcttagttttctcatctgtgaaatgacagtagtcaataattatagtctcctcatggggttatgatcattaaaaagaaaatccataagtaacacgtaaaatactgccttgacatattgagtgttcagtaaatatgttggcaattacagatgctacctactcaaaggtatgggtttttacctgaggccccagagttgtttagagatcaccttgaggactcgttaaaacacagattgctggaactgaccttcagagttttcgtgattcagtagccctagggtagagttgccagataaaatacagatgcccaattaagtttgaatttcagatatacagtaaccaatcttttaaatatgtcccatgcaatatttggaacatacttatactaaaataattcactgtttatctgaaattttaatttaactgtggtaaattcattgtttatctgaagtttgaatcttctgggtttttgtttttgtttgactaaatctggaaaactgagtctagggtggggcagtttgaattggcatgtcagatgtgttccttcccaggtgatcctactggtggttcagaacaacactttgagaacctctggatacctgcagctggatggatctgaggagtatgttgacaatcatttacaaataactgtagcagaaggtgtcacattccctgggagttcaaagtatacccaagatacaaggcaacaatgttagtgtctaaatagttgcactttattgggggttattatatatttgtggttaagtctttaaaataaggaacatgagtttgagatcatttataaaggtatgtaactaagtgtattggcctatatgaaaatatagattctgtctttttgtcatgattttaattgagctacaccttcatgaatttcaaatttatagctttttaatgccaggaattatttttggggttaggaatgagagagcccagggtgaaaccttaaactcatctgtgctttatctataatccctataagtcagaagccagtaattagagtcatacaggaggcagtgtagagagtgattatttcatgggctttagagttatttctcatttgtgtagtgaaaataataatggtacctatctcataggattgttgtgagcatgatgtgcaagagtacacataaaacatggtttagcatacagtgagcacttaagtgcagactaaaataggattaggattaataaaactcaaatcctcaatttagtgggtaaattgttaagacattgttaacaaatcctctgagccaagtttgtgtttgtttgttttgttttgtttttgtgactaagaaacatcactgattcatggtagaccggaaggtacatattagaacttggttacttggtctactatacactgcagtattagctccacaatagcagagactattcttgctttgttgtttgttttatccttaatgtctaaaacagtacctttcatagaatagatactcaataaatatttgtggaaaaaacaaaaagtgactaccactggtaaatgctttcaataaactgtttttagatgattttatggttatgtgtagacaaagttgttgtatcagaagattatgttcccatggatataacaatagactaaaggttcagaatatctcaaacaatgaacctggacacataaacagaatcatacagaatgtcaagaaaaatggaaatgttttagatgtctgatgtaagaacagtcacttggtttttcttctccttttttaaccttttgatatactatgctggcttaagaaaaccagctttattattcttaaaagtaaatttaaataggcaatacmttcccatgcttcagaatttaaaagtataaaagtatacatgttaaacatctccttaaaactcctctccaatagataccctgttacctttcccacaggttaatttatatcattagtttcttatatatcattctagaaattttttggcatatataagcaaatatatatatatattcttttttttcctgttttacacagatggtaacattatgaacactgttctgaacatcatttttttttcattttgtatatcatggagttttatttcttctttctttgttatggcaagagtattacgttgtattgttacaccataatttatataaccagtcctgtgttgatatgcattcatgttgtttctagtcctttgttatcacaagcaatgccacagtataaccatccttgcatgcatgtgctaatatgtctgtaagataaatttctggcagtggcgtttgcaggccaaaccgttatattccaggktttgtgcatttgtagttttgatggatactgccttagttcattttttgctgctataacagaatatcatagactggataatttataaagaacaaaagcatatttggctcatgcttctagagactggaaagtcccagagcatggcactggcatctggtgagggtcattccgtagcagaarggcaaaaggcagaaatgaacacaggagacagaaatatgggcctgaatttattcttttattctgagctcactcctgtgataactaattcattcccgtgataggaatactagttcatgcatgaggactctgcctcttgaaggttctacctgtcaaccctcttacaatggcaattaaatttcaacatgagttatggtgcagatgttcaagccatagcattgccatactgcccaccatagtgtaccattttacacttttaccaagtaatgttcttcattctttacattcttatcaatacattgtgttaacaaattcttgactcattcccattctgatatgtaaaaatgttttagtttgaatttatatttctcttgtgagattgcacgttttcatatattgaagaactttttatatttccttttctgcaacctgtctcctcrtattattttgartaattttcagttgcctcttytttcccccttactgatttctaggatttttttttttaatctgggaatacagcaatttgagatatgagcttccaatttttttcccatttatactttggctttccttagcataatttttgccatgcagaaatatttaatctttattttatttagtataacaaacttttcttcgatggattctacatttgtgacacagttataaaagacttccaccagctgaggttataaatgaggaattttatcataattttaaaataacttttatagtttgttttacatttaaattttcaatttgtttggcaattatctaggyataggttatgaggaaatcattcgacttctgccttgcgtttgttttatttatgacttcactatttcaaccagttttcattgagtatcatttatgtaccaggaaattaggtgggtgtccctcatagagcatattaaaacttagttggatgactaggatttccaaaacaaataatgaatgaaaaagcataagaagtgttatggtagagatgtttgggaatgcatagacaggaatgattcatcctttctttgtatgggaaagaacaggactcagaataaggaaatatttataccacactcatttttgaaatcaggaatatcttaaaacagtttagttttatgaaactgaaggatttatttagaagaacagatacagtctgaattagaatgttgatgtaccgtgtgaatagatcaactgatatgattcacgtttgttaagactggcagctttctactgatattttttagcaaagtaaaaataagtaagcaaataaatagggctaagaaaactaatttgagagagtcagttttcaagatgttggagagggtagtaatatgagaacacaaacttcccaactgtgtgattttggaactccctttgagaaaaaaaagaataattaataaagatttttttttaaaaggccagattaataattaagcaagaaaagcctcagataacttgaaaggtgagagaataaattgccaggtgataacaataaagaaatttaatcatgtccacgaatgtataatactttgtacagccaataaaagcaagtaagaattttcagtcctgtagaggactttaatgcaagggacaacaaataygttagatatgcccaaaggacatgactagtaagagaagcgcttcagttttgaaagtaagataaaatgtgtaagttgacataatctttaggaaagtgaatacagttcccatgttaggtacaagcaggcagttattttcaactagaaagatatgaaagtcttttaaaaaccaagtgtagatatgtaactttattattaaacatgcattcattcagtgttactgagagagtaaagaattaggaagataatattgaggaaagatgtgtggattatatttcaaatgtatatacgtaggtatgtgtgtgtaagacacacacacataatggtggagtgttgggttttgtttccagagaaccaaaagaagtataaaatatttaactatccttcaaattttgacagtcttttgcctttcattcatgaagatgaatattattcttttccttcgtaatcaaatgcccaggtttccaggctgcttccagtgaatgtgtggcttctgctagagattctgtattttacagattctatattttacatctctgtcaccgttggaatatgtttatgagatctgggcttatcaccagtgtacatacttgtctttctgttcgccactaatttttataagataatggcggaacgcaataaaatatcacatagttgcctagccccttctgtaccaagatgtcagtgctgccgaaattgaattgtgagttggcaggagaggctgctgtggattagcaggaaatatttgacagttcaaatttggtatacagaagttagcagtgtcaatatataatgtataatagttggcacagtgtcaatatataatgtataatagatgacctcatgcatttagagcctctgtacacttttaatattgtcaggaagaggggctgccggggctttttagactgaagattgggacttggaggtcttacagtctcaccagttagtgatcatccagtttagtcacattattttatagtaggagagtgaaacctaaagaagtaatttttctgtgtgtacaaagcaaatttggtggcagagattaacaggcaggttttctgtcttgtttcattgcttttctttcagcacatgtcgtgctctttcaccatcgtggttttcagctctcagtgtaccatgtgtgattcttgggaaaagtgcagataacctgatctccaacctcagagattttgatttagctggtctgggatatgagcccaagaatctcagatgcagatggctcttgtggcaggcacactttgagaaggctagaccatgtcatgcgtgaaactgaaatacatagaagttaaatatccaaggtcacacatgtaggaaatggggaaaccaggactcttatccactcctcaatatttttttttgatgtatggtttttcgcattctagaaattgaagtgactcactctacctagaggtttggaacaagatttaagaagcatctaaaatcaacatgatgccagttcttaggctgatgtgtgtttattaataagaagtaaaattgtccagcatgagccagctttaattaggcattttaaagaagtaagactgtgctacttaatatttgaaaattgatttaatttagaactgattatcaatggtgatttaagtattggtatcccatctttactcctgttgagcaacctgggtggccttatcttccgtgacagtggaatttacaattatttcaaactctgcctttaagtaacttagaatcttctagaagatacaacttataaacagatttaaagaacgatattttttaaagtgattattaaatgattacttatgtagctctagatcatgtaatggtttagaggaggagagaaaagtttcagaactgtgttgcaataagcccctttgatggggcttaacttgaaagggagcccttgtctgatcaaatgwcatcagacagaagggagccagtgagtgtggaaattactaataaaaatgaagaaacgtgtcttcacccttttgtgccaatttctcaaaataccacagattgagtaatttataaaaaagagaaatttaggccaggcccagtggcttatgcctgtaatcccagcattttgagagtctgaggcaggcggatcacctgaggtcaggagtttgagaccatcctggccaacatggtgaatctctactaaatatacaaaaacttagccaggcatggtgtcatgcgcctgtagtcctaggtacttgggaggctgaggccaggcatgagaaccacttgaacccaggagtcagcggttgcagtgagccaagatggcaccactgcatgccagcctggrtgacagagtgagactttgcctcaaagcaaaaaaaaaaaaaaaaagattaattttctcactgttccagaggctggaaagtctgagaccaaggtgctgacaggtttggctgtttggctgtctggtaagagctgcattctccagtgaggaggacactcaggggtcctgacgtggtgaaaggcagaagagtaaaagagctgaaagctgcaataattttgtttttctaagtaacataatctcattcataagtgaggaccctcatggcctaatcacttccgaaaggcactaggtcttaatatcgtcacattggcaacaccggaattttaaaagggatactttgaaaccatagcagaaggttaatgaaaaattagtatttgctgggaaggtaggcacagggattttctttgttagtgagttactgggtgaaaatatacagtggtgtatacaaaatatacaatgactgtaatgaaagtgtrgtagtgtttgtgaataaagaatttaagtgtcaataggtatcaaagaaaggaggcaattatttggatggtcatacttgtgcttagaggttctttactgcaccaccccagtctgtttacttttgtttctacattgttacagcttattggaataactcagattcttgtctgaaatgctttgtcaattcctccaaatttgcaccaaggcaaacagtaaatctgaatcatagtagtgaataattgaacaggctaaaacatgaactggaaaagatgactggaactgaaaaatcaataagcttagggaaaaaaacttgtaaaagcttattcaatataaaaaaaataaatcaagaataataaatatccaagttgcttctataatcgttttactttgaacaatataawttttttttaaaaaaattgatagtcttcctgtgtgtacaggaaagatttctagcatttgaaaggttacagcagaataaaggaagtacaagcaaaaaaatacataaaaataattccttccagcataacaaaaatcgctttcatgaaatgataaactttagtgtagatacattattgaattgaagagccgttggcattccagggaagcttttggggtccttaaatgtcattccactgaaacagcatgattgtgattgctgattaatagtccaagaatagtgatatctgaatatggtctatagtgatttaaaaaggcttatgaccagcttctcatttgaaacttctagacagttttcaatttaataatcttagtttcccactatgaaaatgaggattgcttggggaaaagagtctgttatttttgaatttttgagttagacgtcttccattcaccagaaagcactatccagattctaagattatgtttcaggatataaccatatggcaaagcacttactatatataggtaatttgaaactataccagttctaaaacaaacaaataaaaggatgtggtcatgtatagcagtggtaatacatgaatagttagatcttgtgtatagttaatatgtttctgtggagttgtctgattaatacaaacaaaaaaatactaatctgtgatatataggatacttaccactttatgtatattgttagagatggaagcaaccgcatttttacagaatggcaaaacttagttctggagaggtgaattgactagctattgacagagataaataggcaccagatcttttgggcaccagtgcagataaaccatgatgctacttagaagaatagaggaagaaccagtttcagcgccagatagtatgcttaggatagcccttcactcacctcattgccttctctgataagtcatcatctctggtcctctacttaggcccatttagttgaggtatcaccagaggcagcttctgtaatggggagtcaggtacctggaaagctgtggtaatacgccccaaagtatacagtcctgtggaacttggtgcatttacagtcacgtcttctttctttcctcctttccttccttcccctctctcccctcccctcctctcttttcttcttttgaggcaaggtttctctctgttgtccaggctctgttgtgcagtggcatggtcatagctcactcactacaaccttccacccccggcctctagtgatcctcccaccttggcctcacaaagtgctgggattagaggcatgagccattgcaccttgccaagccaggtctttaactgccagcctacggtttgattcattgctgtcagcattgtaggttcctgtgttaagtacaaattaacaatgttggggacttcatgtatttctactgtgtagagagattcttcagctttgtgaaatcttaaaatacctttggttacatgttattttttccagttattatttagtatatctaaaacattttgtattctcacagtgcttcttaatatcatgagttattaagtaagactgctaataagttgctgtgcttattaatagtttgtaattattaattatttatgactgatatctgatgtaagtagaaagtgtgtaatatatataagaagtagctctggctcttgaaaagagagtgtgtgtgtatgtttgtgcacacgtatgtgtgtacatgcatgtatatgtatacatgcataatcatatactcatgtataattatatatgatttatataaatatgaactctatatacatacatgtttacacatacaccaaaatgcacacacttacttgctttcttagatatttagggaatgaattagattgaatctagattataagcttcttcactaaggggtttgcttcttgagggtagacattttctcttgttctttttacttaatagacactgaataaaacatttgttacttgccctgattttgggactgggtaaattgttatatttctctaaaggataattcaggtcagcgtactttgtgtgtgtataagccagtcactttgtctagaggattgctgagctgcaaccactgatagctgccttgaccctgaagtatctgtwctttacacgaatgaagaatgaagctcgtggtcagcatgaccattgcttctcagaaatgtaaattttctcactcttgtgaatatcatacttacacctcatgctggctactctcctcttcttcycttcatgatytttctcattataactttgtccgttgcacccagatacatccgaaaagttgtcacctgcagagatgctatttggtgaagatttgaaacctcttaacggttaagagtgtcctttatcttcagcgttgatgacaaacctgttacaaacaaatttttggatgggatattgtaatacaaatgaaactgtttgtgaaacagatgacctgattgtttcatwtgcgtttatattatctgtattggtgatgtgctccacaggatcagataattatgataatacacacgtgttgaaaagagatgcattcaattcacagctatggaagttttaaattgatttttttttccccaaaagaagtcagaatgtattcattttttctcgtcatttccttcttagcttagagttaccccttgtggcttcctaatttcattgctaccacattgtccgagtcttcatcacctgaaacctgagttactgtacacttaatgcttgtctctcctgtttctggttcattctatatactgtatacttcagcacacatttatttaccatggtggtgatagtggtgataagattttagttctagactagaaggcataatccatcaaaaagtgcacaagagaggtattggtttgtaatttttagaacactaactttaaaatagtcccccacccagttaaaaaataattgtggacctataacrtatacaatactgctttagatggtgaaaacatttaatatatttattgaattgaaatagtttgttgatttaaaaattctgctatgatggtaggatagggtaatgggacaattctagagaggagcacatctggtatgtggcatgttcattgtccgaagagaaccagttctggtaatgagtagagcatttcttgaaattaacattgtaataagcacagcaaagcaaagagggtttaaatcatagtggtgcctctctcctccctggcttccctgatgcccagtggtatacaattcagaaatatctgatgagtggttataacatttctctgattttcccctttcttttcttcatctccaggttcatcttaaatgaacctctccttggtcccataaggccagtctgtttttgcattcctcagttctgatttcttttggcaggaggactacatgtggttgacagattatatctgaaaagggctytggtaattgctcgttctcttcagtgactgtgttgctgacagatgggcacagtgaatattgaaagtgttctggacctccgcttactccttcagctcatgagtgctgagcactgccagcacttttcttattatctattagcraatttaaaaagaattgcttggatctttacatctttttggacctataactaaatcacatgtatggctaggttctttcccacctcttctacccccaacccccgttatgtattttttggaatagagaaaattctcaagatgttaatgcaggctggcatgaatgggtgccaatagttcttacagacttgttaaaagatttattttttgcctgagaattacacatatggcctagaatgataatattaggatctgtgttggttgagataattggcagatcacaccttaagaaaagtgattggttggcttgtttctttcattttaatctgttgtctccgtcacagtcaaattagcattatgtagtatattactacacttaaaaarttatttaacccatttatagagggcatctgtcggttgcatttgatttatttaaaacgttttcttacatggccaatttagtaacagcaagcaaaaccaaaatgagcaaaggagaggatcccaataatcccagatctataaagcggatttctcaagggggtagagataaccacctagctattgctaaatgtgatctcactcagttgaaaaagaaacaatcagaagtgagcaatgggagccgtgaaaccatctcaatgaagacttgttgccaacatggagatagaggatattggtctacagggtactattggagaggtaactgtgaggcttttacacccagacagcccttctgtgcatggcaagttttactgaactcctcgagatttagggccaattaattcatctgttttaagatgaattcatcgggtaatgtgttttaagattaaattaacttgtttgttcttgctttccagatctcttattcactgcatgtgtgtatgtgggtaggtgagtgagagtgagaaagataatatgcccggggttggatgtctgttttcatttattattaagtagaagaagatgctcacatacttgtargtacagaagcttcaacatarcagtctttcacagtgtgagttatgatagacgcaatctaagagtraattataaaagtgatagggccggaacagacttttattaaattttgggtaatattgtagattagaaaagtaaaatgtgttacctctacttatctttaaacattcactctatttaatgtattcatcagacctcaggaagcttgcaagtatattctgaagttacaaatttgtattttctttgtaagtaatatttagtaatattttcctttataaaaaacttttaaagtctaaaaatgccactgtgtgtcaatgtcctgtatcacctctctctcaattttcgttctctttcttctaataactatttctaaggaaactatttttacaaattattccaatgattactatcaaattagaagatctcttaaatagcatctaatgtgatttatagcagagataactaaggtccccaaaagttaagttacatgtttaagattacacaacaagttaagtcagagtatggagaggaacctagatcctctcatccttgttcagtccttttggctctaatgttgcctcctatcacattctcagtctggatgagttggctgtaaaatatcaagggtatgctctttgcagtctaatttagcaattatgatcaatgttgtcatccatgttttaataatagaattgtagagataaaatttgttttccgtaggtcatatatgtaaaaaatgctcaatacatatttattaactgagtgaatgaagctggtagttttgtttgacatatgcactttttctgactttcaaaaaaaaagttaaaatcagaaaagaaaccaaaatggatccatctggcttatttggaaggacattattgtgtaatgaaataccaacgcagtcacattatataagtcagtgttcattatcacagacaaatcagcatggtaaagatgatagattttcagaatagcatagggattcttttaataaccccctaataaatagatgcaaatagttttccaattgaacatacctttgaattattacccatattattgtcttaatttgttgaaattgttgtatttttgtaatgtgattgcaacattgcttttcaggaagaggagattatgattctgtatccccttttggtcctatttatcccttttaaatcagtttcacctctcatcttagacttatcgggatttttatgaatgtacctgactatccttggtacataaaaagaagactcttttcactttacttaatgctacaaaattttgagtgtagttcccagatggctaattatttatttggtgactaaaaatatagcttcttgttctccagtcacatatgtgattttkggatcttaagataaatttttatatctcatatgagtgatcgtagaatttccagccattatatttcttatcactatggctagcttgaatataataacatgattttaaaatatatataaccctgacatggtgatgtacttttgaaagctccttgtattagcaggttatttgtacagctgtatcaaaaagacttgcctcacttcagaggattatcgattaatttgcataaatgtatttatgcttgagagttaaagtaatgcactattagttttataaaacagttggcatagctgtcaragttcttaatgttctttgcagtgttacagctagaatttcccagggcattgaaagaaaaagcaaagaaasaaatctttartagtgttacattctgcttgttctcctgggcttgtattgaagcacaggtgttaaggtggtgttgaaattagtctggaatcatgaaaaaataaaatacaactctttgaggtagctagggcaaaatgactttgcagtgccacgactgctctgcccctatctgagaaaatgcttcttgtgctcggtagctcttgttaacttgaaaaactctagaattacataaataatgaatggatgcaaaaattcattggtttttgtaatgtagatgaaggtaagatgtcctgtcagaactgaaatttgcatagtagaaaaatttagttatcctatcttgttctttaaagcaataaatgactatgaatattcatggtcaattaaaatattaatggtatactgatactttagttttaggtctctagccatccataaagagtttcatttaaacttgactaacagtgaagggatactttagcatagtgtataatatattggcattttgtctctgaaatgaaaatgtagtacctgacatgagtaaataatttgcttactcttataattcatcatttcttttgataagaaaatattctcttcttgtatagactaaaacagggacacagtatgtrtatcttttggtgttgaaatactctaatgtttttaagcactagtatttatctttatcatgtagttagagtttcatttagttgcttcaattgacttttagacttaaaaaaatttttaagtgtaaagtgtacagtacagtgttactaactccatccatattgtagttcaaccatcaccaccatctgtctccagaactctttttcatcttacaaaactgaagccatatccattaaacaataattccccattctccccttcctcaagtccctaataccctaataatcacaactttactttttttttttttttcttgagatggagtctcactctgtcgccaggctggagtacagtggcatgatctcagctctctgcaacctccgcctcccgggttcaagtgatcctcctgcttcagcctcctgagtagctgggactacaggcacgcgccaccacgcccagctaattttttgtatttttagttgagatggggtttcaccatgttggccaggatggccaggatggtcttgatctcttgaccttgtgatctgcccgccttggcctcccaaagtgctgagattacaggtgtgagccactgcgcccggcccacaatattactttctatgaactggactccattgattcatataagtgaaataatacagtgtttgccttttcgtgactggcttatttcacttagcrtaatgttctcaaagtttatccatgtgacactatgtgtcaraattcccttactttttaaggctgcataatattccaaagtatgtatacatcgcattttgtttattcattcttctattgatggacatataccttaaatgtgtgacttacatggcgtgtacattatttgggttgctttcagcttttggcttttgtgaataatgctgctccacgaacatgggtatacaaatatttttttgagaccctgcttttaattcttttggatatctactcagaagtggaattgttggatcatatggtaatttttatttttatttttttgagggatctccctactgttttccatacgactacagcatttgactttttcacagtagtgcccataggttccaatttctctacaacctcgccaacgctcctacatttctgtttaatatattgatttttaagttacaaaagttgcgtattgtagagattcaaacgattcagagaggtgtaaagtaaacttgaaaatccttctttattttccctttgactcttaaaacattgattaacactgattgaatcagatccaagatgaggtttcaaattcctctaaaaatcttcctaagaaagctttttaatacctcccgcacatatgtgtagataactgtcctttcttttgagcttctcttttaaggtactgcatcttagtgtagtgacttccatttagtgaatgctactgaatgtggattcgtgtcagacactgtactatccatatgtttttcaaccttatagcaccagcagtgcctaagtcattgtgcctggcaagtcataggtgttcaatataggtatgatacatgaatacwcatgtccagtctgggaggaacttttcaggaagtaactaacataggcctctttccttccgagtgctgtataagcagtctcatgctggtgttgctttgagcatgcattttccgtrttgtataatrtattgctttagggtacacactgggcctgtgaagactgggcctatgtttcctgctgcttttgatacaggatcagaaaatgtttggaccccccaactgttytctgatttattaacactggytcagaattatggaagtttgaagttggctggaagctatgagatgattcactgagaaccttatttgacagctgaagagactgacatagtcaaagacttctactgttgttaggaacagcacttgttttaaacctttattttaggtcgcgggtacatgtacaggtttgctagataggtaaattgcttgccacgggtgtacagataatttcatcattcagatgataagcatagtacccacaggtactttttcatcctcaccctctgtattagtttgttttcacagtgctataaagaatgacctgaggccgggcgcggtggctcacgcctgtaatcccagcactttgggaggccgaggcgggcggatcacgaggtcaggagatcgagaccatcctggctaacacggtgaaaccccgtctctactaaaaatacaaaaaattagccgggcgtggtggtgggcgcctgtaatcccagctactcgggaggctgaggcaggagaatggcatgaacccaagaggcagagcttgcagtgagccgggatagcgccactgcagtccagcttgggcgaaagagtgagactccgtctcaaaaaaaaaaaaaaaaaaaagaatgacctgagactgggtaatttataaaggaaaaaggtttaattgactcacagttctgcatggctggagaggcctcaggaaactgaggcctcatggcagaaggcaaagggcgaagaaggcacgtcttttcatggcagcaggagagaaggagagcaggggaaactgccacttttaaacaaaccatcaggtctcgtgagaactccgtcactatcatgagaacagcatggagaaatctgcccccatgatttaatcaccccctaccaggcccctcccctgacatgtggggattgcagtttgagatgagatatgtgtggggacacagagtcaaaccatagtaccttcctccctccctctaccctcaagtaggccccagtgtctcttgggcccttctttttgtccacatgtactcagtgtttagctcccactgataagcaagaacataatgtggtatttggttttctgttcctgtgttagttccacctagggtaatggcctccagttctatccatgttgctgcagaggacatgatcttgttctttcttatggctgtgtagtattcaaaggtggatatgaccacattttctttatccagtctactgaagaacagcacttttaaacaatgctctttatttttcaaagcctaattgttaaagtgtccttatagatgttactgaaacctccatatccaagataaaagagactgctttgcggggttgttaaaatcagtttttcaaacataattaatcaaataaaatttacctaatgacatttcagtagtccttatggggtcwcaattgctctatttttttttttattttaaataaggtgaagtgtaaatgaaagtttttcgtaatgttgtttacatgtgcaaaatgattagataccttgccattttagtataaatatgaataatgatcatggggctaatgattaaaaataaaaaaattaagaaaaagacattttaaatggcaaccgaaacaaatcacaaggaccagaatttccctgtttctcaagcaatcagaaattttccaaacaataattaacatgttaacagaaaaaagaaatggagtctaaagaaatacaaaagagttcatgggggttttgaaaagttgcattctttgcagatgaattgcatcctttgggaaataacagtatatgtagaagttaagaaacatcagtattacgtattctttagtgttgtttaacagctttttgagaaataattcacatgccatgcatgcttcacatttaaagtatactatttagtggttttagtatattcactgagttgtacagccactgctccgttctaattttacaatatttttcttttagagtgtgttttttttctttgtttcttcatattctcaccaacagcctctcttcttctttatttacattttatttctttgagatcttgcctactttttttggctgtttcaactgttaacttggattttaaacactagtcctacactctagcttgttcttctcacttccttaatattactccgataatctcttatgtggcctactattttatgcattcattcagcatttactgagagcctgttgtgtgctgggcactgaagaatgttggtctagctggaggacagttaygtaaagaagtaatggtggcaccccagggactgaaatgctgttcaggatgctctgggaacatagaagggcacttgagaggtgcaggcaagattttgcaggagaaagaactcttgagctgaatctcagagtactgggtaagagttagccagatgtactagatagagaatgccaagcaaatggattatcatatatgaagcttctaaaatttgaaagaaccagttgtatttagaggaaagcaaccagttcattcagtggcatgtctaggagaaaaaaaagtgagaggtgcagctgaagggagagatggggaaagkcctgatttttgaaaggccttgaatgccatactaaggaatatcaccattatcctgaaggcagagatagactgaaagattttaagtggaggaagaaatgataaagctgatgatggattttaagcagaggattggtatgatgagatgttaggaggtctgaaggtaaatttggtaagccaaggcaaggagacagggtgtctatgaggtgattgtggttgctttagttagagataacgaactgtggctgtgtctggaggatagtgactgtgtgggtcggggaagaagaagggttataaaggacaaggaggagtgcgagatgactatggctcagaaaattgcatgctggaggtttaactttggtggaagaagggcaggatgtagggaacaagagctcagatttggatttgaacttgttgaatttgggatatatgggctgtttaggtgaaatctggagtttgggagagaggtctgggccacacatggctttgagtatcattagcattcaggttttaattgagttgacatcatgattgtgtatttgatcagagatacagtaagaatagcaaagacttgagaacagaatcttggggacccctgcaggtgagggattttgaaggtggaggagatagtcatcattatctgcccaaaacccttttcttactaaattgtcttattcactcaagattgcatcattctcaatgtagttggaagccagagttgggagtcttctctgacaattaactttgcgtcatctctcatcaaattattttgcttttttcctgtgcagtaccttttagatctgccctttcttattttttcccacttgtgtcactatttttcaggcctttgttttttacgtatttcagttttttttttttktttttttttttgagacagagtctcgctctgttgcccaggctggagtgcagtggtgtgatcttagcttaccgaagcctctgcctcccgggttcaagtgactctcctgcctcagcctccagagtggctgggattacagatacgctctatcacacccagctaatttttgtatttctagtagagatggggttttgccatgttggccaggctggtctcgaactcctgacctcaggcgatctgcccgtcttggcctcccgtgctgggattacaggcgtgagccaccgtgcctggtccagacttttatctctgtaatatatcagagttccatataagatttccactgacaagagttctgtgaaaaaaaagtttgaaagtattcgtttataaaaatacagatcctggcattcaaggctctttggagtctctccctatctaatttattttttygaatgtaaatctcagcataaatcttaggcttctgtcattctgtgatattcaattttcctgaatttttatgtctgccttttaaaatgctgtttccattactttctttactcctcacacatgcaaaggtcaaatgcaataattcaagtctcatttcctcttcgaagaggaagcagtgtggtattttataaagctttctgcaaatccttgtgttatctgtgtaacttcragtgacggactttcctaaactttaggtttcttatgtgtaaactagaccatgtgtaggttaaattaataaaatgaagtgtatagcacatggttactttttctgatctcrgtcccttttgtgcactctcattcatgtatttattcatttaagaagtatttactttggcattactctgggcagtggtgatacagcagtgaacaaaatgaacaagaatcactgtcattggccaggggtggtggcgcacacctgtggtcccagttactcggaaggctgggtggaaggatcacttgagcctggaagattgacactgcagtgagctgtgaccacaccactgtacaccagcctaggtgacagagtgagaccctgtcttagaaaaaaaaaaaagtagctgtcagtatggagcttatgttctagaagaggagataaatgataagaaatacatacttttctttttctgagacagattttygttctgtcacccaggctggagtgcagtggtgcgatctcagctcactgtaacctctgcctcccaggttcaagtgattcttctgcctctgcctcccttttagctgggactacaggcatgcaccaccacacccagctaattttttgtatttttattagagacagtgtttcaccatgttggccaggctggtctcgaactcctgacctcaagtgatctgcctgcctcggcctcccagagtgctgggattacacgtgtgaaccaccacagctggtctagaaatatatacagttttaataatggtaagtgctaaggagaaaaaggaggaaaggcaggcatgaagtatcaagagggatggctgaaattttatttttttaaattttagattcaggggtacatatacaggtttgttagataggtaaattgtgtgtcatgggtgtttcatgtgcagattatttctccacctaggtaataaatatagtacctgataggtggtttgatgatcttcaccttcctcctttcctccaccctcaagcaggccctggtgtctgttgttcccttscttgtctccatgtgtgcttagtgtttagctcccatttacaagtgaggtcatgcagtattcggttttctgttcctgtgttagtttacttaggataatgtcctccattactaggataatgacctccagctccatccatgttgctacaaaggatgtgatcttactttttttatttttaatggctgcatagtattccatggtcgtgtatatgtaccacatcttctttatccagtctaccattgatggacatttaggttgattccaggaatgtctttgcttttgtgaatagtgctgtgatgaccatacatgtgcatgtatctttatggtggaatgatttatattctttcgggtatatacccaataatgggattgctgggttgaatagacagattgaatgggaaaggcctctcagaagttttctcttcagaaattgggaaacacatgacatactcatagtacacagtctttgacatgctgttgtttatctagatatactcattctgtcagctgtgccctcacctctgttatgggctctttgtattccttatcccattttttttgtttgttttttgaggcagagtctcactccgtcacccaggctggagtgtaatggtgcgatctcggctcactgcaacctctgcctcccgggttcaagtgattctcctgcctcagcctcctgaatagctgggattacaagtgcacgccaccatgcctggctaattttttttgtatttttrgtagagacaggatttcatcatattggccaggctggtctcaaactcctgacctcgagtggtccacctgcctcggcctccagaagtgctgggattacagcagtgagccaccatgcctggccctgatcccatttttattgcagtagaagtgtagtgacaaggaattggtaaggtatcaaaatagaacaggaaataatggaagaggcaagaccttcacatctaggaagagactggtggaattctatgaaagttaaatatttaatacttgttttgtccagtttttattagtccagacacttgcaaaatgaaaacgagaagaataaagactacctgcctctaccaggcattattaattgccctttggagattttgaatgaggatgttagtgtctttgagtttcataatgaaaactggaactatggggagaaattgcttgatctcagaactaactgaagctccagtgctcagagtcaaactaaactagacgggccttggacaggtggggagttagcagccaattttattcacatcatttgtcttttataaaaggtgtttgcatgtcagattgagcaaaaatcatggaaaatgcccaagttttaacatcattgtttgaacctatcagcaaaatcagatggcttgaatatgtaattaacagttaaatttgtcctccagatttgttttagcttctagcataccaggcaggaaattggaattagaaagaagaactcaggatgtgaaactctcatttctggttcagtttttttccaaagaagttatccagagaagagttaaatttcctgccaatgatgacatgaaagctatgttgttgctattgcttttgttttgaactttgcaaaaagaaaaaaaattcaccaaacactacactttgattagttctagcaggtttttttttccccttaggggagactatagactgtaatttcatcacaaaaaacatggtgcctgagctctaagcaaagtttgagtttgtttttcccttgaggatttgacattttctgtttcctgacatttttactattgttagacatacttctttgtattcttgccctatattcattccctaagggaaattgtgtattttatctactggaaggcaggaatgccttctgttttggacaagccatttaattgttcaaataaattcaactatagtgtaatagaccaatcattaggaactgggccatgtggcagcatttagattcatgagacccagattctcagttcattccaaaaaaggaattaaataccatggacacaaaatgaatgattttctttcctcccttctttctccccagggtttcccatttcaccctttaaaaatattaaatgatatcctaaatacaaaccaaatgctttttgtttcagtatttatggtttgcttatttgtggttttctgtttagtggttaataatttgcttaccattaagaaaaatactagcagattttttttgccactattctctatttgctctataaaaatgtgatgtccaaataaaagggaaatgaagacttaccactttttggccttcttttcagctttttgggtgtaattctgttttaactaataattaaatatatggccgggtgtggtggctcatgcctgtaatcgcagcactttgggaggtggtggcgggcagattacctgaggtcaggagttcaagaccagcctggccaacatggtaaaaccctgtctctactaaaaatacaaaaattagctgggcatggtgactcctactcaggaggctgaagcacgagaatcgcttgaacccaggagctggaggttgtagtgagccaagatcccaccattgcatgccagactgggcgacaagagtgaaactcagtctcaaaaaakwgtgtgtgtgtgtrtatatgtatgtgtrtatatatrtgtgtrtatrtgtgtgtgtatgtatatrtgtgtgtgcacatatgtgtgtgtgtgtgtatgtgtatacacacacaaaggggacttcaaaaggtcatggataaaaggaattaaaagatacaaaataaaaatataaactttatttctcaacataagctccatcaaggtcaggacacttttataagtgatggtatcagccatttagtccttccctaaagaactgagggtactgggaacctaaccgtgtcagtgccatcttttttacattactaactgaagaaaaatgggtggcctttaaagatttttcaagattacctggacatttttctgctaaaagtttggctaactttctcaaaactctgtcataataagcagatggtatcgttctttggmcctctagaaagctgatgaggagaatgccctgagcatctcaaaaaactgttgctatgacctgtgctcttcacctgtccatttttgcttttactgaaccccttccacctcttgggaggcattgctttgtgctttgtcttcaggatcacactggtaaagccatgtcctgtctcctgctacagttcttcagagaagtgcttcaggatcttgattattcttgtttaaaatttccattgaaagctctgctcttgtctgcagcagatcggagcacaacagttttgccatgcagagtagaaagtttgctcaactttaatyttccagtcaggagtgtaggtaagctgaaccagatgggatgtctacgatgttggctattgtgtgtgctgttcattgtcggccctctttaattagggcatgaacaagattgagtttttcctcacaartggatggggatggtctgctgccgtaggcatcatcctcaagattgtcttttcccttctgaaaacaagtcatctatttataaactgctgatttctttgggacattatctccatcatctttayataaagaatcaataattttgatgcaggattttttattccttagttcagctaaaatccaagttattgtctcacgaccagaaaaaattaggcatgcgaacacatttaaaggtgaggagagcggaatttattaaaagcaatctgtcagcagaaaagagggggttcctgctaataggctcccacctcacagattgaataccaggccaccacacacaagctgaagacccctggctcctctccttgtctaagtctcgaatttccgatgtctccactccattttcccagtgcacatgcaggcccctggtccgttgtgggcatgctcaggcaagacyttgtgcaggttcctttctctgcctcctgtrtctatcaatttcaccactcttccacccaagcttcactatattttttttctattttttaaattaattagtatttttattttagaggtagggtctcaccttgacacctaggatggagtgcagtgtaacaatcatagctccttttgatatggacaggaggcagggaaatactgggtagaaaacggcagggtccctggcaaaggctccaccctcaagcctgaacctgcagcccaaagtcctgttttctcatccaaatgctgccctttctaaaattaccctagcctgctctgccccatcctgtacccataaaaaccccaggctccactggcagaggagcagggcagagtggcagagaaggagagaagagaagaagcaaccatatgtcggggagaagcagcttgacttcagagggayggcttgatggcgggacttcggggaagagtttggctggggatggccgaacctctggggaagaccacctttccactgcatcctctttccagctctccatccctctgagagccactttcgtcagtaataaaatcccttgcatctaccatcttcaattcattcctgtgacttgattcttcctggatgccaaacgagaccttgggatacagagggctgtcacactgagctgttaaacacttagccatcgatggacagcaaagctaagagggcacagtataacattccctctggggcatcacagatcatgggcagggacctccctagacactgctacatggctgatacagggctcagccctgctggtgcccaaaggcacttgccccagcccctgcacctgctgacctgtgtgctccccttcctgtgaggggttgagggctgtgggctgagtaaagaagccaccctcttccggagtcccacaraagggccaagggaactatcctatttcaattgcagcatctcccgagttgctgagagtataggcatgtaccaccacacctggctaatttttaaaatttttttggagatggaatctcactattttccccatgctggcctcaaactcctggactcaaactgtcttcccdcttcagcctcccaaagtgctgctgattacagggtgagccttggcaccccagccttcaccataattttgatgttcgttcttgcctcaattttaacagaattcatgttgccctgttagaggctcttttcaaactgatgttttatcctttttagtgcctcaaactagatcctgttcaggcatgctatagcaagcttattttgatacaaaaatgtttgaaacccatgcatagttttttcatatgcattttctgtgaactttttaaagatctggtgtgtgtgtgygtgtgtrtgtgtgtgtgtgtgtgtgtattttctagcaacactgtctcttttctttcattttgcactctgtatattttttgtaaagaatacatctttggatctaagtggccgatatgaatttgttgagactaacagtttttctgcagaagtgagtttcttcaggtctgtgcactgctggtcagaagggaccgctctgtaaaaggtgacacttgggtttgtggaacgaatgcatgtaggttggggaatcaattaaaaacactttcattttctctgtgctgtggcaacaaggtggatacaggtagatacacatggagcagtgatgtgtgctgtgatcctgagagtgccctttgaatctgctgagctaaacagtttttgaatttttttccactcagtactctaaaattcacctcctgggattattctttggctaaagaaaagtatgccaacatgtgacaaaatytgcacttgagttctttgcaggcatttcttttcttttttcttgtttttttgagacagagtctttgctctcttgcccagactggagtgcagtgacatgatcagagcttactgtagcttcaaactcctgtgctcaagtgatcttcctggttcggccccatgggaagttgggactacaggtgtgtgccgccacatccagtgaattttttaaaaaaatttctgtatagatggggtcttgccatgttgcctaggctggtcttgaattcctgggctcaagcaatcctcctgccttggcctcccacaatatggaaaacatttccatttggctactttagtgcatagagaaatgtttatacctgggaatatctggagagtcctagaaagatctacccagcaactaaattggtagttattaattttttwaaattttatttttgagacaaatttcactctgttacccaggctggactgcagtggtgcaatctcggctcactgccacctctgcctcctgggttcaagtgattcaagtgcctcagcctcttgagtagcaggaattacaggcgtgtgccaccatacccggctatttttttgtttttgacgtggagtctcactctgtcgctaggctggagtgtagtggcatgatctcagctcactgcaacctccgamtcctgggttcaagcgattctcctgccttaccctcccgagtagctgggattacagccacgcaccaccatgcccagctaatttttgtatttttattagagacggggtttcaccatgttagccaggatggtctcgatctcctgacctcatgatccacccgctttggcctcccaaagtgctgggattacaggcatgagccactgcgcttggcccatgcccagctactttttgtatttttagtagaaactgggtttcaccatgttggccaggctgatctcaaactcctgacctcaagttatctgcccaccttggcctcccaacatcctgggattacaggcatgagccaccgtgcctggcctaaattggtagatattaaagcttatactttsaaaattaggcaagtcttttgttttggtgtcagtatttcttgtcattcttgatttttttgtgaaagattggagagcaaaagtggtatgaacagttgtcaattctgtaccatagtaagcactgtgatgctatttcattttgtttttacaagtgaaacaggagaatgaatcacatatcagcaagaagaggtttgttaaggcaagattggagatgctgcttccttgttttggttgtggagtctgacgtttcttcattagttcttggtatctcttgttcactatctgaaattaactccagtaatccttacccagcaggcataaccttcagagtctagcagaatccagctagaaatctttaagccacaggccatcttgctccctgaatcactaatgtgtaattataacgtgtgcgattataaaatgggaatcaatgtgttttggggagtctggattgacaagaataactgatgaagttcagttgtcagatctatatggtgaattatcataggggatgtttatggatgaaagctcttgaattatagaactctctcctgattctagattccttttcagttccatttcccacacatcaaaaggctttcaaagataatcctttcctccacttgtcacaactcctgcaccttgcttttctacatttttggaagagtgtttctataatagatgagcaagcatattttgagcaaatatagtaaaatagataacattcttaagaataatatgcaaaattattaagcaaacagaagtagaccagttttgtgttttattctgattaaatattaaaacaagagttttgtattggaacacacattttatgtagttatgtgacaatgtggaaagtttaattatttttaaagaatgaatttatcaaaaaaatgcctgtgcctagctgtagattaaagtaatgttcttctaacaagtaaaattgaagcaattaaagagactatcctcaaactgagatagtcatattgaccattctgagtgttattgaggcaaaactgtgttaagatgaactgagacagtaatcttagaatctaagaattgtcagaacccttaaatgtgaaccactttgatgcaaagtatctgttgcttcccattaaccaaaaagagagttgatgtgtgagtctttgtatattagagagacagtggctaaaaagtaactggaagaaaataaaatcagataatgagagatagagtaaaaaaagaatgaataatattttcatttgaagacctttctctcttcttttcctttggcaaatattattgagatcctaccatgtgctaaacagtgctttgggcaaggggtataggccctgaataaaacacacaaggtctctgctttcatggaggttacatttgttatggagagttgatgagacaagaaatacataagcytgagtctttttttttttttttttttttttttttttgagacggagtctcgctctttcaccaggctggagtgcgatggcgtgatcttggctcactgcaatctccgcctcctggttcaagcgattctcctgcctcagcctcccaagtagctgggactacaggtgcatgccaccacgcccagctaatttttgtatttttagtagagatggggtttcaccatgttggcaaggatggtctcaatctcttgacctcgtgatccacctgcctcggcctcccagagtgctgggattacaggcatgtaccagtgctcccggccaagtttgagtctttttaagcctactctggctcaagagcctgccggaataaaaaagtaaaaaataaattaataagcagatctgattatgggaagtataatgataaaaatgaagcagttgaggggacagagtaatgatggtagtaggtgtcagttgctatttcagatccaatggtcagggaatgcttccctgataaggtgaggtttgagcaggaactgaaggaagtcaaagaaccatgcaaatatagaggcaggggtggaggaagttgttgaggactagcaaggaaaccagtgtggatggaggagtgtaggtaatggggagagtaggtggatgaaatcagagagaacttttttccccatcgaggaaaggaagagaaggaggatggaacccagaagactgtgcaggaacatgcaggagaatcagagcaagtggtatcctggaggccaagagaagaagggaggtgatcaatagtatgtgtcaaatgctgatgatactcccagaagtagtgaacaaagttcttggtcctacaacctagaaagtctgtctctacctttcccctgtcttttgtcccttgctatgagatctttagtttctataaataatttgcttttattgcatatgctattcttaagacttttcccacaaatgtctattttgcatacttcattagattagcatctgcttttatgggatgaattatttctgatgtgcttattttgttttgtgtgtttgtatgtcagaaaaacattttttagttctttctatgtgtcaggcattgtgctgagcactttatgtkcatgatctcatttaatccttgttatagccttatgagctataactccccttatccccattttactgatatggaaaatagtgatcagagaggtttagaaatcagtgcaaggtcacataattagtcagtggcagaattatttttttaaacttcagtctttctcattctaaaattttcactcctagcaacaagaagttccttcctatacctcgcactgtcttctcaccaaatatctctactcttagaggttttctaagaagctgatggaaaggctcagattctagtatctccgcctgtatctacccaccttgcctctgtcttctctggattctcctacagagccaaataccagattctggcacccctgtctgcctgtctttgtcctggctaagtgtagctcccaaccagccccaccttttccccacactcccatttgctttgctccaacatgctatctttgtatgatgctattcacatgttttccgcttccgcccttgtcttcatatgcatttcatctgtgtaatttctttctctcatttcacagcctaaatggtgcatttctttggtgtctcaatccttgacctaatctagatttctttgttgctatttagtgaaaactctatttggttattttatttcacattggaaaaagaaaatgttccatggatttttgagaatttgtgtgatttctggctgtttctttatgtttcataatgtgctgcctcattttggagaaaagacaaaaataggctaactttgttttacaactagggaaaatgtgcatagaattgttcatatttgcaaaatgaattaatagaactacttaaaattagattttcctgctttaaactcccgttctttatcctctgtttccataactcagctatgtatttttgtttgtttataatcgtttgtttgttgtgtttggagcttggtaaaagaatgaaatgtttttgtagagaaattcactcttccccccaataatgtggctcccccataagtgcaacaagatgtctctcaaatagggtgagctttagttacatcataggtggtgggttccagcttcatttccctgccaatatcatggtttttcccttttccaagtacaaacttcatcttcagcttggttccaggatgggcactagtgtgcccagcatcatagctctcatagctataaaatccactcaagacgttcagagccagcaaaggctcatctctttctcactctcctttataaagcaagtgagcctttacgggaagaccctacgtctcattagcctgaattgtagaccttgcttgtatctatttatggccaaggacttcgggtcggcctcccatgaagcatccagctatccagaagaatacaatcagggttctttttagaggaagcaatcagggaggatatgaatctaggttgacagccaaatttttagtttgtcgtcttcagtatatgtggaatatcccctcagccagccagattgtccagatcaagtttggtgaatagtgcagagataattcatgtcactggagcagcccccctcctcacctttattggtgtggattagattctgctgcaagtagcaaagacctaaacaacggcctctacaagatggacctttccctttcttacttacaagtcaggtgtagttcagggctgatatgacagccttcttgcatagaatccttggaggctgggcgtggtgtctcacgcctgtaatcccagcactttgggaggccgaggcgggtggatcacctaagattaggagatccagaccagcctgaaccaacatggagaaaccccgtctctactaaaaatacaaaataagccaggcatggtggcacatgcctttaatcccagctgctcggcaggctgaggcaggagaatcgcttgaacccaggaggcggagattgcggtgagctgagatcgcaccattgcactccagcctgggcaagaagagcgaaactctgtttcaaaaaaaaaaaaaaaaaaacccaaaaaaaaarccccgaatccttggaaagttaggcttcttctagatcattcttcggctatacagtggtccaaaatggtggccgttgcagctactgaatggagaaaggaacacagtatttaggttagtgcaaaactaattgcggttcttgccattaaaagtgatgtcatcacacctgtaatcccagcactttgggaggctgaggtgggcagatcatctgaggccaggagttcgagatcagtctggccaacatgatgaaaccccatctctactaaaaatacaaaaaattagccaggcatgttggcggcgggcacctgtaatcaatcccagctactctggaggctgaggcaggagaattgcttgaacctgggaggcttccgcctcccaggatccgagatggcgccattactccagcctgggcaataagagcaacactctgtctcaaataaagaaaaaaaaaagtgatgacaaaaacctcaattactttttgcaccaccctaatggagacaaaaggcttataccagctatcatgtcaggaatattctaagaagctaccacgtaacacttctgcttatgtctcayaggacaaaagccttacctaactacaagggagggccagaagtgtagtcttaattctgagaaaaaatcaggggagaataattattggccacagctaacagtttctgctgcaccctcatctaatcacctgagttaattatgttagtgaacagatgatcaattacttagtatttggactttgtttatctccctttgtccttttgaaagctgtgccaatatcagcagaatgatgtctgatgttctagagactgcagaacttattgtatgtggctgtcctgtctggcatagcagccacaagtcacctgaaggtattgagttcttaaaatgtggctaatgcaactgaggaaccaaattttaaatgtaatttaaattaaaaactgacacttgattcagtttttggaaacttttaattgtgtctagaacaactagggtatgtgagtctacttttgcaactgtacattttataaaatctaaatacagatcaggtatttccgatgaacatttaacatctgaattgggttgtactctaagtataaaatgcaaactgggccgggtgtggtgggtcatacctgtaatcccagcactgggaggctgaagcgggtggattacctggggtcaggagtttgtgaccagcctggccaacatggtgaaaccttgtctctactaaaaaatacaaaaaattagctgggcgtggtggcaggcacctgtagtcccagctactctggaggctgaggcaggataattgcttgaacccactaggcacaggttgcagtgagccaagatcgcgccactgcattccagcctgggcgacagagtgagactccatctccaataactaaawtaattaattaattaattaaaatwaaataaaatgcaaactggatttcaaagactttagtatgaataaaatatctcagttttaaaatgtgactacctgtttgcatgatattttggctatattaggttaaatgaaaatattaatgcaactaatttcacttgtttcattttacctttttaatgtggctactggaaaataaagaattacatatgtkacccacgttatagttccattggttggcactgttataaagcctcwtctcttaatagaggacatgactctgtgtacaaatgaaaaggcttcttagtatctcctgatttcagaagaaacaaatttccaagatgaatacagctgggcattatctttttgtcataatgtccttgctgaatgctactgtcttcttctttctttatattcctgtatttctctacttctttcactttatcatccttttctcagccttccccttaaccctgcctctgccagaaataggacttctctaatggctgtttaacagaagatgaccatactgtgtaatcttcatgtgatatactttgctgaatatgatgtatcattgcctctttgatgacagttaccaaattagcctttcagacaataatttccatagctagatggaccttttctggacattcgtcatttctgagatgataaatgagcagagaccaaaccttttattttttgaaattgtgtggagtatattgtgtccagagcataccttttatttactatttcatttcttttggtatctctggtgggtaaagtggtgtgattcttattctataaagtacaaactcatgtccaccttgacattattactccaaaatatcacactacatgttaactatggagcaagtattagaaattgaacagatctctgattttttttttttttttttttttttkggagacagggtctcactcctgtctcccaggctggagtacagtggtacagtcatggctcactgcatcctaaacctccttggctcaggtaatcctcccacctcagcctcccaggtagctgggactacaggtgggtgctactgtgcctgtgtaattttttgtatttttagtagagacagggtttcaccatgttgcccaggagattcttgaactcctggcctcaagaaatctgttggccttggcctcccgaagtgctgagataagtcaggcataagccactctcccgtgacttttgaggtctttgaatgttgcttgcattgcctagcacttttatttattttcaaccaccaaccatctgtgaggatcttgggcaagatgcttcaccttttggtatcttggttttctcactggttgcttcagtaatatttgctttacctcataatactttgaggctcagaggagaatataattgcaaaggcaatttggacacttagtagctacgttattataagctattatttacatagacctattttcttcttcagtgaaataagagtggtgtagttttctactttcccaatcacctaggtgcagtgtaccctctattacttgcactaatggagagaatcgatgttgcaaattttccagaacgccaaataattagaaaatcattcagaaaataattcagcatttacatttacatatgggtctctcttgtgttccaagaattcataattcagaaaagaaaagcaaaataaataaataaataaataaagtctgactcagaagaaaataagctttacaacttgccatctttgccctttattcccagcggccttttgtgggacagatatgtatctatgtctctaaccggtgcagagttctagcttacagcattgttggcttatttttatttttattttttaacatttcaaacctttagtcagacaggaactgacttgtgtgaagtgtctatcttgttttctcagcttctatagcagtatcaactaygtatagattatgctaagaaagtatgtaattaaatactgtcaatgtacatttgaaagcaagtttgcagtgaatcacctatccagggaataatcctgggttgtcctgtaagagtacttagaaatgcaacagatgtacactgcgttgcccagcttcccctttgtttatatgctgctttttaaaaaattgaggaataagttgtttggcatattcttttcgtagacctctttgtgatcgggtttttttcaagggtaaaaatctgattgcttttttaattcattgaaatgctggattttgttgttttattggtgtcctttggcttggcatacttactgatagtcctgttatttttatttggagacatagctttctgtttattagtggaaatatatagtgaaaatctttggaggcctgtatgtatgtatgtatgtgtgtgtacatgtatgtgtatatatttatatatatatttttggaggaagatacatatttttcaaaaattaaggattagttcattcccttcaattctaataggccataaatcactctgaattgttatgcatctgtcccaccattatattcacatttcctggtggacatgatctttataaataaataaaacatttcaatccagcctctccctccccatcttcatgttcctttcccactgctactttccctacttctttcatagttggaaaaagagaaatcccctagaagtgggagtggagcagacaggatgggctagcagtttctgccttccttctctttcctccatcatgacagagaacagctcccctgtgctctcaccagccacagtagcagtggttgcacctgctgtatcttaaggtgtgaattgtggcctttgccatttcaccaggatgttgccyaaaaatagagctactggtggagttaagtcaagccacatggcttcctgaacatcggggctgtgtgtgtgttgccagcttggcactgaaaatgctctatcccaaatttctgttttgaagaaggcctccagaacatctctggggcatggaggcaatccaatccagatcctgcacctgcccacccagctggtcaccaattttacaggttcgtatttttcagtacttttgttaactatataacctcagttgggtgactgcatgcctaaatggcagtgtatgtgtgtgtatgtttgtaaaaatatacaactccaaatagagaggttgtatgtgatatcataaacaaatttgtatctatagaaggtgcatatatgtaaaagggttttggaattttgctaaattgagtccagcatgatactgacacactggcttttatgaaattggtttttattaaaatctgcaggtagttcttgtactggcaatggctttgattaagcagtgtagtagggtcatatcctagaataacagcatttccaaatccctgactgtttttgaaagaattgtgattaaagttctggctcttttcccatgattactaatgtctgctgagggttgagtttcccaggttgttattggcgattgagttgtgtggcagcccgttgtgctttcttgtcagtatcagtggcattctctagggggaagtgatttcacattgaaatgcgagaactaaaagctgtaacaaaattaacacggggtctagggtttctgatgtgactacaaaactagaatgggaatgtttcctaaagcctaattcatctgtgattgaatttcagactaaacaaagctgccatgatgagaaggtagagaaacccttctaaaagagattatggatgaacagattgaggaacatgatatggcagggcaaagtctagacaatcatatatttcagcttcagctgggcctttcttcttgacaggtgtgttctgtgccttggcatgagcagctcacttgggaaagcccgtgctgttaggaatgatctctttgcatgccaatgggaaatggaaaatgaactccattcttatataatatgtaggaaaaaataagtgttgtgtgtgttgggtggcaggcatggctccctaggttttaagatgtattgtggaattatgtttgtctgaaaacaattatttaatgtctactactaccccagttaatgatatgctcttttccacattgaaaaaatatgcaggattttagaaatcaagaatatattaggtgtttttttgttttttagttgctaccaaatttaaattttacataattttactctttcatctgctggtcttttaccttggaaattctagaacttaggtgttgattctctacctctgtaggttatgaagtgcttgaggtagagcactgtattttagactctttgttttctctctaggtgccatactcaaaatagttttgtaatgcctgtctggattgatttagagctgcttctttgtgctctacaaaaaataatttttaaactcaaatgcatcttcatgcagatacctaaatacaatcatttctcrctcaaagatgggggtatcttttgagaaatgcatcattaggtgatttcatcattttatgcacatcatagagtgtacttccacaaacatggatggtatagcctaccatacacctaggttatatggtatagcctgtcgctcctgatatagtttatgatatgcctgctgctttacaaacctgtacaacatgttactgtactacatgcacaacgtgtaggcaattgtaacaaaacgggtatttgtstatctaaacatatgtaaacatagaaaagctacagtaaaaatacagtttaaaggtgaaaatggtccatctgtatggggcctttaccctttgaatagagctggcaagactggaagttctcgagtgagtgatgagtgaatgtgaaggcctagggcattactatattctactgtagatgttatgaatatcgtgcacttaggctacacttaatttatagaaaataatttattaataaacagcttactgtaacttttttcctttataaatttttatttttcaacttttttactcttgtaataacacagcttaaaacacaaacacagtgtacagctgtacaaaaatattttcattatatccttattctgtaagcttttttctaatttcagaatttttttttttttctttttaaacttttttgttaaaaactaggatataaacacacacatgagcccaggcctacacagggtcaggatcatcagtatcactgtcttctacccccacatcttgtcccactggaagatcttcagggacaatatcatgcatggagctgtcagctcttatgataacagtgccttcttctggaatacctcctgaaggacctgcctgaggctgcattacagttatctttttttataagtgaaaggagtacaaccaaaataatgataaaagtgtagtatagtaaatacataaaccatatcatagtcatttattatcattagtaagtaatgtataatgtttgtaattgtatgtgctatacttttatatgactggtggttcagtaggtttgtttttaccagcctcactacaatatgtaagtattgcattgcattgtgagatgttagaacagctatgccatcactaggtgacaggaatttttctgctccattagaatgttacaggaccatcatggtatatgctgtccatcattgtctgaaacatcactgtatgtatggaacatgactgtaattaaaatgatcttttctttgagttctgaacttgacacacttggtactgctccttcagctctggtttcatctttgctttaacttatagcactgatttctttttctttccttccttccttccttctttctttttttttttttttttttttttttttttttgaggcagagtctctctctgttgcccaggctggagtgcagtggtgcaatcttggctcactgcaacccccacctcccggatttaagtgtttctcctgcctcagcctcctgagtagctgggattgcaagcatgtgccaccacacccagctaatattttttatttttcgtggaratgaratttcaccatgctgtccaggctggtcaagaactcctgacctcaggtgatccacccacctcggcctcccaaagtgctgggattacaggcatgagccaccacacccagcctctagctctgatttcaagatgaaacaatggacttctggcctaacctcttcttgtctttcataggttgttaggtattcatgtaggaatgaaagagagcagcgaaatagtaggtgtgtctgtgtatgaacattagagactaattcatcaattcttcaacaaatgttttcttartacacactattgtcagactctgctttaggtgcttgagatacaagarcaaacaaaacaaagttcctgcaatcttttaatttttttgaatatttcattgagataaaatttataatataatattttatagaattgtacaattatcactactatctatttctatcatttttatcacccctataggaaaccgctattcattaatagtcactctgcatccctttttcccacagccgctggcaaccactaatctattttctgtctctatggatttgcctgttttggacactaagtataatggaaccatgaaatgtgtggcctttattctggtttccgccacttagcataatgtttttaaggcttatycatggtatagcatgagtcagtactttgtttttcctgaagtaaggatgaccrttgaaggagcaagctggggattgcaggtgggtcagagtttgtttttggacatactaagttagagtcatgcttaatggaattctagtgaagatgttgagaagctagttgaaaaccgaagtctggagttcaggagagaggtctgggctggagatatgagttgaggagtcattagcatatagatggtacttaaagccaccaggttaaatgaaatctgctagggagtataggtagagcagagggaggttcgggagttgagcctgggggcactcaaatgctaaaaggtcagaaaaatgaggtggaattagccaggagaccccagaaggactagctagtgtgtcaggaggagaatcaagacagtataaggtcctggaagctaagtgagaaggtgtttctagaaaggaatggttaattgtgtgaagtgatgctgctagatccaataagaaaataagaaagataaggacagggaattgttcattgactaagaccattttaagaaggtagtttccacactagcattggcaagagtgaaagcgagggcctgagagctgtgcatattcctgaccattcccatgctcctaatcccctacaagtcttctggcctcacctttacagtctgttccatctcatcatgccctttacctcattcctgtaagctaccacagagagtccagggttcactagttatctgccattttctggccccttatccccaatattgctctgtacatctctgtttccttccagtgtgcattacttgaacttccctgtttcatcattgcaaatcccttatatcctgaatatcttcactgaatactcctttaacctacttcctagagcagttagaattaaacacaatctccctcttgagaaactgcttcctttgctgctgtttattattattattattattdttwttttttttttttgaggtggagtctcactctcttgcccaggccggagtgcagtggtgcattctcggctcactgaaatctctgcctcccaggttcaagcaattctccttcctcagcctcctgagtagctaggattataggtrtgcaccatcacrcctggctaattttttgtatttttagtaggggctgggttttaccatgttggccaggctrgtctcgaactcccgacctcaggtgatctgcccaccttagcctcccaaagtgctaggattayaggtgtgagccactgygcctggccctttgctactgttttaaatggtggctcgtctccagcacattggtgtgataggtgtcttccttgtctcttacaratcgctttctttctcttctccctaaaaattcccatactttcggattattccatctgttattatttcttgtactcatttatagaccctaggattgtccctagctgtagatcctttttctagctgtagatcctacaatgcgtatttgctaatagtaatttattttccgagttttggcaagcatcattgtcacagcctggcttctatgtggtttacaatagtgaggatatgtttctagagcagtttttctgagacactagtaaatatggaagatgacaaatgcattaatcaggctcctgccatacggccctgatttttaaaaaatgcatgaattttaaatggtttgtatagttgaaaggagaacttaacacatgtgtctgacaagctgatcaaatgataaagtgaaggaaaattgagcctcaaccttttgggcagccagtgaaagtaaaggcacattgcagttttccgaggcagatggaatgtgaacaactaataaatcaggttttgaaacattgaagaacaacttatttcaatgcatatggtgttggatctcagacaagatagtattggaaataaaaatagattcggcagcatcaaaaggacattgtacctaagcattatctgcataacaatatttaaatgcatttcccagcatcaagctccaatatgtagtaaataaataattatagggcaacaaaaagagccttcaagatctctacagagttgtacataaaagagatcagagtgaattggcactatcacaagcattctgtgatcattctaatttctccatctctctcgtgctttaagaagatcagaagactgtaaatcgatttatagacttctcataagaaatactaaaagtagaagtgcgggttattataatggagaaatttgcattagtgcctgctatatgctatgtgatataaaatggaccattgcataaaactacataccccttaagtataaaaacagatttcagaaaagcaaagaagcacggctctgaaatttgaatttcatcttcaccaagtgaaggggtagtggggggagcaagccaraattgctatcagtaagtcatttttaagtcatcctttattgactttttcagttgtaaatagagttagaaaattttcttttgaaattttgttttgaaatccggcatttgttagtagaatatacttcaactcaaagttgttcagaatttcataatagaattttcctgggggtttattgttaagctagattctgggatattggtttaatatagaacaatttaatctgagtttgggacttattttttgttaggtaaatcgaaaacagcaatggaaatacattttcccttgaaaaaacaggatgaggagtaaagtgaatattttctcttatattcctttaagatatttaggttaacagtttgtttgattaccccatttgagtttgtggtaatttctttctgccttctcagaatagatctatatttgttatgatcatcaactactgaacactattagagatttaggcgttatactgaaataggattaaaaaaagaatgtrgtattcaaacttgctgcaacagtgtttaggagtrcattgtactaaagaccctagtggatgtggggaaaattaataaatggttgttatctgaagtaaatatgctgtatttctttttttttttttttttttttttggagatggaatcttgctctgttgccaggcaagagtgcagtggcaatcttggcttactgcagcctcttactccctggttcmagcgattctcctgccccagctccygagtagctgggattacaggcacgtgccaccacgcccagctaatttttctatttttagtagagacagggttttaccatgttggccaggatggtctcgatctcctgacctcatgatctgcctgcctcggcctctcaaactgctgggattacaggcatgagccatcacccccaaccttaaccggtgtatttctggtagttttatttacttattttggaagaatttcaaataaacacaaaatttgggaaaatagtataaatataacttatatgttcatttctcacatttaagtgtcatattgttatcaagattttaccatattgggttcatctattttattttatttcttttctttttggaggtattttaaagcaacttccagtcattttgtcattttacccctgcttgcctgaattcacatctttaaaacctaagagcaccttcttagatagccacaaatccatcaattgggatatctgagtgtggggaactgtaattatacattttgcctccatttagggtttactgatttaaaggaggtaataaaaaaggaataatttttgttgtgtggaatccagtatgacagtacagaacttcttcctattattttatgtgtggactgtttccatacttaaattgaacttgtagctgttccaggtcttgattcagatgtttatgccaaatgagtttttggctattgtgaatatagcatattccaattacatgtatattgtgactgcagtgagttggaaaataattttctgatattactaattcataatagctatgtggcaattgccctcttctctcgattgtgtgataagcacagggaatacgtagaagtcagctgagaagaaacattaaaggaggaatattttccatcaactgcaactctcatattgacacataagtaaacatttatatgtgtaaagcatagttataactaaactgggaaaaatctgtatttaaacatcattgccttacatgtgattttatcctggggatgggggagtgataaaattataagaatcatgagaatagtgatagacacggtgggccaggtggggtcgagctgactcgctggagccaatggtgcacatctcttcccactgaacattctgctttcagtgacatcatgttggtagcttagaattggccacgatgggtgtagttacacaacagaaatcagcaaatgctacaacaggactctagcctctctcacagagctggttattaaacattgaccaagacatcagtagttatagtccatgaacaactttttacccataggatgagaggctcaaatgctgctttattgttctgtaatcttagtcttctaaaacactattcttattgtttcataatcacctgttccttaatgtgtgcaatattcctttttgttcttgatagacataactagatgtaattaaacttgttataaatttaatttcctttccatgatcctccatgactgggacagagaattctttagggaagttgacacctgctgcagaagccttggtaatggttcctgacttaatatttatggatgtaatcccagggtattttgatgaattcccagaatctcactgttggaattgattcttaacattctaatcaatgctttaaatctcctttatgagaccacaacaagtggactttcagcttttcttaggaaaaacaaacaaaagactgaagtttcagggaagaaactgtctcataagaaagtcattactttttcatgcccttcttagtaagtttttgcttttataaagtcagatctgccttyttgaaagttccaacctgtttattttaatactgtcttctaggaccacrgaatataattttaactcctttttcatcatgtagcttttcacatgtcacaagatactaatcatattcctccccacacctccatttctctcacctaaacattccccatttcttccacttttttttatattcttgaatagagctctaaatcttaaacctgctttcctctgaggattcaactcttgtgattgcctcacagcagggattagcaaaacacacaagtgtttccatgttacagtaactagcatttataatgtcctttataaaaattttactaagaacttaacaccaatatatttgttcttttttactttttttttttttttaagacaggatctcactctgtcacccaggttgccgtgcagtgacrtgattagggctcactgcagctgtgayctcctgggctcaagtagtcctcccacctcagcctcccaaggagctgggatcacaggcatgcaccacgattcctggctgttttctctattttttttttttttttgtagagatggagtttcacctgaactcccgggctcaaatgatctgcctgcctcagcctcccaaaggctgggattacaggcatgagccmtcatgcctggcctttatttgttcatttaatgagagaattgtgagagagattatagactggtaatkgttagattgttactccccaagaaaataagccagtgaaataggaatgagaagtgtgatgggctttggtgtagtggcagaggttttgtcactttagcgtggttgatgatggtctcagaaggtatagaccttgtgtgctgcttggcagggagaataggagacatttcagataactttgctttggagcagataggaaaagcattttgaagctagactttatatcagggtaaaaattaaggaaaagattgtgtcagaggttactctgagtttttaaagacatgatcttctgacattttcattgtgtcactcgcctgctctaaatctttaatagcttttcattgtacttcggataaaaaatgtcttttccttcataggacctaccacaccctgttgatctggtctgcctacctcccttcttcatttattctccttcatccctagtcttctacactcaacttttttcactgccttgaatgtgtcactgccttcacacatgctcttcctctgcccagaacacaccttcctctattctttacagactaactcctacccattcttcaggtctctgtgtgtcatttccatgaaatgaagcctgaaaggggtttccctggccttgatgtaaattagcccctaatagatattttagagattattgttaaatactacagagatattagggtctctcctgccattctcttctaatctttcataacacagaagacaatttgtaattacatatttatttgcactattgctgaatatcatttactacatgaaaataatctcatttacaatatggtcaactccatgagggcagggaccatgtcacacctaccatagtgcctggtatgcagcaagctgtttaataacaactattgaagggtgaatgtttggtgcttccctacagtgtttgtaatctttagtattcatgttcttaagaatatttaatgacatgggaaaacacttaggatatattattaggaggaaaaagctgactcagacatttatatatatatggtttcaatttttatgtgagttgtgagcttgtgcaaatgtttccttttagtgggcatttagtgagcattccctggtaatctctctcacaatcatatcttcatgggcagatttctggaacttactcttacttgctggtatatagaagtatacattttctgctgactagatttaatatttaaatgatcttatttatattggattttactctctttatatgccaaggaagggcttactsagaaggaggtagttgcgtaaagacctgagaaggtagggaagtgaggtctgcagttctggggaaagagtgttgacagcagagggaacaagatgaacacaggtcttacaggtcattttaaggagtttggcttttacttcaaatgagatgtgaagcctttggagcattctggagagaagagtaactggattaggcatgtattttaacagtatcactctggcatgtatgacagtccacctacaggggacaaggatggctgaagagagaccaattaggaggccagtaatgcaggaggcagatggtggtggcttggaaggtagtagcagtgagggtggtgagaggtactgggattctttatgttttgatgacaaaatggaaaggatttactgagggattggatgagaggtagacaaaatacaagagtgaagatgactccaaagttttagacatgaacaactaaaggtggttgttcttaccattaccaggaccttgtactgtacctgtacatggttggtacttcataaatactttttggatgtgtagttggcccagaacaacatgggtttgaactgtgtaggtccatttatgtgtggattttaaaaaataaatatattgaacaaatgtttggagattacctgtagtttgaaaaaactcaagagacaaagtgtgtagtctagaaatatcagaaaaattaaaaaaagatatgtcatgaatgcacaaactatatattgatattagtctatttttatcatttattagaaaatatatgactctattataaaatttaaaatatatcagaacttttacacaaatgcagaccatatatggtgccattcacagtagaaagaaatgtaaagaaacatgaagatgcagtgttaaatcataactgcataaaattaactacagtgcatactgtactattgcagcaatttcgtagtcacctcctgttgctgataccgtgagctcaagcgttgcgagtgtttgcttaaactgctgtgtgatactaatcatctccctgtgagcagtccatctctccagtaaatttcatacggcagtgagaagtgatctttggcagttctcatgtattttccatcgtgtttagtgcaatactgtaagctttgaataactccatggaacccatacaaagcaccgttagtcacagtggaagtgctcccaagaagcaggggaaagtcatgacattacaaaaaaaaaaaagatgctgaattgcttgataggtactatacattgaggtctgcagctgtggtttcttgccatatcaagataaatgaattcagtgtaagggccattgtaaaagaaaaggaaatttgtggagctgtcactgaagctgcatcagtaggcatgaaaaccttgttcttttcacgaaatacctttttatctggtattgaaaaggcagcttttatgtgggtgtaggactactataagaaaggcatacctatagactctaatatgattccagatatagggaagtcattatatggtaacttaaggcaaaaggaaggtgaaggatgtaaagctggagaatttaatgcaaattaaaaggatgcaaagggtggtttgataattttagaaagaagtttggcctaaaaaatgtcaagttaataggagaagcagcttctgccaaccaagagacagcagatgagttcccaaacatcattaagaaacccattgaggaaaaaggatgtcggcctgaacaggtttttaatgcagatgaaagtgccctacactgggggaaaaaatgccacaaaggatgtttattaggaggagaagcaaacaccaggatttaaggcaggaagagataggctaactctactcttttgtgcaaatgcagtgagatttatgattgggactgcccttatctgtaagtctggaagggaaaagatgaacagcagttgccagtcttttgtttgtacagtaagaagtcttgaataacaagaacctttttctggggtggttccattgatgctttgtccctgaagtcaggaatcagtaagggactgccttttaattgtgcaatactcctggccactcagaactccgtaagttcaacactgaaggagaaatattctacttgcccccaaacagaatgtctctaatcagggaatcataaagacctttaaggctcattgcacatggtactctatgaaaaggatcgtcagcattatgtaagagaatcctgacagggagaacatcatgaaagtctgaaaggattacaccattgaagatgcattgttatagaaaatgccatgaaaaccaccaaacccaaagtgaattcttgttggagaaaactgtgttcagatattgtgcatggcttttgaggatttacaagagagccgatcaaacragtcatgaaagaattgtacatatggcaaaaaaaaaaaaaaaaaaaaaaaaaaagatggtggttgtgaagggtttcaagatagagatcttggagaaattcaagggctagcagacaacataccagaggaattaacaaaagacaacttgatggtgttgagtcctttcaaaacagtgccagatgatgaggaagaagatctagaagaagcactgccagaaaacaaattgacattagataatctggcagaagggttcagattatccaagactgcatttgacttcttttatgacatggacccttctatgatatcgtcactgaaactaaagcaaacagttgtaaaaggattggtaccatgtagaaacattgttagagaaatgaaaaagcatctgtaaagttgcactgagtatgcctgactctccggcctccccttctactttccccacctcctccacttcttctgtctcttccactcctgagacagcaagaccaacccctcctcttctccctcctcctcctcccccctcatctactcaaaatgaagaaaacgagggtgatttatttttataacgattgacttttagtgaatagtaaaattgtctcttccttatgatttccttatctgtagctttattataacaatacagtataacacacatacaaaatatgtgtttatttttctgtttatgttatcagtaaggctgctggtcaacagtaggctattaacagttaagtttttaggaagtgaaaagttacataragatttttgactggaatgggagaagcaaccctatcctgctttgttcaaggattagctatatttgaatttaatctgtctgcagtctttttgttttaatttctgcgttctctattggtggagtggtgcttggcgattgagataaaaagtgtttatgctgaagttgtgctccatggaccattagtttttaggcttaagttgctttgtctagtattatcagagccttttcgttggtaacctctacctgtctctgttctctcctcagctaaatcgacaagtacattttaataaaagctttatctgtatttcagacttttgaaaaacaacatttaaaaagcagaatcaccaatctttaaagaaatacaaagaaaaagtgtttttccaggaagagattgtagcagtaattttatgtgatgtgtttagaaactgttgataagtagcttctttgttctgtgattgagtcactgtttttgatcagtcaaacgtagtatgtattgaataccaatattaggagttctgtattatgtgttaccattgccagtctgtttacctatcttattaatattggcctattttgtagaggaacagtgtcctgttttctctaccaaacaatggtaacttatgtttgtccctggattttattatgcatatataagttggtttccaaactcaagaacaatcattttgtcttgttggaaggcttttttattcctttggtttatcttgtaatagctttgcttgtaattttgtgtgtgctcttttttataccctttttatacatcataatgtgaacttcatgaggtcatggattatggctgttgcttatgtttatttcaccatgaacccmctgctagtcacaaagatgctgattatagattactaagtatgggttattgaatgaaatgaaataattgtgtttccctattaaagcaattctgaaggaaatatatttttgaaaaccattgattatagtgatttgcttaaagttcagatacttgttttgaggtaaataattgagaaaatttttagactaaaattgcacagacctgtcatgaattttgcccatttttttcctttgcattgggtaatttttgtgacaatgatggcaggatctaagatgcttcttagaaaacaaagagagtatcaaataatcataactagatcatgtaaaactgtcagctgcaaatgataccagctatttattcctaaagctttactaatatagcaaagcaaaacatacagttcattctcatttagaatctgctagaattatcatcgatatcaacgattataattggactatctacttgaaaaaggtgctactatgccattttatgcagtatcagaaaaatgtaaataaaaccattggacagaatatattgtaaaggaaattttataatctaagaaatcaaaattcatagattggaggcttctcatgagcacatctggttgccttattttattgacaagaaatagaagtcccagataggttgatagcttacttaacaccgtatactttatgtcaaagttagacagagaactttgttttcctaatatctgattttgttatttataaattgcattgtattatatatcattatatttcactatatcaagttaaccgataacatttaaggcaaaagctgtattctgctctatattaattatttttggattatttatagtgattgccttagttaggattacaagaaaatggactaaaaccataaaaacagtaatagtatatctgagtagaatccaaagacacttgcactggaaaaactgagtggtgaggtgaagttatttgtagactgttccataaagagagggttgcgtgaagacttctctgtccagcataactagtattttcattgatcatttcatgaaaaaactaaaaatgccagataaaacattaaaaaatgtgttaaattgcttttatgaaagataggattcacataagcaaaataacacaaacgaactgcagagagatattagacaaagtactgctaaagccagttttcaccctaagggtatttaccaaacccaagtgaactagcatggcacaggagaacaggaacaaagcccaggacctgtgcaacctggggagtctgacagaagcatccccatcatctacataaagcatatggatcatctaaaaatatcatctctttcccataataccccacctcctataagagactaaaaggaagttggtcaccttgacacaggctgaggggagaaaaaaatccctaaagaattcttaactagatatcttgtcaaaatatacatcctctgggtagtgtgaggaaagtttaaagtgagaattgagttcaaaatgagttccaggttggtagtgcccttaagtggactagcagaactgttgctaatgtttgggataggacctactttcaaaccgggccttaaagaattgctgtagataaagatctaaggaatatgagagtataaaacatgcaaacatacacacacatgatacacaggataaagttaatcaggattcagtagaggtgaaaggagaagaaccagatcagcaaagacttccaataatgtaattatcagacacatgatacaggcttattttttaatatgattttaattaataaactttcaccttaatgactcctgccttttatacctttttcttgctttattgcagtgtttatttttaatggctgcataatattctagttatatatatatatttatgtgtgtgtacatctgtatttatgtttatttaatctagtttctgttttgcattttgagagcttttttttttaaagttcaatataccattctgtgaggaacatctttgttgccaaatcttaatctcacccatgctattattttttaatgaggttgggagtaaattcctagaactgaaattttgagatcaaatagtattcaaaatgttaattaacactttgtgcatgtgctttataacaatcaagactgagcaaatggaaaatgaaaattttgggtttacatgtaagtgtgctagacaaatgtggagcaaataagattggaaaaattcactactttttgctttggtgggtggtcgacattgaatttactgaattcagtgaaggacggaggtcagtacttcaaacatagaacacttaaccttttttctattggttggtgtcattattttgattgtagatatgtrggagtgctgtatgtccttttgttatcaatatagtactccatcagagcaaaaatttaaagtgtattctaccttggagatctgggaaatagtctgagtctggatagactataaaatgatgattatttttgtcaattatttattgaacatagtaaatgtacaacaagtaatattatatatcataatatgtaacattctctgtgaaaacaggaaaaatgcctctagcaattgtaattttgagtattgatctcgtcatggctcatattttgctggcttggaagactgattttgattttgttagaatattacaaaaattgcttcctagagtgtttggaaagttgactgttgccagttaagcctaaacagcaactataggtttgctggtaaagttatttaaagccacctgtgcctcagtaatccagatgcttctaatgagtcatgaaataatgctgtttctstttagatgccagctctgattatctttatcagtaagctaaatggcaccatgttttgcaacctgtattttgactctgattttgtatttacagagcactcgatctctccggcttctcttagtcattttgagttatgcttgttatgccaatccgttcaaaataatttctttccaaatttgggagtacttagatttaagcacacctctgtgcgtgaagacaatgacagcatttaaacaacactatttcttctmtatgaactagtactaatcatttccagtggcctaagctcttttgtggaccctttcacagacaaaacaagattgataggctcaacatgttttcagtttgagktttattcacatcagaaatctactgcccaactggcaagccrtcatcagaggattctcagctagccaaccatacgctttaggtcagcaatgagatgggctcacctgattagagaacttcatggcattctgttgtccttcatatcactcttgctgttacaggaattacagagcaaacagtaaagtcttctgcaatctgaaacttgagtgagaagagaaaccatattgtctgttttaattgtgagggataaaacagaatagacacttagtacaaagaatgcagatagcacagatactttcctagttggcccagttccccagtgcttctgctgtagccatcatctgttatgtctggtaatgccttctcaatgattctttgacatacacaagaccacccctacaagagccaggtgagagagcctagagaagaaaatattaatactttctttctctgcgtgctgcctaccttctctgtctccctgttttctgtgtgtgtgtgtgtgtgtgtttgtttttttttgttgttgttagtttgttttgagacagagtctccctctgttacccaggctggagtgcagcggcctaatcttggtttactgcaacttccacttcccaagttcaagcaattctcgtgcctcagcctcccatgtagctgggaccacaagcgtgcatcaccacacctggctagtttttttttgtatttttaatagagaccaggtttcaccatcttggccaggctggtttcgaactcctgaccttaagtgatccacccgcctcagcctcccaaagtgctggaattacaggtgtgagccaccgggcccagccattttctgttaaccaactagttacttaaaaacaaaaaacctagcattagggtccagcctctttgaaaagcaatctggcagtttctgaagatgtttaacacagagttaccatatgacttagcaatttcagttctagatatactgaggagaattgaaacatacwtccacacaaaacttgtacctggatgtttctagcagcattatttaatccaaacagtagagatgcccaaatgttcatctgctgataaatggataaattaaatgtggtgtatacatccattggaatattattcttccataaaaggaaatgaagtactgattcctgctacaccactgatgaaccttgaaaacattatgcttagtgaaaaaaraatgaaatgtaattagaagtagggttccccagctcacacacatgagaatctctgagctagatatactcaaatagccactaaaacatatttaatagattcaagataattaaatctggagaatcagttaaagagtggaaagagaagaattactgcagtcttccaaagtaaccttaaaataaagtgagttgtaggataatgtcacaaaggtaggaatgctcctcagtggttgtcaattaaaactcccttgtgccttgttgatcaaccatttaaaaatatgcrtggagtcactgtgtatcctttggtaattggctcatatcttacattttgctcttcctagaacatgccattttcagactccattatagaaacattgggcactgctgctaatggatcctcctttgacttatgctcatggaagagctccaggtgaacacattttactgatggctcaggatgagctattattaaccttcaaatttgttgcttcatttttgtttcttcccttgttatcttgtccttccactcctcttttaatttattgtaaggagataattgagaaaggtactttttttctcttgttttgttttctaaaccaagagactacctcaaaataaatagtagattattrtagaattcattgttatttaggagctagaatgtactcagttgttgaactacaaaaaaaaataygatttttatttstttatgagaattattttatggtcattagccaaaaatctaggagagagtcttacttgaagcaaaactccgattagttatttccattctagcagtctactgacatggacgtttccaacacacgtaagatactgcacatacacgtgacatgctgttctttttacttcaaaacatatgagagatgtccttctcacaataatccatcattaggtactcctaaatttagattctctgtcttgacattttgcctatacctgtgagtgactctagggaggaccaaaaggatctttcctttctcctctgggttgagatccttggaatttcccttatttccttcatttctctggagccttatggccacctttttaaggccctacctcttaatactgttgcatggcaatcaatgtgagttttgaaggggacattcaaaccatagcttttttctgtgttgtgaggaaactgcaagacrttgtttgggtcttggatgattagaaatgtggaaatgatctgtggtaacagtaacagaagcaagaaaggtctgttgactattttcttttgtctgtctgtctgtctgtctgtccatccatccaataaagatagggtctcactctgttgcccaggctggggagcagtggtgcactcatggttcactgcaaccttgcactcctggactcaagctatcttcctgcctcagcctcccaagtacctgraactacagttgcacctcaccatgctggsctaattttttaattttgtgtagagatagggtcttgttacattgcccaggctggtctgtaactcctggcctcaagtgatcctcccatctcggcctcccatagcgctggaattaagggcatgagccgtcacacctggccgattttttttcttcttttgtaggagaaacagaataggtggatttctgtcagtgtttctgggatgacaggcaaactcttcacagttcttttcttgaaggttgcaaacctttgttttttgttcctcccttcatgtttttgacatccagggagctctcaccagcaatttgaaggtgaggatgggataagtatcatcatagccgctactagtcaggagagacaggaaaacgtagagttctagttcttgctgctggaactgtattagagaggagagtatttctagcttcagttggaccactaaatgtgttttccccccaaacgttgcatacatgatcattatatttatatatataggacataacctatatattgtttctcttaagcttcacctacatttatagtgaggctttttgtgttttgtcttgaataaccagctgctttatttagagttgattccatggaaaatattttgtgtgtcaaactccatcacaatatcagggttcagtactccgttttagacttttcctgcaktactgtgatctggatccttttattcaacctgcgaattccttggaaacataaaatgatactaagcacattgtaggatatatagttgaaaaaactgttcttggagaaacagactgaagtttgaataatgaacctactctatgtgtgaccttgagcaagacacttcatgccccttaatcccctgccatgagcctccattttttcatctctatggtagataataatattataggaatattattaggatgaagtgagtatttttatgtaaaggattcagcaaagtgccagtttcttagtagatgtttggtaaatcagaatcagcccctttcccttcttttcctttttttctacatatccaggataataacttggcacctgtcttaacctaaagtataacgcgagagctacacaagaataaaatataattgagcacaatattgacaagacgtttacttgtcttatgatgagaataatgaatttatttctatttgggagattatcttttataaataatactgtaatcaatatactttttcagccctttcttgaaacatggatttctcactgagcaaactttatgtaaaaacataattactatttgctcctagttggtttgtaggtagaattcacttggtctaaaaagacattctttctcgttttttgtttgtgcatatgttcattcaacaaatatgtactgtgtgcttattccccgggagaaactatcttaggcacaaagaatacaattatgaacaaaatagtattgttgttattaataataatgacacactacctaagagttgagtgcaataggtaattctttccttgaaggggcttgttgyctggattttcttcctgtgtccagcagcagctcacccttgggtaatacagtaccatcactaattctgatttacttgactttgctgtcatagtaaatcatttgagggcaaggataagtattttacctttgttttcttcttgatatagcaacaaacccaaggtcacatacttgtaacaaggttacctttgtgacaagtttagtggtggtggtaggagcagcaacagcattaagccataatgatcgcatgtgctttaagaataagcacttactaaggaatgtaatctaaaagaacccctctggcagggtgacagctgtgaattcagggaactcttgaaccattcagctggctcttagagccaattaaagaccccatttattgatgcagtcaggagttccatatttattatactgtatactatttcataatccttagaaagtagttatgaagcaaaatatttgctataaaagaattcaccttcactgtggttcttttctacgtggaaaggccaatttaaaaatcaggacacattaaaaatgtcagatggggcatgccrcttcctatggctcaaaaagtcatgatcattttatgctattttcattggagcacttagtacaagatggttataatttcaacatctatacatttaatattgattatttttaattgaaaaataaagagtagggctgggtactccctactactttgggaggccaaggtgggaggattgcttgatttaggagttcaagaccatcctgggcaacatattgagaccctgtttctacaaaaaataaaagatgaaccaggtatggtggtgtgcacctctagtcttagctgctcaggagcttgaggtgggaggatcccttgagcctggaaggttgaggctrcagtgagctgtgatcacaccactgcactccagcctaggcaacagagcaagactgcatctctctctctctttttttttcttttctttttgaggcagagtctcgctctgtcggccaggttggaatgcagtggcatgatctcggctcactgcaacctctgcctcccgggctcaagcaattctcctgcctcagcctcccgagtagctgggattacaggcatgtaccaacaagcctggctaatttttgtatttttagtacagacagggtttcaccatgttgttcaggctggtcttgaactcctgacctcaggtaatctgcccacctcagcctcccaaagtgctgggattacaggtgtgagccaccgcgcccagcctgacctcatctcttataaaaaaaaaaargagtagggggaatgatggctaacactatctaatgtttttataaattaaaaaaaagtaaaaattaagactagagaaagttctttctgtcctgctaagtgttcccagcaaatttctaaatctttcacttacagtaatatttccacaaaaataaggcaagcatgttttacacatttgttgtaaagttggtctcattaatgatattgactagtattgtgttgcctaaagtaacaagaacaacattttttgaatttggactttctttctccctagtttgtgaaatcagttagatcgttctgtgtttggcaattctaatggaaaaggagaagagcatactaggcacagaacactgtactgaatgcccttatctacgttacttcccttaaacatcaccacaagtctttgaaaaagtttattgcaatccttattttataaatgggaatgctgacgctcagagaatttaaataattttatcacacttatgctaataatgaatagtggtctgatgtttgacacaagatcattttgattcttccctctgttccatagtcatttcagtgagaatcctgtttctatttctttctgaggctttggtttctgtttgtgttttattaatatgacaatatttattacaaaccacattaaactctagttgggtagaatcarggaataaataaatgtggaatcttattacttaaaagtaaatgaattctaaaagaagggaccagcctatgaacactaagatgttgtcattccagcagttatcaggtggccttggtgcctgttgccagctgcctgggacagcgtgtcaaatcatcgtccttgtaatactattgtcagtttcccttgcattccasccatccatcatcattcgacattttctctggtgcctatcacctggcctctcacagctgcaattagactataaatataatgaagggaaggagtgctctgacctgtccagtgctctaaccaggattgaacaacatgttccttaagaaggctcctggccagcgacggtggctcacagctgtaatcccagcactttgtggggctgaggcaggtggatcacttgaggtcaggagtttgagactagcctggccaacgtggtgaaaccctgtctctactaaaaatacaaaaattagctaagcatgttggtgcgtgcctgtaatcccagctactcaggaggctgagacaggagaatcgcttgaacctgggaggcggaggttgcagtgaactgagatctcaccagtgtacaccagcctagggaacagagcaagactccatctccaaaaaaaaaaggttcctgacagtaggtcccaggttatttgatcatgagaaggctcatgaggaaaagtgagttttgtttctcacccagaatactgaaatgctgaagtagatttccgggggtcaggactcagaccttatgatttttggccgtgacctttacttttgtttctgacagcttgattttcaagaatattttcattgggttggctctatttattggtaatgtagtaagaaacatttgacttctcatcttcaagaggaaatcgtgacaaatgcagtatagatggcacttggtaatgaaactggaagagtatatgaggttcctgtaggtggaattctgtttaggtgttggggtagggaggagagtctcttttttcatatttctgcccgwactttactttttatttagcttaactgcactatgtgaatcagtagtcatccttctgtagctagcaggggtttagaactaatgaaagtattatttagtatctaatctcataccctgtcaatgtgcrtatattttcacagccaaatcttcctctcactgacatttctagtgactctgacgttttatttttggtattgtagcttatcttttgttgtttttgttctctgtaatatggtcatcaacaaacgtttattaagcacacctactccctatacagctttgaggatacagggaratttgcttacctgtattagtttttgacagttgcttacattgattcgggttttgacagtttacatttattaggctttcacacatactgtctcatctaattgctataacattttagcaagttaggtcttttttcctttcattcagcaaatgtattcttgtataatcactttccaggaagttacattcctggtgggaaaaagtgacataaggaagaaaacacatagtaacagaagtgacttgtgttaaggttcataatgggttattttatacatagtcactgttaatgaaattgtggactttgagacaggggcatttgacagtttggggatagatgtgggacctaaagaaatggtacgaggggagagggacctccagatggtagcgcagtgtggctgaggcatagaggtgcgcatgcatagagcgcaactatacatgaaggttttcatttgactggagccaggttagtcaggtctgaatttaattaatgagtacctaatatcrtagcacttaagaatatttagaaaccattggaaatcatctagtctatctcgtaaaggttatcaaaagacatgttcatattgagtcgattattayattatttttatgtagacttatttatctgttcctgaagtgtggaatatatcctagtttcttctatacacatctctttcatgaatcaattctgactagattttataatcttaaaaggaaatatgttgttaaagaagttatatttatttatcatttttgtaaccgtaccatatgacctttcaaggaggattttattaaaagtgtagtgtttgtgtcagtcttcatgctttccttaactcagcaaaacttagcagcaccttcatatctctgatgcaaatattgtacaagatggattttttttaaatgagaaaaaacagtccatgatttttaattaagggttgagtatgccattgtattttttgttattcttaagaaaacgtatgctctgattagttggtagaaacaactgatccaaatgtctagactctgatgcctctgggaagtcctgatgatccagggtatggatttctgaagcttcacatgyttttatcagtcgatttccaagatgcccagagaccattaagatagataataaatcaagggagatttagctgtgtttggtaacatacaaagaactatactcagaaagaaaatgtttaatttaraagaaggaaaccaaatgttgcgagtgtagattgctagggttttgaggaagcccactaaatagtagccatctttcctgctggggttttgaaactattgagaaataattaaggtagatagttagtgaaatgtcacttttatattgatttatgctagattgaaggatataacccagtttgagaatcaaacaaagcttgctaactgaacatcacaattaaacagatttactcacccatttagaaaagatgttggcccacttcaagccttctctgacaaagcggggcctttatagctaaacttacaccagacaccactgaactatcttcaggcattctagtttctaaagtggaatatgggagttgctaagccatgcatgcccagccttttcttttcaatttttatcagtcaggcgttatatcacttcccctggagtgggtaaaaggtggagagaggtcagagattacattagttgaacttcattatagtggcaagaaacataagtgggggtagagtgttyttcccaacatccaaagtgatacatcttttcacattctaaactctctgaaattaggatgtatctgaaatcagtggctgcctactggaaaccagtcatggtgaattgtcacccacacagtgtgtgtgagcttgggttactccttgcaccatgacccttcattgtttccgttaatgaagcaattaaggaccatttgaggaaagagtatgagtcctggtcggaataggaaagccttctgtttaaaccttctgatagcatcaagaaagcatcaactttaaactttgcaggatggatatcagcagcgtggaataaaatataggatgcagcatggagcactgctttatgaaacacacgctgttggtgacactggatgacaatgtttagaaaacaaggacattgaaaactctttagtcagagtgattcggaagagctagacttcaaatattatttagtgttaagaataccttaacaaacttatttttcttatatttccttattgaatgtgcctgagaggtttatggtaaccatttgtttatgtaaaaagccaaaggagctattcaataaggaaaaggaaacattccaagaaagcattatatagtttaaatagcaggacttttttttttcttagtgatacataaaataatagtgtgtcttataatcattggggtcttagatatgataaagtgtgatcagttaggcttatatgaatctctgctccaatctttacacatgcagcaactttgaatggcaggcacttcatcctttctctgaaagctttatgtgccatactatccaagatggacactggtcattagagaccaaaattttcaccttaactgaattgtagccttgcactgttcctttaaatgtcgcatttattcttactgtgagtccatgttcttactcagagtaaaagtgctgttttttgttttgttttgtttgtttgtttgtttgtttgtttgtttgttttgagacggagtctygctctgtcacccaggctttagtgcagtggcgcaatcttggttcactgcagcctgcacctcccaggttcaagcaattctcctgcctcaacctcccaagtagctgggactacaggcacatgcgaccatgcctggctaatttttttttttttttaatagagatggggtttcaccatattgaccaggctggtctcgaactgctggcctcaagtgatccaccctcctcagcctcccaaagtggtgggaccacagctgtgagccaccgtgcccrgctagagtgaaaattctaatctrttgtttattcaagtgaggaagaccagatgaagtcattcaaaataatttcgtacataccgaaggttactgtttgcaaagatggtcctaattatgacagtataggactcatctagrtatgcttggtttgtttatttataaaagtttcaatgagctaagtctgttttttttctttcttctgaaagggggtcctgatgacaacttaattgaaggtggaggaacaaaatttgtctgcaaacctggagccagaaacattaccgtcatattccacccattactaaggtaagtcaagtgctatgatatacttactgaagatcaatattttcattatttatgctggtctactgaatgccagttgttgagtcagcactgaaacaagtcataaaagaaatttattccatttttagggcctcactattaaagttagtcagtttagcagataatctcaatcccactgagtagctacttattttcaggagtaaatacttttatttgattttctttttttcacactcgctacctctgtccctctcctgccctcttcccttccctccctccctctctctgttttatctatctcaggagttggaaactgcttactggagaaatctactctgcacacgtatttttaaatacatttttattgacacacagacatgcttatttgtttatgtattgcccatagctgcttttgtgctacaagtgcagacttttaattgcaacaggactcatatggcccacaaagcctgaaatacttattttctggccctttacaggaaaaaattgcaaacccataatctgtccctctcatttacaccaatgtctgagatatcctttgagaattggcaggtctctgaaatatgatttataaaaaatgaaagacatatacatcaaacatatgtttttatatattgaatgataacatgatatgactagagtgaaatctattctaatgctcagttcattgtgataacatgattataggaaagtaagaatccatggtgcctccattaaagaaaaaatataaatcctaaatacttttaaaaaggtactttatgagagtggaaaaaaggggcaattgttgagtagataaaacgtttcagtttatgataaaaaagttctagagatctgttacataaccatgtgcgcatagttaacactactgtatggtacatttaaaaaaggttgatggtaaatgtaatgttatgtatttttttaccacaatttttaaaatgcaccttttgggatccagatatctaatatatcaattgtgtgttttctcygtaaagaaccagagtatatatttgtggcattttcgcataatagagcagaaactcctggatttactaaatgttaggtacttcagaatatcaccttacctttctcacatcacttctataatatttgaggcatttagaataacagttaaacaaatgctgttgaattgaccagatataatattatgtatattttctccaagcataaacagtttattactacaattatcctaccttctcattaaccgagacttactaaattgataccattagaactaattacattctaatctcttatatagctaaccagtgttctaaatcgtagtggattagtttcctcaattgattttaaatacaaaaacataaatatgtaaattaaataacaaaaacttgactttcacacaataaaaagtttttaaagaaattttattgcctttaagaagtctgttgtagcagagatttgtagcaggtaaattcatttaggaaccatgggattaagaaaattaagactattaagaggttaagagaattaaaactatttctctgtaggtttagttgataagtactatatgtatataataagtaaattataacatacagaattatagattaaataacattgattatttttatttgactttggtaattagtttagttttcactgtcttcttcaattacaattgatttctacttaggtaatgttgctaattgttagaaattggaaaataccttaatcatgataggcatcttctaacctagatttaatgccataatttgctgctaagttggaactcttgtgcttacatttattcccaagtagaaaagaaaccctttagaaactattaaccgtgttgtcagtaaccacttttcaagagatttttcctctaagttttttctttttaaatgtgaagttagaatgaaatatatatacacacacatatatgtaaatatatatgttagtacttattttacacttaataaaatgcatttttttgtagaagactctggtggaacttaatgtattacagttcttgacagctacttgttaagtctttataaatgctgctttgctagatagttgtttcaaggcttggtaatactcccastggttttaytcacttacttggtttctaccttcattcagaattttaacttactagtgattaaaaccggaaaaagtttgttccctgatgtagtttatcattcattctttctctgtgtatctcttaatggaaatccccaaaatattatgtggtctgaaaggtaagttcattctttgataaacggatgactatgatggagtttaaattagcccttggcccaaattgcaaccttgtcaaaaactcctgattggcttgtggaacttgaaatgactaagatcttttagtggatttttactttttttatttgagttttcacacttcagcatttcctgagtgttggatttattatttcttctaaagttcagaagtttagtttttgtaatgaaacgaaccagtgttcattatcacgcttgtgtattttattagtactattataattcaaaatttttcttttatattcaacaaatatttattgaatacttatgatgcatattttcctatctccaagttagatgtggtctcttgttcagatgtagttactcttatttttatgagactatgtaaataaaattgtgtagatatgttttctattctttagaatggtcattgcttttattctatgctagtttaagtgagtatgagttagcattctgttatttgaaagatagtgtagcctaatgggagaggcagtgcagaagaatgaaagctggaaaaatgtacaggattgcaaatttcaaatgaaaaacatgacaaataatcttggttcaggamtaggctccttcactttagttttactcaatgcttgttactagactctgattatgccatgtcctggggaaagaaaaaaataagaycatatccttacctgcaagctcctctcttggtagctgcatgggttgcaaaaatgaagaagcctgaaaacaccacatattggcgaggacatggatcagtgggatgtcctataccttgtgggaggatataaattggttcagcctctctcaaaactggtttgacatgattgagaaatcacatttcctgttactcagcagttccctctcctaatgctcttgaatgtgtttctacttgttatcaactgactcatattatttttctgtcccaatttgccaaactctttttctaattgattacaataattattctatatttataacttagctcatattaaaaaataagtttggctgggcacsgtggctcacatctgtaatcccaacaccttgggaagccgaggtgggtggatcacctgaggtcaggagtttgagaccagcctggccgacatggtgaaaccctgtctctactaaaaatacaaaaattaaccaggcatggtggcatgtgcctgtaatcccagctatttgggaggctgaggcaggagaatcacttgaacccggaggcggaggttgcagtgagctgagatcgcgccactgcactcaagcctgggcaacgagcgaaactccatctcaaaaataaaataagttctagaggaacttatcacaagttgacttttatcaaaagtcaggacctatttaaacattgtatcatttttttttcttacgtggtctcttggcaaactcagatttgttttcagtggagggagaatccctttcaagtgcgtaggtccttcactttcctttgctactttttccctatgtctggtgtcactggtactctgtcttcctgaaactttgcatgactgttctatgcacttcatttattaaaatcattcagttcataattttcattcagctagcagtgcgttctttgcagcctagcgggtttctatattgacaattccaaccacccttctaagaataccacagagcagtttcccgttatgctggtttatatattctcagcagtcgtttttactctcctttcataaaattattataccgggtcctcaattctggtaatcttgctaacttatttttatactgttctcatagctactgcagttccatcactaggaaatctcacaggatgttagcgtcaaatatactgacttctaatttgttcattccccattaactccgcttatccctttacttgtttatttaatgctttccttattgttttttctttacagtcaggcatgtctcttagagagtaaatttctggaaagaaatgggctttagtattatcttccttgctttactcttagcctaccaagacattgtctgtaattaaacctttaatgaatgtttttaatgatagttttttttttgtttgtttttgttttttgttttttaaatagacggagtctcactctgtcgcccaggctggagtgcaatggtgcaatctcggctcactgcaaactctgcctcctgggtttaagcaattctcgtgcctcagcctcccagatagctggggttacaggcatgcgccaccatgcccggctaatatgttttagtagagacrgggattcgccatgttggccaggctggtctagaactcctaacaggtgatccgcccgcctcggcctcccaaaatgctgagattacaggtgtgagccactatgctcagccaataatgggtcatctaatcagtgtttctgcctgtgggtctaaatgaacaaaaccgtattaaaacaaaggtttctagccatgcccggatagattctgaaatactttccctaaaatacagactctgaaaatgatataactgatgsctttttttcttccattgacatgtttcctgtctttcagctctctctagaagactttaagacgaatgaattcattcttataaatggaatttatgttatgggccttgattttggggaacagaaggaagatatgttaatgttggaatttgagtgacattatttctcttcttttgtgtagttctgacatggatttaggtttctttccaaaaataattatttttgaataattacatcatggtarttattaaccatgatctgcatataaaggaacctttggcaatgaagtacattttattgcagtatcaaccacaatttaaatcagagtgacactttttgttacaattaatatataatgtagtcttttcaggaaatttgaaagtactttgtagctgttatttgtgggatttgtggggagaaggagtgagaatktatttttctctttgtgttttcattcatttcttattctttattctctccaagtctaaaaacagataatttattgtgccttagatttgttagtacagttctttcatgtagcaaacacaggtgagaacacaagttatttcttagaaaatctaaatgcttgcacctaaccagaagtatcattcagaaaatactctaatgcctttttttcttcctggaccaataaggtatattggtaggagcattgctaaattgaaacaaagtcatgcctttgacaggtgcacttagcacctcataaccacagagtcccagttaaacaggtggaattgtcaaagaaggatggcagcacttaatgcagcccatcactgctttagaaacagggtttagctaggacatgactcaggaacaagtacaccctggcccaaggaaaccttccgagtcctcacatggcctcttccctgtgcactgggacagagctccctggagtcccttcctcttacaagaatatcagctctatgggatcagggccctgccattgtgacctcatttgaccttaattacctcctttagagaatatatattaaaattcactgtcagaacagactattaattaaagtggtatttaatcgtccttttagcattggagccctatttcaactggaaaggagttttgtgcattgtatgagagagagagaaactagaccactaaaagtgaagtgttggggctgggtagaaatgaacacattctaagttttgatgtctgccaaatcactgtgagcctttgtttcccttatctgtaaaggaaggaaaaacattcattaagtgtttgatgacagtgtcttggtaggtaaagagtaaagcaagcaagataatactatacctcatttctttcagaaatttactctttaagagacaacgcttaaccagaaagagaaaacagcaaggaaaagcattaaataaatgagttggttggtttggatgttgctttctacctgttaagttttgtgattctgtgactgggcagtgcttttataatatttagggaatctgaaggcctggcattttgaaatttaaaagtttatgcaaaaagtgagttttayagtatgttggagaattgctgcttatttgcttcaactggcttttaaaaggcatttggctctttagggtaatgaacacttggcatgcatgaagtaatatgtttcttacaggagaaccaaagaacagttgtttgcagtcttgtagtgacatggcagaggcaggaggctggggacatggggatgatgatgccattcaaattgcaaagtgttactgatgctggttctgttgaacactgctggaatattgaatatctgggctaygagcatttttcactagtaattattcacacctcattaagatcagacatcagttaatgtctttctaggtagagcaaaaagtgaaatatttattggtcagtgagtaaagtcctggcatctaggtcagttaagaagatgaacctctcttggcaacttgggcttttggtgatagacagtatggttggctgtgtaacattcttaagactagtaacagtcagaacaagtagttgtagtcatatcatctaatgtatagagaataatttctaaaaattactcttagatgtatatgttacatgtagaaatcgccatattgcagcagtacagggtactgtttcatggcctgtttgtgaaatagctttgaaatgcctatgattaagagatgcttaaagttaggaggacaggaagtaactaaatccaaacctggaggagtgaaaggctccaaaggtgattatgctattaacyagtaatttctgtttccaaaagtgacatttcaaagtaaaagacaattgtgattaacatttttattttatactttttgttttaataattatagtacttataatatcacatattgccaatatttccagatcaaaggcatatataatttgctgttataattaagcacattttccctaatatttttatctttgaaaaatgcagtgacattgttctacccatgtcagtttgatgtgtacattgatacttatttagcagaatattattctcagtgttcacaggtatgtgatatttttatacagatgcatgtttgttcttaatgagctaaagcctatgtagacattttgaaagatgttagtgattagacagcctagcaaataatgttgtagatcacatattattcatgcatgggaggaaatatagacaccttgttgcatttttatgaaacacagccatttttccccctatgctcagaattatgaaaaaatattgctagttttcagtctgcctgacctgtaaggtctgtgaagtgctgagtggttggtatacatagatttcaaaccctgtatttgagtaacttcttttgaattaatattataaatgttaaatgctataaaccttcaaaccacctaacttttggagattaaaaaatttcattctaaactttttttacttttatattttcaaaatgtatgacatatggctaaacaccgattgcaactaactgggcggttttatactactgaataaaatggagagccagtcaagrtwtcaacccatgtatctaygcacatttcagcagtttctaaagaggtgaggcatcccaatctagttagcacaaaagaataggcggtttctcatgagaaacagtagggaaaacgggaaatgttagtgaaaaacagaggagaaacagaagattttttatctatttacatatataaagagatcactttatatagaaatcacttaaagagatagttattttgttatttgttgcttcataagtatggattataactagttggttgtatgtttagagagattctactctacacaatgagaattttcaaatgaataaggcagcagaaataggaaagcttttcttgggagataatatttttcatggaaatgcttaaccagaagttgaagttatgatgcagttaactggttgttgaatttccaggtctacattctttaaatctctgattgtaagccttcctaatatactgtgcagcttcagagctcggggtagatatgtttcttccaatcttgctcatttgagttacttttttatacttcagcttaatgctgatgattatcattggcagagtcaaggagtatagttgacttctgtgtcgcttcagcattgactttcttctttggaacacaaagagactcatggaggggttgttagacgaaygccacccctccctaccatatagttgcttctgtcctctttctttttttcttctctgcttttgtttttgtatttttctttttccttttcrtgtccagtaactggtacgtacgagtataacttaactcttccagtgactgttaaaggaaaaagaaaactagctttcttctgttgtaaaagctaatgtgggaccaacgctgtatttccaaataaacctaaaatcagcatgactttgctgctgtgattttgacctagatttaagctgatattttagatgcaggttttcgtctctttatcaattatttttttttattatcgattaaccttattagcagcttatatataaaagacagtagaaaagactattcagaacaaaatgcttgcataatttgtatgctgctttttatgtattctgaacatgtgttcgtcttttggactgcagtacccaaaatgtgcttattcagcatttgacgaaatatgtttatgtccagccacagggccatttacatctgattttgaaatctgaattgataatgtaatttggtgttaaaaataacataggcatacctagggggaaaatacagtctctccctttaataacgtatattcctttgagtgttggctatgcattgtttccttgtatgatttggaaaattattttatcattccccttgctcctcagaaaacagaaagacacacacaccccctctttccgatttgttctgtttctgttttgcattctttgttactgggtctgctatataataccaaagactcttctttggtcataagtgtcatttgaacatttgatcattaatattgcctactgtgtttttaaaaaatgtgtcatactgcctgtgaagtatttttcatttcatggtcatgaaatcttttttattttccttttgtagttaaacaaaaataggccccaaaataagcaatgctattttctcaggactttattatttattaaccgagaaaggaaacttctttgattcagcaagataagtgagaagagccagctagaaaggagaagaaggtggaagcatcataaaggaagttttagtttttaattaccttaatttcattttttggtaagagtagtggttatgaacctgggaagtgctgggtctgactttcttgttgcacttgaaataattgctggaatgtttgatgtttttatgttgtttttattagttgtgaaagaatagtaattttgacaattgctatttttaaactcratgagcattcttcaaagtccatttctgtaaaataccacattgtaaatacatgagaaagtattcaataatgtcaagaagaaaaaaaaactaacactaayaagtttctagggtatcactctttagtgaaggaatatggaagtatgttacttaattggactctgtaaattcagaatctctaaattttaaaaatcttttaaaatttttattgagctatacatayatacattcaaatgtataaatctgtacacatatttttaaatatttgtatatttatatgaatttttacatgtgtatacataagtgtaaccatgacccaaatcaagatattagacatcgacatagatcattttcagtaccctagaagacttgcttatattgacagtcaatccctttccctgagagataaccattattgtgaaytctatccctacagatagattggttttgcctatggtttaacttcwtataaatggaatcatatagtatgtcctctttggtgcctgacatttgtgtgacatgatgtctatgttggtcatccatagactaacaatgatttctttatgttagtcattgtgtcagtatactactgaaatgagcaattataaaatataatatttaatcattaatttggaataaaagaactttcagaatcctgtgatcctaaaaactgttcacaatttaaacttcttctaaacagctttccaagaaatcttttgatttcytatcttgtggggccaaggaggttctcagggcagtaagagatcttgcggtggagcagtgtccagcagagcagtgagccagcatagctggaagccacattctcttcatgatgaatgtagactgtttcctacagctttggtagtaaaagctagcggagcaaaaattagttgacatgtttcctagactttgggttttctgatcagtcagtgaaaagataattggcaattaacatgagttgctacttttattaaagaaaagggatttttcttagaattaagatccatcctttttaaggaaagataattggcaacttaaaatcgacattctctctctctctctttttttttttaagagagaggatcttgctgtgttgcccaggctggagtgcagtggctgttcagaggtgcagtaatagcacactgcagaatgcctgggctcaagcgatcctcccaccttagcctccatacctggcgtaagtcaatgttcttaagccaacattaatatgtaggctagtttttggagacagtaaattcagtcaaggagggaggagagaagcttgacatgagggattagccaagaaccagatgcagaattatcacaggaagccatgagcaggtatggacccaattgagagaccctaacatagttgtagtgagttgggaatttacttttattgattgtaaatcacatccttctggtccctaacaggcagtcrctaaaaatgttttgagtaaatgagcaaatgaattgaaggtaaaagtgatgggggcagttttaaatgtataaggcaaattggatggatattgaatattctttcagtatgtctacagtacctttcattgtaattcttgaatattaaaagatactttttaaatctctacactgtcctgagcacacwtatatatatasatacacacacatacatatacgtacatacaaacacacacactcattgccttcactttagctagttgattattagaatatattctgtacagtcacatttgttccagccactttgtttttgaagttttagtacatctgcagcctctcctggtggctgccagtatcgctgtcacctgcaatgctttgccaaccacctgaagctctcttactctgtccagtgtgctgaaggtgctggcatccatcaatatmttttttgcatattctatttagttttgctttttgcatctgtgaaaaatagtagaacatcttctcaatgtaagagtggaaataagaatagtaaagaaaattgtacaaaaataggccactaaattcattctttagcatgaaattagaaatgctgaacaggttygatagaggtgcatcaatgctcagaaatgcatctaagtgaatctacagctctttcttactttgaagcttttaagaaaattgatacgaggatttcactgaagattaaaaagaaaccaacatccttctctgaacgttggaggtctgtctgctttataagcctcaactcattatattttcttttttacatgtttttgattgacatgttgattttaaaaatgcaacttcaacattcagtgggagttgacagtatttaaactgaattttggggcaaaattcttcaatatagtcatatttttctgttatttttaattcattcttttttttccagcaaatactcgctgagtgcttactatataccagacactgtccttggctttgtggaagctgtgttcctaatgagggtattgtggtaatttgagaataagagaaaatctatgataaaggagtccctcattccactaatgctaaatttcttccagtttccttttttacacgtagaagattatctgttgtagaggcacagctcttttcatgccatttctttttcagaggcagtttcacctctgatcttcatcctatttccctccatcccctttgggatccagatcaaaaaatcttgaagttctacttagaagatccttgtccctcttaccccacacgtctagtgttgctagtttctaccagtcctgctttataaatatgtctcaaatttatccattccctgcttttgatacttgttgccattgctttagtcgctcagtttcctaactggtttctgctactccaaacctaaacttctttaatccatcttctacactacttccggagtgatcatgtcactcccctccttctttgtgatttcttatcctcagcccttgaagtggaattccttgttgtagaatagaaggcctgactttctgactttatgcacactgatctcaggcccccttgtacacttcaaagccacgaatccttcctttttccargtctgtcatgctattttcaaaatttttttctttctaccaaaaatgcatctaccaacactgacctttgacctccttcattatctgaaagacattttatccttcaagaatcagcgcatgtatccccttttcttccaactttttcctgtgcctgctcttactcacccttacataatgtaagtggattgctgtctgcttttaaaaaattattgtgattttgccatatttttattatagcacctggcacattgtctggagatgactcaaaagagaacacaggtgttatttgatgtattagtcagggttctctagaacctcacacaatcacaaggtcccacaataggctgagggacccacaatagcctkcaggctggggagcaagaagagccagtccaagttccaaaactgaagagcttagagtccaacgtttgagggcaggaagtatctagcatgggagaagatgtaggctggaaggctaggtcagtctctcttttcacatttttctgcctgctttattctagccgcactagcagctgattagaatgtgcccacccaaawtaagggtgggtctgcctttcccagcccactgactcaaatgttaatctttggtaacaccctcacagacacacgcacaatcmgtactttgtatctttcaatccagtcaagttgacactcagtattaaccatcccaagtccaccccttgtcaacttgaacccatacacatctcctgagatcatacataatcttaaaataaagacaataataaggtcaaaattacgcctaacataatacaactatcctttgtacaaccagaaacacaccaatcctcagcccaaatgctgctacataaagttaacaatacttaaatgctgatatgaagtcaataaatcttatgtcacatgatgaaggaaaaaggaaataaaatgaagaaactttcttaatgcaagtgtatacatacacaaacatgtttttaacaaaagaaggaggaaatactcatgataattacagtcctcatttctgtaactggtcacgtggtcatggctggtattgatgactacttcctctactgatcattttcctttccccaatgtacagttaccgtggtaaaaggccagaggtctccttggggaaggatgggagaaagattcactgcataaattgtcagtaatgcggtaggcttcttcctcaaggggaccyggcctcccgttcattcaaggagttctgggtctgtaaactggctcaagtctgaaaattgattgaggggctttgattctctgtttttataattcaaattagtcttttgtccatttgacctagaagttttctgcttatataaattaagtaggtatgcagtaggcttcctatcaatttcacttttaggaatgctgtgattaattagccaatgccagagctctacagaagtcagactattctgattgctgctctgcccttgctgtccattacggtagctatgcctactttgcrtttgatggttgagtgccatcacttgacccctgccatcttgggatgcagttattcccattgtatttaaattttgtagttgaatgactgtggttcccatggttagatctgttataactttattactatgattatgatgtttacttgaatatgtaaagtatataatagcattaatagctaacatttaagtacagtttgcaaaatatgtgaaaatacattgtcttttttggtcctcataccaaccctaagaaatagtttgaaggagtcatattatttctgttttatagttgaggcttggacagtttcttgtttaaagtgacatggtattagagacaaaacttaaaacccgtgaatctgattctaaatcttgtgttttctgcactttgttggatctggtgcctgggcatgaagagagccattcccaggtactccatgggatgtaccacaaggtgattcagggattcaggccacctccatttggtggcccccctcacgcctaggccctcagaatcttttcatttagtaagtgcatgagaaagatgggattgtagaactctcttttaagcatcatttccttcatttttctgtattcttcctgtggtgcaaactatttaaagttttgtgagccacagtgctcagccatagctgtatcccctttgcatctttgtatgtgttttctttctctctactcgatgcccttttcctcctccttcacctggtgaatttctgctcatccctcagcaacatcttttctggggagccttctgccacctttttttttttttttttttctttgagatggaatcttgctctgttgcccaggctggagtgcagtggcatgatctcggctcactgcaacctccgcctcccgggttcaagtgattctcctgcctcagcctcccaagtagctgggactacaggcgtgtgccaccatgcctggctaattttttgtatttttagtagagttggggttttcactgtgttagccaggatggtctctatctcctgacctcgtgatcaacctgcctcgacctcccagagtgctaggattacaggcatgagccaccacrcctggcyctctatcacctctcttattcctcctcttctctcagtggtccctttccttttcctctgtgcccttgtgggacctagcaggttatttcctgagtatttgttctccctcataaagaagatgctagggaccattttttgattggctttgcataactagaacttgaatgatttttagcacacactagattctcagtaaatatttggtgatttttatttggtaatgtgattttttkatggaaattaaggtcatatagttctctgtcagaaccaggatatcaagaacagggttgttaggaattcacacagttcatcgttcaggttttgtgctcctgtgtacctttggaccattgccccctaaaatagattttcatccaatgtttcttcttggagttgcttttgatatccaaatagacaaattacaaatatgcacttccaaatgtattttgtggtaaagttatgtaaagaggactagtttttatttaggtaattgtaaagatgaggctgaagcagataaagaaggtcttttgttttgcaatctttattgctttatgttagctggcaggctgcctgtgtttgattaaaaatgatagtctgtaaactccttaagttagaccattaatttcccatgacagcacacgaagcttctcctctcctcctctccccaaacagcatacatatcagaggagcctcctatgtgagacatttgtttaacgttgcctgtcagaaaaggtgctacaacaagtcagtcaggtttggagtttgcaaacatacttccaccttactgaacatcacaaaggctgtcaaaaatttcatgtccttatattttttcttctttccagaagaaaaaccattacagatgtaaatgttagagaaattttgtcatacactttggagcttctscaagaagtatttttcatagcttggaaaagaggaaggaggcctctgctgacacatttgcaatctttccagtagtttgtgtgaactttatagtttactaccctacaagaggctagatattttttcttctaaatactacttatatctcattttctttttttttcttgctttctctgaaaatgaaagtgtaagctttttcaaatggccttgatatttctaaaatttctgtttatttttcctyttactttcttctcagtcttctagatgctttccaccaaacccacttctgggaattatccacatgtgtacttacttgggagtttgatgaaatatatgtatgtgtggtatgcatatttctgatattatyttatttgatggatgttgaataactactaagagagaaaccagttgctcttcaaaatataattagcaacaccaggcctggagaagtttacatttggttgtgacaaagttagtagtatgccctctgcaaagaagagaaggggaagatggatgcatttctaatgcaatcaggaaacccctctataatttaaatatattagcatatcctaagaaacccaggtatttgaatgttcctaagacagctcgaagcctttcctaaacaagcatgattaaattacttggagcacattgaaacagcacacatggcccttaatggatcagcattatcaatatgcattttcacggccaactccaggaaagccatcactaaagccataaggagtcaaattaccgatgcagtcctaatgattttgcttgcattgctcacatccagtttgccactaaatgtttgacggcacgcaaacactgaatttcgcaaacattagtgtcatttcctacttgtccctagaaatagtaatgagcatacatcttgaatcctcttattttggatyatatacaagaaagtaaaagttttcaaatattctgaagtctgggcatgttaggataatatgacatggaactaattatgtaagggtacattctgggtcatttgaaatttgcgtatgtattgcaaaggtcacaatcmactcaaataaataataataagagctaaaatgattgagccctagtgatgagctcagctatgttatcaacactttgcatgtagtatctaatttagtattcctagcaactctgtgtggtaggaaatagtatcacccccgttttatagctaaggaacctgaggcatggagagatgaagtagcttgacaaagaccaggctattgtaaatgggtggctaggatcaaacctagacagaaggaccctagagccccaactcttacctccaactctatgcctcaggtgtgtgcctccatttaaaacccttaccagaggaggctcaaaggctcgaggactcttccatagtggctctcattaggctgtttgactctgataatccagtcaaacagtttatctacagtcaaacagagagtagataatccactctgataatccacagtcaaacagataatccagtttgactctggattatcaaacagcctaattagagccatcatggaagatttctggttcataaacagttctcctgttaggttaaaatacgtgatttttctgttaaaaaaatcagccctgcattccagatagttcccaggccaggtcaagatgagctcctcagaacactttgttatgttggtccagcccagtcactatgcccttctattagttttgcttctaaaagataagaatctagaaatagttgggccaatttagaagaaaacattatgtatttaatgggctaatataggtctaattactcgcataacttaaggacttttattaaatacatttacccaaggtaaattttcaagcccatttaaaatataatttaatttatttaaaagaaaattgatctgcacagattagggttgcctctattgccaaagaggagcacttaaatatttttagaagtgaacattgtgattcccctgttagcataggtcttggtctgaagtgaaaagaaaacttttagcaacctcacatgctgcctacaggactgtctcctttataaacattctctgttggcactgtcttctggagagcatacacttccctacatttcgtggcattacattatttctcaaatgacttctgcctttgtagaatcatcatcttttttccatgagatatgtgcaatataatattgttctcaaatattttagtcttcatgacactattgtgaattggctttaaacacatatatcccccaatgtacgatatattccttagtccttattttatagtaggatgatatagtgcgtgccataaaaggggaggaagacaattctgacttaaaagactgtttgttagtgccgcctttgaaccttagtcttacatgaggaggagtagatacatttatatatttatttggaaaaggtcgaataaaggatttgcaatttgattcagaaacgtcattaatttttaaaatttatttacttgcttatccttttctgaaaagactgtgaaacagttgcctgaatatttcgtttgaggggcagttaaaaacagaagttgtggaaaaacaatgtcggcaacaatttatgaaaggaaagcattggacatatttaatttttcttacccatttctcttgaaatacctgtgctttcccatttagtgcctttaatatcacaaagagagatgaaagggattaattttgtcgatggtggattgcactgaagcttgagtagacttttttggtagttttacaagcctcagtataccactcatacagggaaaagtcaccttggcttttaaatttagttgagcattttcttgagctattattttaaaataatagtgccccctcctcttttaaaaattactggcattgcaaacccttttttataatttcttcccaatgtttgcaaaatcccccttaggatacttatggttctatggaattcctcttctccagatattgacagaatcattaaacatgcctgaagcttcattattacttttccagcaccactttctttgctctttatcattgcatttagttatgtttcatctagttttcaatacacatgatagggttcatagcccagccaaatggaatgaatttgatagctaagcatttcacaggctggctctgtaacatattctgccagaccctactgtgtgtgaagcattactactttttcttttttttttttttttttaaccagtaaagattatttataactttgatttctttcatgctcatttgtgttcctgaagaagggatggaatggtgtaccccatcagagtgtttctcttggctttcctgtatgtaaacctcactaatactttcagtcaccaccttctgtgtcattccttttaagcaaaaggagaagaagtggaattgggttcaaggccatgctttgcttttcacaagagagtgctctcagaagcgctggtgtagttccaacaccttatttctactgctgcctgatagtggcttgaagtggttatttagagggagagggtggcttggtaggaatgtacttcattcagtatttttgttgatgctgtyattggaatgaacctcagtgaatgattttaagagcatagttcttagaagttatgatgataaatgactgaatgagaacctatttaatattatgtcactactttggggaaaaataattttagctgagtatttcaggagtaagagaaagtttatattcctaagatttagttattttctaggtttttatcctttyataaatatacaaaactactcaaaacagacttggttaatactctgaaccagcttggaatacrttcttttgtttgatcatttttcctctatttttcagtttggtaatttaattttacggtcatatgtatgtaccctggtctggagagttctctcacatggcatgattagcaattgtgtgtgaaatgattatgtggcaacattactagtgaattacagctagtctaaatactktgtgttttcacttgagaacattggctctggaatgtatatctggcaccgagaaggaaaaaggaaaaaaggcttgacgataaaatgcagccagagtgtaaattgtgaaatggagctctaggctcaattgatcctmcactgctagcaacttgagattgtgcatttcckttctagaatgaaaattatgcccttttaagaatacttagtcaatttttaatcttcaaattggtgggtttttttaaataaaaaaagccagaagtttacatggtgtgtgtttatgtctgtatattattatacaaaggatctaaattataagccctaattcatgccacttcaaactaatggagtagctgtttcaaggtccctaactatagtagttactccttggaatgaggaagtgaatcttatattaagactttacactaataatcctggccgacttcgtattgaagcccaaatctggaggagtgrtctcatcataagatgtaatcagcaacctaccctgctggatattcactgtttggatactaactgtacaataactgcaatggaagaaatacaaagcagaagtaaagccaggagacatattcctattttctaggttatttatcccataatagagagaagctgttcatttaggattataaataaagctttcttagtacatactgagattggtcagttttttttttttttttttttttttttggaatgggcatttattgtgtgtcctcaaagaaagaaagcaggagggagtttccttggtgatttaattattatgattgtgcaagtttctttgaatatgttcaaagtactccccatatgagaaggaagaaaagtcatacaccacatatcccccagtttctgtcgaaataagacctcagtgttctgtaataaaacgtccctttctactcactcccagcatttgatgtaaatgattgacagcatgtgtagcgccttctgttctttagggtctaggtcaaggaagacatcatagctaagaaaataaaaactcagaactgaagcaggaacttttcattcaaacttgaataaatctaaaggaaaaggatgttatatcttcaaaaaattaaaaaccaaaacaaaataagaaaaaaaacacaacacctatagtatccttagcactacagattctgtatttgttttgaattgaacattttctgaaaaacatcatgattcattagtatgaaaaattatcacattatcataagaaaaggattgttgactataatggaaataggctttggatcacttatgatacggataagtgcttagcctcatagcattaaaccaggattccaagatacagattgcttgtttattgcataggaagatttaaaaaattactttgaggacttttatctgatattagagttgcccagaaggaccacaccttgtaactcaaactgtattttttaaatatattttttgagwtggagtcttgctctgtcgcccaagctagagtgcagtggcatgatctcgactcactgcaacctctgcctcccaggttcaagggattctcacrcctcagcctcccaaataactgggattacaggcatgcacgaccacacctggctaatttttgtatttttagtagagatggggttttaccatgttggccaggctggtcttgctgacctcaggtgatctgcctgcctcagcctcccaaagtgctgggattacaggtgtgagccaccacgccctgccgtaactcaaactctagaaggcaggtgcgacttgatagattgattttcattattggcttagaaataaacgggaaacctggttgattttcttttccaagtaattcggctgtgatgtcgatggtttataactgcctttctccccgtgacactgacagtaaatattttccatgtagatgaaaacctaccagtgtaagtattaatacttataatagaagaatgcacatttaaaaagatttacatgtgaaaaaatatgaattgttattactttcacatgcagcctagacatatagtatctttgaatgaatgtaagtgggagttggaggagagattttaatttgaaagygaaatactggtaaaatacagtttgttgttgttattgttcttaaagaaatataagctatttaattgtctttagcataatgtagagattatagtgctttatttactaaacacagcaatattttttttttwaaaaaaaacaaccaaacctcagttccataaaagccacttagcagagggaaggagtaaagagtggagtttcccccttgcccagtggcaaagggaagccatataaagaagaaagacaaagacagaccagggtacaaagaggagtagtggggaaggggcaagagggagtcctggttcaagaaggagacttagagaaaaatggagattgcagggtggctgggaagagagaagcagccacaggtcaaaggccttaggtggcccccttggcctttccgcctccgagcaagcagctgtttttgctgttttaatgaatttcaactgtttctacattccaaactctcatcatcatcatcagttttacttacaaatagagaaatgaaaatagctttaatgcttttgtggcaatatcctaaaagtttacagaccacgtgctatrttaaagtagaccccttttggacttaaaatatcagcctgctttttcttgtttgaaagagtaaaaatctttaggacataggaattgtaggaatttaaaactatcagtgacctattttggcaatgcttacaattttttaaattaggttaactcctaggcagagaacaacattggtaaatagtaactgagattggggccttgaagaattttgaaacctgaggttatatgtttgcatctgtaatagaacagttgtatgtaatgtttttctacatattacatggtgggcctgggggtgtcttcagagaggaagaagatcattattaatattaatatgttatattagtaagtagatgctatattttcagattctctattactttgaattggtttgtaatccaaaaccataacttagctttcactggctttttcgccctaaagaccaattgccatgataaaatgctctcaacatatctacctataacagttgagaatactcactgtactaagatgcccctttacttgtaaaactgtgtatcaagagtaatttgttaaagtgtacaggacctctctttactatttttgcactattttgtgtttgcacacaaatgcagcagtacatttatctctcagaaatttcarttctctctggcargttgatagggtaaataccctctctaatctttttttctctgggtcttcagctctgcaaatatcccctcattccttgtaaactgtccaaagctcagcaaatacctttccctatatagctgagtattctttcccatgttgctccattttcctcccttttgacagataagaaaaggtaagcmtgactttatgaacctttttctgagttgtcactctctaaacaactttcctatttctgaactgcccagcagaatttggagtgagcaaattagagatattgagaatggtgtactctctgtccacagctaccttttatgagtacgagaacaggaaaagggcaagagagtgcccagggcagcagagaattcagggctagagaaattctgtttctgttggccaaggtgaataggacacaagaaagtctaactacaattaagaaacctagtcgggaaaggtagggatagtcatggaagaagtgagtttcctctagaaatttttccccctttgggactcataaaatagggtttctaatagatggagttttgcctgaataagaaatcgagcagtgcactgggtggtctctgtcattacagcaccggttctatgcatgtgtgaataagggcttatccaaatcaatcctgcatgaaagaatataccttagtaggaatttaaaggaggaccttaaattcattagtattccgagaactgtgagtgaaactgtttagccctgaaagcagcaatacagctgaggttcaggttttagagtcaaactaatctaagttccattcttgttttagtcactgaacttccctaagcctcagttccttcatctgtaaaatgggaatgatattattaagttttatgggattattaggagaagatgagccgttatacctaaattaattagaattgtacttgaaacacaagtgttgttaaatgatattggtacaggtggtggttgtagaaaccgaaaaatggatggttaaatggattaacacttttagaggatctgaggggccttagcatttgggagtgttggttatggatagagcaaactgaagggtatggttgtattatctgctccttccctcttatctcagtactgggcgcagcagttctctttctttcttttccctattgctcaggcgtcattcataataaaatatagtcacacatcacttaaccatggggatgtgttctgagaaatgcgccattaggtgatttcatcatyatgcaaacactagatgttataacctactacacgcytaggctgtatggtatagcccattgctcctaggctacaaacctcaacagcaggttacygttctgaacattataggcagttgcaacacaatggtaagtacttgtgtgtttaaacatctaaatatagaaaaggcagagcaaaaataccatacaaaatgtaaaaaataatgcagctgtataggtcctttaccctatgaatgttgcttgcaggactaaagttgctctgggtgagtcagtgagtggtacgtgaatgtgaaggtctaggatattactgaacagtattgtaactttgtaaacactgtacacttgagttacactaaatttatttaaaaatatttttctttcttcaataatacattaaccttagcttactgtaattttttcaactttatttaaaataaataaactttattttaaaaattttgtttatagttgacatattgtacacattggggtacagtgtgatgtttcaatacatgtatatattttataatgattaaattagggtagttagcatatctatcaccccaaacctttgtcatttctatgtggtggttactgttgtcttttctaagctatattgaaatataccatacactgttattagctatagttgccctgctgtataatagaacacctgaacatattcctcttwactttctgattctttcataatgacatttagcttaaaacacaaacacattgtacrgtggtacaaaaatattttcttttttatatccttatagaygtttttctgttttggaaatttttwatttttttactttttaaaatttttgttaaaaactaagatacaaacccacacattagcgtaggcttacacagggtcagtgtcatcaatatcactatcttccacctccacatcttgtcccaccagaaggtcttcaggggcagtaacacacatggagctgccatctcctaggataacaatactttcttctggaatacctgttgaaggacctgcctgaggcagctttactgttaacttttttgtttattttaataaggaggaatacactctcaaataatgataaaagccgagtatggtaaatacgtaaaccagtgacattgtygtttgttattcgtatctggtattatcaactttacataattgtatatactgtacttctgtaagactggcagtacagtaggtttgttgacagcagcatcagcacaatacatgagtaatgcattgtgctgtgaccttagcatggctatgatatcactaggagataggagtttctcagttccattggaatcgtatyggaccaccatggtatatataagcaatccatccttgaccgaaacgtcatcctgtggtgcgtgactgtaataggatatattgcctcaccacagtatttgtagtatagaaggacttggagaaagatcacttacacttaaattattaaggtttaaatttgaagctttagtggcaaagatatcagttggcaagggggaattcataaaacacatagaatatactgctttcttttcagcctgtgaaaataaattaatgagtttgaatattggaagaaatagaaaatgaatttgatcttataaagcatccacagtatgtatgtatgtatatctgtgtgtgtgtrtatatatataactggaacagtgagaatcactatttttgaattctgaaaatattaagaaggtaataaccccctcaaatacagaaaaagcgctagtaaaatggtgagtgatccyattaaggtaataatgcaaatgagacaacagccaactactaatgaaatgacccatcacagacacatatgtgttaaattaattgtgaagacttcagtgaatccttacagaacaaaaacacaagtgcctacctattttaaattgtttccatcttaagcagaaaatatttccagaaatagtagaattgcagttatttgtactaaatgaatcaggtctgacttactacgtatgatttgtgccagtacactaacataaatttgaatgttgtgaaatgatatagtatagctttgtagtgatttgtgtgaagttgtatatacttgtctgaactttacttttgatggtttaggaattaagttatgattttgggacttgaaatgagagtaattcagaagagcatttcaaataacaartggcacttaggggaacaaaagctcatttatctaatttaacatatgctrtgaagatgtggagacagccaaggagaatatcagaagtggcacatattatctcttgtctttttgttcttagtctggaaaggkaaaatggcatttcctctaggaattgaggcatgactaagaaaaacaagttttgctaaatgcatggtgacagttgctggtcccttcgggtttcrtattaaattaatgatgtgaatgaagttcagcaaatgagaagcatggacatcagtttctttccattcctagttaatattcaacccaggaagggatggtcattcacagctactattaagaaagctttagagttttgttactgagcatagagaaataaaattttaaatatcaaaattttacttccgagcattttttttagcatggatgttaaacaccatcaacagttctgtattagttctatcccaactcccttgatagatacaattaaattttactgatgttggtattttactaaagagggtcattatacttttagtataaactgtaattctaagcagaaatgatcttcagtttcccaaggacagcattttgtaagtggtgtgcrtgctttttgagtttcttctcatctaaccagagttgtactgttatgttagaaatcagtgtggatcctaccttggttgagtktgggctcagcattgggagataattgagttggttacgaaggctgtgtggagaaacttggaactgggagatacaggttctctgtgcatcttgtaatggtatgcatggtttttgctctttgacactttatactcaacgcttgaaataaatcttatagaattggctctgccatgaacctactgtgggtccttggactttgtcaaggcttagtttgcttgcttatttgttcattggtttattcattgattcattcagcaatcaattactgaacacccattgtgtggttggctctgtactagccaataggaataaaatagacatgagtcattccaaccctcatggtgctcacaggttagtgcgggatataggcaatcttacagaaagcagttaggtaccaaaaggatgggagagtatagtagagtaatctaactctacctttagggcagggaaatcctcctaaaataggagatgtctaaactgagaccctagaggatgactaatattcagttagggatatggagaagaccttttctgtcagaaagtacagcatgtgccaaggcggtaagaaaagagagagagcgagagagatcccwatacatccrtgaggactgtttgagtctaagatctaccagattatgccagtatgaacttgtttctccattagctcttgcactttctcacctatggtttgaaaatgcaaccaggtgattataggccacacgacccttctgccagtatgttttagggcctttaaggatcccagcaggttaaaatctacttatctacttacatctgccctgtgcccaaataaggaggtccacatctgttactgtgtctgtccctgccgaatatcctctgtatggccaggctgctatggggcwcatgttgcccatgccccaaaagtacatgattgcacctagcctgtgggctgctgtctcttcacagcctgtgctaactgaaatcatgagattggctatgtctttgggstaaygctgcagtttacagtcacctcttctacagatttattatgatagtgaagtaagttgtaagcacaacggaaaattcygacaggaaaggatgtgtggggtggatgtgtgatcaactgaagaggtttcctaggaaggtagaaatcaaatgagatcttgagtaaaggtaacagaaaggaatactgttgcaataaggagtaaagatgtggtgtttaataatcctgtttaatctcaatgcatagtttatggagagactagtgtacctggaacagtggctgcatgttgatattgttrcaaatgatattgcataggaaagaaatgatcttttggtttagtttcaggtaaaacaaaaacaaaagaagtaaccttagccaatcattgatttggtgaagacttcagagaagcttttttttttttttttttttttttttttttgkggktcatataaatgggaaaaggggctggtttctccaagacagaagtagctgtggtatctcctctcaggtaaaatgccctcaaagcattagtcattgaccatccataggtaatagagacatagactgtgatgtgagggcagtttagttccatgatttcttggctgtatgatatagggttggttgtttaatctatcttcatctttctaatgkggatagtagtagtggyagcaccaccagcagctatttcatagagttgytgaagattatttaagtatccgataagtggtaactatggtgacagttgtctgcctgtgtttgctaatgatgaacgtattcattccctcactcattgattcactgagcaaatatatactaaggatgctctaagggccttgtcccatgcctgcgttctggggaaaaattactggttttatattgttatttgcatttcttccctttttttggcaaaagcaaatgttttcttattttggtttcatttatacttttgcagtgtttgtcaaagtgtgttctaaaaactgcctgcatcaaaatcagcaggggttcttattgtaagtgtggattcctggtccttacgttggacctactgaatcagaacctctgggaagggcatggagaatcagcattttgagcaggctcttaggtgatttctatacatattgaagtttacaacctgttagggtcacattgtctccccgatttcccatttggtgctacactaaggaaaggctaacagtcactttcctcttctttccattacatayacagatyttctacaactgtgaatcctgacaaaccctctttgctttactttgggtggagaaactgagcaatttgcttcttaagcaggcttcatttacgtggataattcccagagatcagtaagatatgactgaactcacttcctttctagttaagtcttctcttactagcatccatttctctgaaaccagaagcagaggctgacaccatcagccaccaacctgcagtgtcatggagttaccaataccctttccctttccccatcctggggtttgttattgccctggagcagtacatttagaattcacaacctgaatattaataacaagctaaaaacggactagaacttctatgtgttttcattaattttttttttttttgcagccttgaattgattgcttccctttccccaagcataccttctgagactgatttagtgtggcttgatcaatagactgcagaatgattaatttgtttccactcatttctttactgagtattttccaagcaaaggtgagttaggaaaccgtgaactagagtaaggggaattgttgaggcataaatagctgtctgcttgtgtttgctgcaggagttttaaaacagaataagcaggagaaaagaatggtggcgaaggtgcctacccstctaaggtattacttcggccacattgtgtggaagacttcttgataacaggagtatagcacaacgtgtcttgtttttgttttgggctgatctctataagccatggaaaagaatttattccatactgaattgtcttagtggaactctgcaaagtttaaaagcatccagtcagaagaatattaaacctttgagtgaaatttacagctttccttatctttttaaaaaaattattcttcacttttttgcctcctattacttgttagggwgacccaatggtagttttattccttggggatacatagtaaatacttcattaaagtygagtacagaatttgatgaaaagtgtggatgtgtgggatgtactgccgccttcagaagtccacacactgcctggagggagagaactgctgtttattcactgattaagcayttgctgtgtaccaactacttttcatgtcttatcttaattctcataacagtcatttgatattttaaaaaaccccagaaatctgagaaagagataaagtggtttgctcaaggttatagaacagactaccatgtgttgtatttcagattttaattcatgtttgtctgattttaagttttgttcgcttgccagggtaccccacaaaaatgccaggcagggcattttcatgatgcacttgagatacctgaaatgacagggtagcatcacacctgagaggggtaaaggatgggaacctaccttccatggccgctgcttggcagtctcttgctgcatgctagcagagccactgtwtatgtgccgaggctctgagaattaactgcttaaagaactgccttctggagggagaagagcacaagatcacaattaaccatatacacatcttactgtgygaggtcattgagcaatacaggagggattttatacattttagcaactatcttcaaaacctgagctatagttgtattctgcccccttcctctgggcaaaagtgtaaaagtttgctgctacaaagaatacagaaaactcagaaagaaatgctaacatacacatttagctggccctatggatatatcatattaactgcttatcgttaggggctgtatatttgtaaaataaaagaattttgggagttccatctctcggctttggagcccccctccttttgtctctgtatggaggagcttcgtcyttctgcctttttctttacctgttaaattctccactccttaaaactaaaaaaaaaaaaaaaamacaaamaaacaagaattttgatcacagtcagactctgtattttaaaatacattgtaactagtgagctgggtgtccagcaggagtttgatatggcaccatgctttataggactatattggtagtcctgtaaagcatatatagtcctataaagtatggtatcacatcaaactccttagtacttagagagtagtaagaaattaaacgtgaaattaagaaaggctggagctaggaatttgtatttgggagccataataatagccagcatttttaatatgcttaatatgtgccaatctctgkgttgagccttttatgtggatgagctcattaaatcttcacaaaaactccacgaaggtagtattaaaacccacattttacagatgaggaggctggcgcagaaaaggtttttgtaatttttctcggttcacacaactgcaattgttagggcgagattcaaaggcaaacatttgtgatgtttaaatctgaacttttcattcctgtggtagtctgcatagaggtgattttggaaccttaaatatagttgaaaacagggctccatttaatcttagaacatacccgtattaagggtgagagaagtgttgaggtagcacatgatgagatagcaaaggacacagaaagaaagccagtttcgggaaaccatgcaagggtattatttagagaagaagagagttattaaaaactacaaagaactcaaggagaatgggagggaaattatcagatatagagattatgtgtctttagggactttgacaagaacagttttgagtagagcatttagtcatatctcaatatgccattcattttgaagctttggattagtttattccatgattatcctcacctatcacgtatggctagtttaagagcgttatttaatctagrgtaacakttctgaatgttttttaacaacaacaacaacaacaaaatagcgcatgtgacacttcctttacttctttgtcccattcctcctcttttctaaaataaayaaatatgtgtataaamcaagaaaaaaaaagtgtgggatagtatctgctttactgagaacagcagaagtagctatttttctctattttgcctaggaagtattttgctaagaagcagtagrtagaagatggcagtaggtaacggtaaatgtgttagtggactctcttgaaagtggaatttcctatactttttactaaggtactcaaaacatctcacagacctgcttcgtttttataagtatgtattgtgcaagtgatatggctgttaattttctttgttttcccttttgcagtggagaaagtgaaacagaaaggagtggtgtgggacaaatgcaacccccagttttccttttctgtgcagtgtctcctagtctgcatttttcctgctgatcagaacaaagtgtcaccaccattgtgaccagctattctgacttgttgctaaatccatctatagtatttgatgtggctcactggtatatcctctttgaaagactcccttcacttagctgccaggatacgcgctcttctaatttttctcctgcctcattgtctcctcccaactctgtcccctccatctccctgacctcttactagcctgtagtacccaggggttagtcattggccaccttttcttctttcatgtacactcacttccctggtaatctgatccattcctaaggcttttaataccgtctcaagctgatcacttccaaatttatatctccagcctggaccacttcactgaaccccagccttaaatgccttttgcttaacatgtccacttccttgttatattggaacctcaaatttaaaatatccaaaactgagataccaatattccacactctatgttcaacaccttctttcccttagtctttgcatttcaatkwgtgggatgccatccttccagttgcccagaccagaatcccaggagtatcccttttctcacacaccttagaagcaacccatcagcatgtcctgttggcttttcaraaaatatccagaatctaaccattgctcaccaccttcataactactgccctggtctaagctgtcaacatctcttgcctggattaggcttcctaatggtcttatactttatctcttgctcctctcccttttaaccataatgatgcttttaaaatgtaagtcacattacaagaacattttggcacagaactttttaacagcaattcatgcagagtaaaagccagaattattttcagtgttttacagggccctaaataatctgcccctactggttgatgctgaatgcattttctacaatcttctctgtggatcacacccctccagccacactggcctctcagctattccttgaaccttaaacatttgcactacttttcttccaccaaacgtccaagaaacttgctcccttaatacctttacggcttttctcaaacgttaccttcctagtgaagcctacctaggccatcctgttgaaaactgtgakatcttcttccagcatgccctactttttaatttttttctgttgcccttattaccatgcacatattttatctgttatctggaaatagaatataagttccaaatgggcagggatttttgtctgttttgttcactgtagttttcgtaccacttagaatggttcctgacatacagtaggccctcaattaatgtttgttgaatgaatgaatgaagtttcagagcctaaaataragtggttgagtcagggtatgtcagtgtatgttggtctgcgagtacgatttttctactgatctccaaactacagtctcaagacaacagttttccacctctgaacagaggtgcctctgaatacccagatctttwtgtctgtgaacaagcactgcctattagagccaaacaagagaaacacatattaccatctccaattctttagaatccttttggcccagaatgacttcaaaatgctaacccataaaggcaaacaaatccagagacctttgtagtttcccttagcctctgctgcattagctgaagataaatctatgcagaattcacttaagggaacagacaactacattaagctgtgtaatgatgaacattaatggcctgtgacaaaatgggtctctgtaggctgagcaaccatgcaaggtggggatttttccctgtttttggtaaggtaatgaagaaggaaaaaaaaartctcatccaaagatgcaaagaaacaatctgctggcccaggtcattttcatggtatctttttgtttctcctttctttgttttgtaagtacatgcattttggctgaaaaagatacaggcaccattttacagtggtgggggaatctctactttgttaaagaaaaatgcaatgctctttatttccaacctggtatagttcattcattccttttcctgtggtattcacatgtcttgcaaattgttatgttgaattttttagttccttgttatttttacttgtagacacttacaccatggtcacaggaatctatactgatttcttccactttccatgcatttgtttccattattaatttaagtgagaagcatgtgtgtcattccccttcccatttgacttttacatggttaactggtgatctcaagttgatcagttaacttttcctattgtgcatgattgttgtggggatcaaatgtgtacaaatacgcttcataaattgctgtaaacatttaagttaatggtgcttatgtggatattagaccagttgatttgtagacttgaatcattctaagacttctgaaagtaatccttctggcaaattctataaattaaggtaattgggatatatatacatatatacataaaatttggggtttctacaagttgaccatgaactattgaatgatctgaagtggcctaggatttttttataatctattcagaatgtcactgtgacacacatactatattttcagtatttgcttctcagatattcagaacactttttaccctacagcagaattatttgacaacacatttccttcctgccctctgaatctccctggatgatctacaaaaatatagcatctccatttgtgacaatataaaaccctggtatgactcttttctataaattcagttttattgccttcttccaaagtaatttctgttaatccagccagaaccttcatttttgttttgtcattttcaagctagattctgaagtaacagaactgactacaattttagcctaagaacaaaagagtttcaaggcctatttcaagaccctggttttgctacctcatctactaaatttatacattctaggaatccatttactttttaaaacatttcttttcttattttcagtaccaatttgtttccttcagctttcccacatgcatgacttttatagcatggcataaagtagagtgctctgccatattgatttaatggtatgtttcaataaatttcccctgttacagttcttgctccataccaggcatccaagagggaaatagacggatgtgctggttaactaattttaaaagcgaaaaaattccattttctccatcctttaatgtcatagctgtcctgccaatgacctgatactgagatatattaggttccyctgacatatgttacaggaagtagtgacctgaccttttaaaaattttattaacatttataaatttgttttagtgtattatgttggaagcagtgatttttctccagaatggattggggtgactggtgtacagattgatagccatgtcatatattaaggtggtggacattttgtagagtccaccatctctatactcacaatatattgtagagtatagagatgctgtctttttttcccctccctcttctctcctgcctttaagggttatgctaatggggatggaaacattcaaaatcttactttaatgcagtttataagcaactagaaccattactgtcakctttttggtagctggttggctttgactattgcttgataaaacattgagacatggacattcatccatttattcactcaacctttgctcagtgcttaatgtattccagacactatgccagtcactaggcatgtaagagtgattgccacaatacctgcttccaagtaatttatagactgatggattaggacccagtagtatacaatcaagatcctaatcaaagattttttccttcttcaactctgttcaaagcccagataagtatcatctctctgtctctttttttaaatttttgtttatttagagggtgcaagtacagattcttacatgcatatattgcatagtggtgaagtctggacttttccagatgggtgtcttctttttccctcctttccctgtttctctttccttttcttccattctctcttagcacttcctaggaaataatttatatatatattttgtaggcacaaatacttgtcatacattaagggaaatctttattgatgtaaagcattggaacttagctatatccagttttattgccttagcaattctcttctttcctccataccctaagtaatcgaggagagtgtggctttagacaaaggacacctctcctgtgacagaaaacacaggagccaggagagttggcatgctggctttctaacctgcttgctgcaagagcagttgtgagcaatgatgatgactgacactcacatccatcatttgccttcttccaaatgcttctgaaactgaaatgaagcttcccaacacctcagtgagtatagatggctgttttattttatagtaagtatttgtttattttctagacagggaaattgagggactgagaatgtaagtggatagataaataagttatggacactgctgggaagcattagctaatgtttattgagcccgtgtggagtgtaatactttcctaagccctgtgcagtgyattttgtttctagttttccactttgtacttgagggaagtattccatggatcttcttgttttgaatttactcttttgtcttcatagaaggttattgttttgttgttgcacatttcacaattacatttgcattttcttcaaacattttgttttttatctttgctatgcaagacttaataacaggaattttcgctgtatttccaggctcactcactcagttttggaactttaaattgttccaacagtcactcagttgttggaactccaacaactagtgcatttggtaagaactcttacataaatagcctttacaatcaaatagacaaaaaatagactgtgcaaccaaaaactttttgctgttttcccacaaaattatctgaatttgtttgacttgagatttttstttgtaattttctcatctgctgcctatcctaagatttaggatgtttttaccttaatagccatatcatgttttaggccttagtgggcctctctccttcatgctctacagacaaatataaagtgactcagtgttaaaatctgatacactacagaagcactgtatggtttatattcggaatggttttttatgtcaaaggaagtgcaatgaatataggcaaggaattaaagccattaaatgtatgaatggaaaataattttatagaaggtcttatttttctcataaatgtgttccagaaatgtaagtccaataaaaatgtatacatacagaatattcagtggtcatctttcggtcgtgttcacagtcatttgcctaatcgcctgttttctgaagcttttctataagcagggcaccccattataatggtaacaatatagtttttttcttgtaaatagattatagttcatacatctgattcacttgttagtcaattgtttggaattcagaatgcattttctcatagacatcatcttatattatcttgattggtgcaaccctttgcaacacaggtttatccataatgtatttctagtatcatactgtggctttctgaaatttaactgaagtgttaagcatgtgtcctgggaatggatttagagtttgacttgagattctaggagcacatttcttcctactgaatgctgtttgtgggatcagaagctcatgtgatgttaggacatggtcaacagaggggatgttaaagcttatttagtccaccttcctttgttttgagaatgagaacatcacctccaacattcccgagttatggttccaaggrcctgggccagaggtgcctttctggagagagccaggtggtgaggggcagcctccaggggtcactggtataagaggcaggatgtggcctgggtcagatgacagctttggggtgaggcatgggaaggggaggaggtgatgggggtctgaggataggagtgaatatgtgggtcccttttgttatgcacaatagaattgttctcccaattttttttttttttttttgcctgtcacttcatactctattctatttacttccctttctagttagtaaggcatgttgggtgaactccccttttttggcaaaaaggcatttacctttctcttccccattaccactaccagcacaccaatacagattttccccctcgctcagggaggccatgactggagggaggggtaaggagccaaatcragctgtctctggtggatgcagcctttacagtggtgagaggaggagccgcgggatgtaaggaaaaggagctcctatggcctggctggagtgtgcagtggatgaggctrcctcaatgcagggcgagatccacacatcacatggtgggggaagccattgctgaggtggggagggtaaacaatgctagctttttggccaggccagggcacctgtgtgggtgtggggaggacggttgaagagtgctcagtgcttttctttggaatcagaatttctgatttagtgacaaatcatggaaagtttagaatggaaactttttaattttagaaaccaattaaataatattcaaacacagcagtgaataaagaactatgttcgctaaatgccctgtgtttaacatgtgagaagatatgtcccttgaccctgaatcttctaaatatgtacagttttaaaagatagaaatttatagtgaaatgcatttgcgtatatttggggtaagagatggtgttcagaaagagagggaagctagatgggctgaaacatgaaataaattccttcagagtcccttccactcatgtaaagctccttgaagggcgtcaggagacaacattcctgtttctgaggaacacttacaaggactctaaggaatgttgtttcccttattatatttttatatcaaaacattttatttccacagttattttctttacctaatctggcattgtagctgtgatttggcgggggatggggtgttaggaagttcattttcttttcaaaattgaagtttttaatgaacttggtagatttcctgaaggttagttcyttcaacttttggtattacaaagtcatgattagttttaatggtgaacattaagattgcaaataactgctgtggcgagggtgtttctttgtgaatttgaagtgtctcgtttaaagattggtgcctacattgctaaggtgcataccaccctcagtagctatattaacttatctcaggttgcagagtctttggggttgtgcttgggttaaaattctagccatgcagctttgtgacagggaaagttctttaatcatttgaacttgtttcctcacttgtacgatggagcaaatacctagctcaccgtgttgttcaagtgtcaactcaaatgatattatgtgaaagattctggcatttcctagctgcctagccagtgtatggtttgtttcaatttgattccatgtgtgactgcatgctcttggcctattgctaacgagcaggcagagaaacagcagcagtacagtctggctagagggcgtctgttgagcctccaaacattgaaggctactttgcctctttgtcaggggcatgagcctccagaaactctttcctagatgcgctaattgtgtttcttcttcctcactgtgtaacatgttatactgggaatctctcctgaatgtttgtttgtgtctctatctctatattttctatgacagtatttgcctgactgaggtaatcccaactggagggctgaggtgacagatttggagaacattcttacaacatgctgttcaagcatttaccaccatgatgtaataagtgtttgtatttaacagtatttatttagttcctgttatgtatcaagtaatgaaaaaaacctgctttcatggagtggacattctaatgggaggggcagacaataagcaaatgtcaaatgcctcaggtgtgttaagtactgtgaagaaaaataaagcgggctaaggaggagtcagataggatgctgcttgccatagggtgctcagggtgcgtggtcaagcaaagacttgaatgaattcagggaacaaaccatgagatacctgggagagacgcattcctggtagaggacaacagccctgagacccgtatacctgaagacaagtgagcaaggaagggagtgtgtcgaagatgacatcagagagatgccagggcaagattatgaaaggtcatgtagatggtaataaggactttgaattttatccacagtgagatggggagctattggagagttttgactagagggctgtcataatctgctttcacctttttaaaggacagatttgggccaggcacggtggctcatgtctgtaatcacagcactttgagaggccgaggcaggtggatcacttgaggtcaggagttcaagaccagcctggccaacatggcgaaaccccatctctactaaaaaatacaaaaattagctgggcgtgtgttggtgggtgcctgtaatcccagttactcaggagactgaggcaggagaatcacttgaacgggggagtcagaggttgcagtgagccaagttcacgccactgcactccagcctgggcgatagagcaagactccatcttaaataaataaataagtaaataaataggatggatttggctgccgtatgaagaatgtgctgtaggggagtaatagtagtggcagagagcagaaagccattgtaataattaatggtaagagatggtaacagtggaggggagaagtggtcacattctggatgaagtgtgaagatttgccagtgggtttaatgtgcakgtaagaaaaagaggagtcaagcatatcgcraaggtttttcacttaagtaacagcacaatggaaatgtaatttcagaagaccataggaagactacaggaagaagctagctggagagtaagatcgtgagtttggtttgggacatgctaaatttgacatctctattagatagtcaagtgtatgtgttgagcagctagttgaagtacatgacactaaaattcgtaaatgggaattagactagcactgtccaaaagaactttctaccatgatggaaatgttttatatcttcactgttcaatataatagccactagtcatgtgtggatattgagcacttaaaatgtacctagtacaggccaggcgtggtggctcacgcctgtaatcccagcactttgggaggccaagacaggcggatcatgaggtcaggagattgagaccatcctggctaacatggtgaaaccccgtctctactaaaaatacaaaaaattagccgggcgtggtggcgggcayctgtagtcccagctactcgggaggctgaggcaggagaatggcgtgaacccgggaggtgaagcttgcagtgagccgagatcgcaccactgcactccagcctgggcgacagagtgagactccgtttaaaaaaaaaaaaaaaaaaagtacctagaacaactgagatatggattgtttatcttatttaatcttaattaacgtttaaatagtcatatgtgtgtagtggttacttattgcttggcatggaagactatggatataaacttgaaagccatcaacattccagtgttttgtaaggttgtgagactggataagtccacctgggggaagcacaggtaatgaagaaaagacatctgaggactgagacctccagtgtagaggttaggaaaatggaaagctaccagcaaagggtattccaaaagcaacagatggtgaggaaggggaagaccaaaagaaatcagtttccaggacaccaagtgaagaaagtgttttaatgagaatgatgaaatgtataaatgctgttgatctgttcatcaccttcattatagagcaagtcacgtaaggatttatctctttgaaacccagtcttaycccaggccctagcaaatagttattgctttataatcacttttaaaatgaacaatgctgaacaaattaatgggttactcgattagcctttaaaattttttttcaggaaatatgctctcttctttgaggtccaagcactgccatcttatagctgctacctgttggaaatcccagattctgttaatgactgacctcttactcatcagccacccaccatcacccctccccagttcttccagggcttattttagaggagctggattggagatagcctcagtatttcttatttcagcagttgaggttaaagagccaaacatctgcttagctctggactttctctttctcccttactttgctmttctttggttccttaaaggagtacttaaagggagttagtttctagatggggaagctagcatctgtatgtatacttggactgtggtaactggtaggaagttattgtgtatggttaaaaagtagattttaccccaaatctctggtagctagatctgattatttttccattatttttctcatcttttaattcttctggacttcaagtgttgagagttaaccttgcatctcctgtctttctcttttccccttgaatgaagttccattcattgttccggtgtatgccctgattcagagtctttcttggtctcaccacacacacccttgctttgtcttgaagtactctaacatgtctgcatttggaatttctcctgcatgtcccaacctctggttgtattctttgcacctggctctgccttaccttccattctgtatttgatatactgtttcctgtgctctctgagctattacgttagcatagaggtaaatctgaaaaacaagaagacaacacacatgcttcttttccttgccatttttaagatgttgattataggtcttgtgggaattctgttaagtatgtttttcaataattactatggcattctgttactactcatttttcttgttccttatatctgtgttgtaccagctcataatactaaacaaatattgtaattgacaaagaacatgcatcctcatkcctattgttaaagccactcacagtcctgtaggaagtgttggtacagcactgtatgaggaagagcagatgctagggttgtatggtgccctattcttaagacctactgtgactttctatagtggagttcaaggaaggcaaggaatttgtgtcactctcaaactctccagattttaaacctgccaaggaaaaaatgcagagctggagcttgccttgaatgattaaaagtcacatgaggaatggggaaagaaaatcccaaaggattgatggctagaaagtagtttatagtcaaaagctataccaaaagcaattgctcgaaaccctagaaaccacaaatggaaatgagagtggattatatatagtacaaaagacaaatacacacacattccccacccagtgggctttactataaaacaagccaattaagacaaaatgcacagtaattaggaacatcttargtggggtcagggttgctggatttttttatacattcatacacttaatttattttaaattttatcacgataattacattgttttaaggtttgaatttttgcaattcaggtatataaaaatgatagattaccaaatgagtttggtgtgtttaacctcatgattcacttatatgccaataatgtgccttgcctagaatgtttgctttctaatgtttctgtgttactccagctgcctccctttattgctgtcatattacaatgaatgttttctgcatatttatgaagagcctattagcagcatagacttgatttaaagaacttctccagtttatgaatacagttcatctcttgtgaatgaatttagcactttaatgctatttatttactccacaccataaaatgtactataataaataataggtcccttgggcctatggtaaaactcactgatcatcctctcagcaggaagatgaacacaacttgagtggagaagtaaccatcaaagttcaccatgctcactgggatgtcatttatatacctgaatctaataaagacagaattacagtgcttaacattgtgctcactactagcatctgaattcagtgagactcagggagggaaaagactcagtcacattagcaacatcttagaaggtgatacaaagtctaaattggcaattcaaataagaaagtgttctttaaaagcatataatgcttaatttcttatgctaaatacacagtaagttagtgttttccattttcttcacccatggaaaacccttagttttggagggttgtgtttttggtgggggatggtagggggcaggggattgcttcaaaatctcttctctgtcaattccatttggagttttcaaggcgaccccagctgtcagctatccataaatgcaatatctacaagccagracgtctgtgtggcatttggtcagtagggccattctgttttatggttgaagtccagaaagagtcaatatatgagtgttcaaaactctttctagatgaatgtatgcctgattatattctaagattatttgggttatttttgtgttatctttgtttttatttgatatgatttgcttttgtagatatttgttcctttaaataaatggtcacaaatttgaatgcttaaaatttgaaaccaggcagtgtattatagaaacagtataggccatagttctgtatcagggaagagttgactttattctggaagatttttaggtctgatttactagttgtctacttctatgtggacaaatcattctgctttgtagattatttgatttagagcagactacatatctgatggctctgccaagatgaattagcccctcactacatctccagataacggcgtaggagtgaggaactgtataccgtatccctctaaagagaggcttcaaaaagcacaatcttgatttgggtrgttgggaattgttcctttgttggacagctttaattattaaattgagatgaaatatgccagcttatgatttttaatactaatttattcaacctcaaaattcccagtgcaccatttggttctcttctcaggcaaattgttagtttctgccttgtgtattatttatgcttgtactatgaataaaggatgtctcatctctatgtggcaatgtcgtctgcttcatgagctgacagttttgaagaggaacatgagacagtcagatctgttagtgcaactcagtcaagcaggtggtcgcaaaattcgtggcgtgagaattgcagycattcattcattcattcaaaaaatatttattgagtgcccgttatgtaccaggcactgttctagatactagatggtactcatcctctatatcttccttgtactctatgagaataaggttgttgtctgatcgccttttatcttctacttcacccgacaaagtacattacatttagaatgggcgcaaaattttattttaaacaagtagcataccaagtatgcctcttttgttttagctgcaactgctggaatgggaccgagtatgcctattttgaagagcaacatagagtagttctaatcactttatgacacccgttaaatatttcaatcacattagcctcaagtctagactgaatagcaccagttcttcttctaaatagtttggctgcccttctgtgagtcttttctagttgactcttgtctcttttcatgtgtaggaaccaggactgaagacagtaattgtgagaggatctagcatgtacaaagtggaagggagggtgttatgtttctgtgatttattactttcccaaaagatgttttatcagctrccaccctatccttttttccccaaggcattcttttctctctctaattaagtaaataaattaattaataggatatctatgtggtatctaactgtgtatacccttgagctatttattttcctatttttctggtcattttcattagttaaaagtctgttcttaagatctcttatttacagtaggagtttcttatgtatattatagaaagctattcaaaaagttatattcatttaatcaaaaaataaattattggggggtatgtagtaaactctgtgtgtgtgtgtgtgtgtgtgtgtgtgtrtrwgtgtgtgtgtgtgtgtgttgagaacaaagtgatgaatcaccaaggcttcagagttcttgcctcctttattctgacagtcattcttatttatgctgataacatctgtcttatccttacaaggtattattctgttttattagagctccctgtttcatatacatgagaaaaaacttagtggtttagtaattcttagtgtctcccttgtctctaatgttttgagttttaggaaaaaagaacagaagattcttgttaacatctttgttaccgttaagatgtattgttgtttctaggaacaaatgacaaatcccatgtctttgtcattccataagccttctaccaaatccatgggtcaaagtgccgtatgcaggtgatttactgtgcttgatttgttccatgatttcatctttagacacttccatctttgtcaaggccatgctaatctcaccacagagaatgtatactagaatttctcaaatgtcaaatatattgtgtacacttaaaaaaaagattgtcatctaagtttatcaatcataaaaataaaattccatagtttcagtttgcaattacaagcttgtgtcttaaagtttgttttgctccgatttttaatttggctttttctttctttatacatttcagcttccttctttctctagkttaatttcgcaaatatttcttaaatgttggctatgtgcaaagaattgttttaagcaccttaatagctacaaagataagtaagagcttatctctactttctcctaccccaaggccacccaaacctgytaatcaatcttaaatccttctctttctgctaaatatcattagaaggcatcactttgagggctttttttttgtattagttgtaactgagggatttttaaaatattttaattggttattattggtagatatatttgagagaccttacatcacatagtgaattaggatgtttattgaatgtcctataatgtgttcaacagtgtactgttgttaaaaagcatcattataattgtactctaaaacttgcaatttttaatgtcttcattgcctcctgcatttgttgaaatcaataataaccttttaaaaartatgaactttatgatatgtaaattatatcgcagtaaagctgctatataaaaaagaataacctaaagtatctaaattatattattgggtgttaaaacacaaatagccttctcttgttagatttaatcccacatgtaacaaatttgctgggccattttgcagcaccatagattgactgctttattccacatactacagttctaaaacatgaggaaatcttagttaactaattgaaacactcatttggataagaacttgagcatggttcaataattctcaatttcccactttgcttgtaaaacacaatgtaagtatggaattaccctcttcacagcttattgcactatgtgttcagtcacagagaaataatttaaagcagttcacttccaactgtttccctcatgctgacccctttcttaaagtaacgaatttctcaaggttatgtttattttgaaattataaatttagtcacatacctggttggtttcattctccttttgttgttttcccctttggaatttccacactgtgtcaccaagcaagctcttgattgctcccaccctctttttttttttttcttctttgttgagacaggttcttgctgtgttgcccaggctggagtacagtggtatgaacacaactccctgtatcctcaacctcctgggctcaagtgatcctcctgcctcaggctcccaggtggctgggaccacaggcgcatgcctccacacctgggtagtgttttttgttttgtttctttttgtagagctggggtcttgccatgttgcctaggctggtctcaaactcctgggctcaagcattctccccgccttgacctcccaaagtgctggaattacaggcatgagccaccacacctggccagcttccactgtctttatggctcctcgtcctgcctggttaatctcatacttctttcaattaaatactttattttattttttatttttgtgtttattctttatgcattgaaaccgatgtcataacttctgttttgttaaaatctttaaggcccatcacatatttataatttaggtccttgccttggtgtgttttcctcagtgctcccaaccatagaaaagcaggacaagtttacagytgctattcrtctaagtctgatgcttctttcccataagttgttttgggaattaagcatcttgctgaaagtgaatgtgccattttgaaaatcttagcaaattacattttcagaattttatarggcctttttttccctttcgctacctttgttccaaatcatgcttttgaaacaatctttctcccaaagcatttctattaataatacttttcagttctccctcttataactcattgtgataaattacctcctccctccatgatgttaatgttctggaggcctctgagagttctcctcatggtggaagtccactacagagctgctgagagcagagcctttagcctgatgttccaggagctcttgctactgccccatccabccgtccghccrtccatccatccatccatccatccatccatccatccatccatccatgaatgattgctgctctatcatgcctcatagctggccctggggagtggttttagctacacttgaattccaccttttcctcataaagtggtatggacatcatattaactataacactattataatcagttgacattgccagtcattatttgagacaggtgtttgttcttctagaatttgcattttctcactgcagaacactgtagaatgttaaagctaaaagattgctcataaatggccatatgtgagaacatgcagtacattaacttgctcatttgtttatgatttaattatgagagtaagtggaaaagaaggtttagagtggctaacaaatgatactgtctcaatattaaatagtgggggctttgttgttgtttttataaattgggtgaaagtccttcatgcttttaattttttttatttaagtaatttatatgttttctcccttccaaggaatgaattttattcttcatcataatccctgcaaattagaggctaaaaatctttgttttacatctggagaacaaatggatgttcctgcttcattctcagacaagcaagtgattgatagctttgataycagattctgaaatgaaataaattttgtctcaatttgagagaaaatagtgataatacaggtcctttctgccaaccaactcaggcatatgggccttttatttttttgatcttttttcattcactacaattctaaattgaaaaatctcacattttcttctaaagttgatttaacaatatagttaacacttaaaaatatctaaaataaagaatataacacattctactgaaataggcagccagcagtttatacatatttggtctaatacattcctcaccttacataaatctccagaaaagctataggaaggaaacacattcccctgacacgacaggaygtaaaatggatrtaaaccaattactttttgcagttcccagagtctcaggaatactgacccttctgacttcattttcaagcaagaactctccacccccatcttgtaaggaaaaataattgagctgaatttctagcaagaagcgaatcaagattttcaaagaataatttcgctaggacctatggagcaaatcacctttcaaacatgccaaaggtagttatttgaatacatttaagcccctaatcacagaagtcttttgatgaacttttcccactttaaatacatcaaacgaagcaaagagagtagagaaagccattagaaaatcattataataaataccaacattgatctacttcttccctctcctttggaacctcccctttccttgtttttaaaccttttagttgrgctttatatagcaaagtaatcaaactctcacaggccattataaaagaaatttaaatgatttttacgaaaaccattttccttgtttaagatttcagggaacctggtcagtactgtgagggctcagtttttggttgtgactttcaagttgaacctttttgatggtaaatagcctcctgcttatgcctgtgtgttttgacttaaaaaaatcaatctctgagaaaatgggcttccatcttcctttcagccccgtctcctttgatgattgatgttaattcagtaagctgctgacccaagaaaaaaagaattgtttgtgctgttgttttgaataaataaacttacaaagaatcaatggctgtaacttagagaaattaggtagtagagagcataaagtctctgtcgtgtttctcatgtaaataaagcaaagtaaagggcatttcagcaccagatatctttttgaatgatgaaaacttgcttcaagggcaatttttttttttaaataaatgttctctctgtatctatagtgagaaaggtctgtagttgtgacaaaaataggacaccttctacttattcacataataattcgaataagtagcgaagcaaagcaaattccttagtcactgggcccagcttacattcaatgttgttagtatgtggacttcagtcttcctaccatagtttaragaaaactttttgaaggactttgtaacaccatgattcaattacctcctcctgggtcccccctacaacatgtgggaattctgggagatacaattcaagttcagatttgggtgggcacacagccaaaccatatcatggagcaaaatgattagcttgcatattgtatgaatttggcctttacttctcggtgtttcagttatctcactatgagataaggaagtgcctccttcatcggttgtacgttttagttgtaaggattaaataaattaatacatatgaaatgcttaaaacagcactagatttataatattccataattggtagccattattattattattattagagacagtatcacactctgtagcccaggatggagtgcagtggcatgatcatagttcactgcagcctcaaactcccagggtccatcaatcctccggccttagcctcccaagctgggaccacaggcacgtataaccatgcccagctattttttcttttttaagagatgggatcttgccctgttgcccaggcttgtctcaaactcttggactcaactgatccaggcaccttgtcctcccaaagtgctgcrattacaggagtaatccaccatgcccaggcagctattatctttattacctaaatagatttacttgattttatgacttttatattatcatttaccaaagttgtaaatttttgtatttttaaaaagtttccattctcaaccattttggtatgaaattcttcacccatagtaatttgaaaagtatatgttatgtgctattctcgtgatagtgaataagtctcacragatctgatgggtttatcaggggtttctgcttttgcttctttctcccttttatcttgctgccgccattatcacctcccaccatgattctgaggcctccccagccatgtggaactgcaaatccaattaaacctctttttgttcccagttttgggtatrtctttatcagcagcatcaaaacaaactaatacaccccatgtctggaattctcataccaggtttataccattaagtttgttggagtaacactcagataagcgtggatggcattgtggaggaagggcaaaccctgagcactttcttaagccacctttctcatgcacacattattattcccctgcctgctagtcatctaccacatgtaaagtagtggcaaacatcagacgcttttaccaccacatagagtttgaggctctcagtcaaaatgactcaaatgccgcacctgctcggtcccagagcacattgttattttctcaagtaccgatacrtgcttttgaaggaaaggaggtagtgcagacatggcaaagggatgtatggatttaccctcttgtgctgaacaccatgaaatgcttttctttaaacaagttggttttctgatcttacagagatgttgtcattctgtgaaagggggaaaactgtgaaggctcatttaaaagtcctcccttctcaccttgattttctgagcactatgactcttttgaatgtcatctctcctcctggtcttttacccctctctttctttgtgggacctgacttctccttccccttgtgtttatattgcatagctcattctagctgacacattttgttagtgttatcagagagattagaaggagtaaagtcactgagagtgttgtttctccttcttccaggtcaacaggcttactttcaaagatagcactccttgtttgctctgcttgggccataattgagcagtatcaagtttgcagtttattctacgtctgacttgttaatttaactcacagtgtactgattttatatgcagcgttggttcatatcttggggctcagaatctaacatatatattaaactgtcaagacactggcagtaggagaatgaatgcttcataatttgatcatctgagccattttaactaatatctgtatcttttgaatcaaatgaaaatatactgtgataattattctttcactgaatgttaattaagtgttgttttaaggttagaattatgaaaataatttctagtaaagcccccgtttaaaagctctacccctaaaaataaaacaagaaaagcaaggaaaaagaaaaaattcctaccccacatagcacattgtctcttttttccaatttcggggcactcatrtgagattgtaggcattcttcaaccacgaagcaactttaccaactctgttaaaattgccacttttaacatggggaaaaacaagataatatttattaacatcaaaatataacargctggtaaatatctttactatagatctaaatgcacaaaatatagggctgcaaaataaaagacctagaaaatataattttttcttttttcaaaattaagcatagcatattgagcaaatgatcacaaagtacatccaagttagtttatacatgtttagcaatctgtcctatatgatttagaaagctacgggatcacatttgctgttttaaatatttattgttctgccatagcatacactgcttatccaaattatttagacacctctactttaacraactataactcgtagatcctacttagcatagatataaggaacttgagtgagaactggtcatattgctcagaaaagatgtctcaggatgtagtatcattcttgctttacaaatcaaagtgttcatccttcatgataaaaaggttatttaaaatatcagaatactttattctttgagttgtgcaatgcgctcataactttgtaaaagattcaaaattgatggtttaaatattatgtgtaaacttgatatgcttctaaagacaattatagtacaaattaccatattttggattggtaatttgaaaaatactaaattactttgactttttaataatttggtttgataaggtagaaggcttttccatgatatctgatagatttgtgggttctatgtctaagaaaatgcaagaaagaaaaaatggtgaagaaaatatgttagaaaggaccccataaaaagaaaatgaaaggactttgattcctggcaaggttgagtgctaaaatatgtggtaaatttccagtacaaaggagttagaaatgttgggtaaaatgcaataaacttctttttaaaaaaktattgttgaccttctttaragagtaagcggtctcctgggcatgcaaataaagaggaaactaaaaaccagaacagtaaatggacactgatattgcagctgccttggggcatttgtcagcctcaggaacctagaggtccaagttttaacagctggatcactactgaagacagggccttgggcctgtacaagaggggatggagaattgaaacctcctttttataaagcatgtaatttttgaagggttacctcgtcaattaaagggtagaatagaaaaaaatccaatcagcaaagggagatggcaaggaaatttgtcttggcaaaagcaagcagttcttctcttgaggaatttgccttcaatttaggcctttgttcttcccatggataaagtcttctaaaacatgagttcacaacccccaatcatagaaatatacagggaatatgtaaccataagctggagtcagcagaaacaataagcagttggtatggtcaggctttgcgtccccacccaaatctcattttgaattgtaatctccataatccccacgtgttaagggagagaccaggtggaggtcatttaatcatggagtggtttcccccactctgttcttgtgatagtgagttctcatgagatctgatggttttctaaagggctcttccccctttgctcggcacttatccttcctgatgccttgtgaagaaggtgccttgcttccccgtcaccttctgccatgattgtaagtttcctgagacctccccagccatgttgaactgtgaatcaattaaacctctttcctttataaattacccaatcttgggcagttttttatagtagtatgaaaatggactaatacagcagttcagttagttcccaataactttagaaatgagatttctgattacagaatatcaaatgtctatgttttaaacatttaagaaatagaaattgaataaaaacatagtaaaagtagtaaaagattaagatgctgccagagaagactaggccgacttgagaaagaacaagtatacctctaaaaatgaaaatgttaaatatttaaaaatttctataaatttaaggtgtacaagtgcatttttgttgcatagacatattgcgtagtggtgcagtctggtcttttagtatagtgatmacccaaataatgtacatcatacctattaatttctcatccctcacctgcctctcacctttccaagtctccagtttctattattgctcactccatgtccatgcgtacacactatttagcttccacttgtaagtgaaaacatgagtatttggctttcttgtttcatttaagataacygcctctaattctatctatrttgctgcaatagacatgattttattctttttcgtggattaatgggttatcatgagattgggactggtggctgtgtaaccagaggaagagagacctgagctagtacagtcagccccctgcccatgtgatgctcagcaccacctcatgactctgcagaaagtcctcaccagatgtagccccttgaccttggactttccagccttcataactgtaagaataaatttattttctttgtaaattacccagttttaggtattataagcaacagaaaatggatcgaaacatattttgagttcagaatttctgtattggcatttccttcctctcattgcctcttagcatttttttcccacaccataggactctactgttaatgaaaacccgatagtcctatagacagttgtttttggataaacacagcaattgatgcttctggccctaaagtttgaaacttaacatttgttttgtctgacgtccttcctcaggaatggactttcaggcctcccaaaaaagtatctaagaatcaaaaagtaggctaaggacatggacagttctcaaaagaacatatacaaattgccaataaacatatgaaaaaatgctcaacatcactaatgatcagggaaatgcaaatcaaaaccacaatgcgataccaccttacatctgcaagaatggccataatagaaaaataatagatgtgggtgtggatgtggtgaaaagggaacttttacactgctggtgggaatgtaaactagtacaaccaccatggaaaacagtgtagagattccttaaagaactaaaagtagaagtaccttttgatccagcaatcccactactgggtatctgcccagaggaaaaaaagtcattatacgaaaaagatacttgcacatgcatgtttgtagcagcacaattygcaattgcaaaaatacagaaaccagcccaaatgcctatcaatcaatgaggggataaagaattktgtgtgtgtgtgtgtgtgtgtgtgtgtgtgtgtgtgtgtstgtgtstgtgtgtgtgtgtgatggaatactactcagccataaaaaggaaygaattaatggcatttgcagcaaccttcatgaaacttgagactattattgtaagtgaagtaactcaggaatggaaaaccaaacattgtgtgaagttcttactcaaaaatgggagctaagctatgaggatgcagaggcataagaatgatacagtggactttaggcactcgggaaagggtgggaggggagtgagggttaaaagactacaaattgggtttagtgtatactactcaggtgatgggtgcaccaaaatctcccaaatcaccatcagagaacttactcatgtaaccaaataccacctgttccctaaaaacctatggaaataacaaattaaaatattatatttaaaattaaagaaawaaaaactgaaactcaccagatcactaaatccagacaataagatgctggacccctcattcaccataattgcttccttgcccatccctagttcccgttttctttacagattctttcatttcttcgctgctatataaacccttagttttggtcagtcagggagattgatttgagactgagttcctgcctctttggctgtagcacctgactgaagccttcttcctttgcagtaatcaccatctcagtgactggctttctgcacagtgagcagcaggacctagactgaacttctggtgtttctgtaacattaatacaagtgctaatttttctcctaactagttatattcttcaatctgtccttaaaaaataattcaaacaattggtcattattttagcttaactagcttttaaatcagttaccatgaaatgtgacttggaaaaaaaaacccgttagataaagatatttatttaacataaatattttcattgcatcttaaaatactagtgtataactctaacaaactgtgtgtatacaggcatgtgtgaaatttactttttttaggattagagaacatctatatttgccttcaagctcccttaaaatagtttagggaaccatttagcatcactttccatgccattgaactcagagttaaaatsgtgattgagatacytataatgcaaatagaaatgtcccgaggtcattgtgtaattttataggggtcttcaccaaagcaaggaagaaggcagtaagttttatagcgtgataggtggcctttatgtgaagtgggttgaaatgttgctctctgtgtaggcacacagtrcatggaataggcatttcattatgttcatatctacctgtatttttcctttgatcaatgcatatgtttgattaaacagaatgaaaatctacaaaagtgaaaatacgtattgaaaaaagtaatagcggtaaagcagtatcttgcagctttttactttgagtcccagtggattagcgattttactttactctagaaatgacagtrtagtgatgattatttttcttttgggactgataagaaaagaaatggtgcccaattatattagtcattagtattctttgttataagtattatgggaagcttgtggagctagaagaacgtggcctgaatatatttttaaacaagtaaattatctttcagtattggcaaaaaatgtagtttgtctgccttagaaaaataaaacgttcatacataatttagcttgtctgtcattttaaacaattcagaaggcatagccctgtcgtctaggcctattttttttttgtcaagagatgcttcattggttcctgtgtgaaagtgttgacatttatattacactctgaatacttaagaaaccagaggattccagttcttttggaattaaccaatggtatctcatctactagtcaggcattcacaacattgtgtgcacatgctgaatttgtgctaatggcttcttgccataggtacattttgtgaatgtgactatttatatagcttctttcatatatggcccagtcctcattcccttgtarccaccctccttccccaaatgtgttgctttatgttgaatagtttggaaaagaaacacaatctggaaactatgctgtggtctcttaggtagaataaccaacacacccagcaatttctcagtgaatggctgtcatagtagaggtgattattcatgatcatgatgaaatactttccctgaccaatttaagcttcctcctttagtgttttcatagttcctcttacatctgtttactctaacacatataaaatacagaaagctgagcagtctcatggcctaattgaacaaaccagcccaacagtgagggctatgaaggaattgttaaagaaaaaaaaatcagttaattcatgatacctgttaaagatagaatttattcaaggggggctactacaatggggttttgtagtggggtagaaagatcagtttcaactgcgaatatgtcaaggagaagtagagatttatagccaaggatatggatgtggctcaccgtatggaaaattactaagaagaaacatcaagggtaacagtgttctggctaaaccaacttgataggattattgctgaaggcaggccaaggtggtaaaacacggaaggcagggattaaagaatttgactagatatcaaaggtagtcagatatcaagggtggggaggaggaatttgatcagatattcagggtgagggacttttcctcaactaacccagtaggattgttgctaaaactggactgaaggagccaaggacagaacccaaggtcagggaccttctcagaaagagggctcagaggagccagactcaggtttggtcaggggaaagaattgtcagaagacaaaattacaacaaatttagcttaaagatcttaattgacctttatttgcaattttagaatcaagcaatgcctcattccataaagtagaatgagtgttttgatgagctgagcagatgagrttggctttacagactaaaaatggctgtggaaaacaaaaacagactgcaaaaattggattggtcatttcaaagctctttttttaatgaaagttaaagcacagggaacttctttatcatgccagctaaaactggcctgtttggagatttggctatcatctctctcctggttccccagaaggtcagataaataacttgctttcagcttggtggcttggtacttcagcatgagttattccattttggtttggtctcttgggtgtagtgcgggagctcagtccaaaccaatagcctcctgtaaattttatttaacagtctttgtcagaataaagatatttacttttaattttcttgaagaggagaaagtcactttttaagattcacttcacagcaaaactttgtaaaagccctcgtgagatacctcctcctcagcgcaaagtttgcagtcatggcagcagctaaaaatgtgcctacaggccgcatgccaccatgccatctccctgttaccattaccttcttctttctctccttcctgctgatgcagcagtgcctccttggatacaggatcattcctgctctaggctttttcctgagaggggcagctctcctgggattctggcgaatcaaatgcttcatctcaacagatttgtttatattcgccccttttccatgtggtgggaggaaaaactttttcactactttctttaattcaatgcttggggactgctgaattagaataacagaagacagattaacaggataaaagttacacagtttttattaatatttacatacrtgggagttcacagaagagaaaatcaaaaaagtagtctcagggtcttgtatcattcaaacataggacagggcggattgggcttcaaggggtcataaattgtggggaagtgactaggaatatgggggaaactaatggaagataggattattttagtaagggttgctaattcagtctcatccaggtgccgactcctcatcttgtgataacttgtgataagagttgctctcctttctgtggtccggaagtacggagcaccctcacaagggaaatttctgccctgcttttaagcagataagggagggcagagaactcttctgcatctgttcattctcacttgccttcagctcaaaataatccttgtgtttgagcagcatattttagggtagtatatcctcatctccttcatccacaaaagatttaaggtggtttttacagatgcaattaagtaagctaaacttaatgatatatgagaaatatgaaactaatgaaatgatggctcaaaaagtcagaagcagccattgatgttagtggttggagatggactgtgaatatgtcttgagctttccagcagtcagcacagagatgcacatagatatacctcatttgattccttgggtctatcatataaaataaaccatttgctcagaagaattatctgttcctggraatgggatagcttctagagattctcttgaagataatactttgtaatgtaatgcgtatatttttaacaatgaagtaaatgcagtacaacagagtaaataaaatattaataatacatatttactgagtatattctgtatgccagaaacacattaggtatgctggatatgtaatagtgaaccagacagacatgacctgtgtcttcaaggagcttataaatataatggggagagacagataataaacaagaagtaagcgagcaaaaatatcagatacttatgaaatccagtaagtggcaggtaggaaatcaccagggagtaatacaataaagaataaaattaggtggccactttgagaaggttcagccaaagttgcttcctggggagatgtattcaagttgagaatgaaaggttctgaggtgaggaagagcttagcacatttcagaaattgaaaagcagccagtgtgcttaaaataaggctatgcttaaaatcacaggaagccttcacatggaaaagttgctaccctttgaccatctccactgtgtacgtcataatctcatggctgatgtttcagtctgctgttggagagaccatctcatctctgatgggaggaaaaataatatagagggaataatgataaggctgggtcaagagtgtctttggaagacgttcacttctcacctatgcataaatartgaggctatggagtatgtctgtggtagttttaacctgaaaaatttatgaagcagtagtaacaaaaaaactaccttagcgccaataaacctaagtagaaaagacaatcaagccaaaagtaatcctcaagagagtatttctagagtccagctatgagcagtagaatttcctggcatactctccaaatgtgattgcaaaatatacacattattagttgtaaaaaaaaatagtttttactaaagtcttttctctaccaatctaggaattactcattgtgtgcttttctttttacagcatcgcaggctttattatttgtgtctcccctaactgagctcagatcaatggtgtacaactctttaacaccacctcctgccctgggacactcacagggtctttggaccttttatgggaaatctcaggaaattattgttgtgtgaatgggaagatggaacaaatcccagatacttgttaaacacttccatcttatccatatttgagtgattccacttccataatctccccttccaatgaatcagaatccctctggattgccagttgtgagaaaagaaaatattttaaaagtcaatagagttcttagtccttttcaaacttagtactcagtctgtgtccagtagcaatacgtatcagtctctgtgtaaaaatcagtgtatgttcatgtacgtttttattcgagagttttccaacagcaccttaacctttctcctcctccttagaattagtatttctcaataatattgtcaatgaagtagaaattaattatttgccacatgttcggtactgtgctaagcgcttcacatgttattttattccatttgtaccttggtcctatgaagtatgtcctgttgtatcctcctccttgttttggatagggaaactgaggtccagagaatttaagtaccatgmcccttgtattagggttctctagagggacagaactgataggatagatgtatatatgaaggggaatttagtaagaagtactgagtcacacgatcataaagtgaagttccacaataagctgtctgcaagctgaggagcaaggaagccagtccgactcccaaaacctcaaaagtagggaagccaacagtgcacccttcagtctgtggccaaaggtccgatagcccctggcaaaccactggtgtgagtccaagagtccaaaagctgaagaacttggaatctgatgttagagggcaggaagcatccagcatgggagagggatgtaggccggaagactcagcaagtcaaaattcttccaccttcctctgcctgctttattctagccctgctggcagctgattagatggtgcccaccctgcttgagggtgggtctgcctctcccagttcactgactcaaatgttaatctcctttggcgacaccttcacagacacacccaggaacaatactttgcatccttcaatccaatccggttgacacccaatattaacccatcacactcctaattacacagttagaaagtcgtgtagccacgattcaaacaaacccaggcaatctgattccagggcccactctcttgataatcacatggatttaaatcaataaaaaaaatataaaatgctgtctatattctcggcatgggtgatagaaaaatagccgtgtagataaacctagcctccgtagtccctggcagagaaaggctgtaaggaaagtgtcttttctgtaagaggaaggggaagcaggataggaagacacaactaaggtctcagatgaggcttcagaaaagagattatttatgacataagcttcastgggtatggccaggttgtgtaggggtgttcaaggctgaagagataatgcttaccagggagtctcacagagtaacccctggatgaacatctcttaagattgttagaaatgctggctgggtgtggtggctcatgcctgtaatcccagcactttgggaggccaaggtgggcggatcatgaggtcaagagattgagaccatcctggccaacatggtgaaaccctgtctctactacaaatacaaaaattagctgggcgttgtgtgtgcccgtagtcccagctacttgggaggctgaggcaggagaattgcttgaacccgggaggcagagattacagtgagccgagatcacgctgatgtactccagcctggcaacagagtgagattccttctcaaaaaaaaaaaaaaaaaaattgttataaatgctaagtctcagacctatggaagcagaaacactgaatgttgggccctgaaatctgcatttttaaagcctttacaggtcatccttaggtatgctcaaacttgagaaccgctataaatgctcagaagatgagagaatgtgacttatttcaagaattacaatattatttccattcctctcccttgcaacctaaaagaaacagagttgtttatcatactgaaattgtctacctttggtctaacagtatgtgtaaagaaaagcaattgaagatatattctcatttcatttatttttattttttaaattgttacataatgtgcatattttgggcgttcttctgaaattttgatacgtgcttacaatgtgtaatgatcaagtcaaggtaattgggatatctgtcactgtaaacatttttctttatgttgggaacattcagattcttctagctattttgaaatatgcagtaaattactaactgtagtcaccctattgcaccatcatactctagatcttattccttttaactgcatttttgtacctattaatcaacctttcatcatcttcccttcccactaccttttctttgtgcaatggcgcaatctcagctcaccgcaacctctgcctcctgggttcaagcgattctcctgcctcagcctcccgagtagctgggattacaggcatgcaccaccatgcccggctaattttgtatttttagtagagatggagtttctcyatgttggtcaggctggtctggaactcctgacctcaggtaatcggcccacctcggcctcccaaagtgctggagttacaggtgtgagccactgcgcccggcccccactaccctttctaactatggtaatcaacaatctactccctatctccatgagattcattttttttttttaccttaccacatatgtgtgagaacacacaacatgtctttctgtgcctgggttttttyatttaacataacgacttgcagttctatctatgttgttgcaaatgacagcttcccattctttttaatggctgagtgatatttcaatgtgtgcatgtattgtagtttctttatccatttatctgttgacagactcttaggttgattccatatcgtggttattacgaatagtgttgcgataaatatgaacatataggtatctttgatatattgattttttttattatatgtctagcattttttttaataagaaagtagactttgtggatagcaggtttccacatttcactttcacttttcacctctttctcaatagttgaatcccttcccaactagcctcttactcttaagagacttcatattatttaataatgttataattaactaatgacatattatttaagtattggggtaaaaccaaaccatcatcaccttaaataagtctgtattgataattgttgcagtgatatagagatagcaccttttctagtccattatcattgatgttcattgagttgtctcagcaatttacaaatttgaaatggaattccagaggcatctgaattatgcttatcctaacaattatgttgtatgaatcaaatgctattacagtaaaagccaaggggaccatccaaattcatttgttatactgaaacacaactgtatgtggggattgcttgaaataatgttttattatatgaagattaacatataaatatggttcaaatgtttttcatgttttagaggttatttgtactgcttcttaggtcattaaaaaataaaacattttactgatcaaggggcatttaaagcatgacagtgttaaagtatgccccggctggcaaagcggacttcctgtggctaactgaggtgctcrttaaacagatcaggtggccgtggctgggtgagggagcagtcatgtactctgtgttttgcagagatgctgttaaagtgtcacaggacctccctttctacgatcatgccaaaccagtttctgttgtcaatgcagagataggctgtagctggaagtcccccagctgaccaccaacagaccacctgacaccaaccaactgaccactgaaccagccaattaagaaagactggtgatttagggcttaaaggtcatccagtcaatactattcctcactcccctgactctcctcctctgtcctacagtttttgccttcataatctctgactcttcaacccatcctcagagccagcacattttcagtttgcactgtaggtttctggtccccaatctgcatattgcttatagaaaatatagctcctcttttttttccccatgtaccttatggtcttatattaacagtattttaaatgcaaaacaaacgtatgtttccmctcaaattctggtctctttttctgtataatctttgttgttgttgttgttgatattgacaagagaataacataattattgatttcttatagctgctttagagcagtgcattaatcccactttcctctttactatgtttctgttgttgcatttaccacaattttatttaatttctttgtttacacatcagcctctcccttactatgtcatgagggcaaaatgtcttatttgtcactatatctcttgtccctggaacattattagtgtagtttttctttctgatgattttacaaatggctcaattagtcaatcatgtgcaataattcatttaataaacattttttgagcacagactttgtgttagtactgttacctgttgtaggaaatttgttctaagtcctggctgcatcatgttacttagggaactttgaaagaggctctttactcctacactccatccctggtgattctcatactatagggtaaggcttgggacctgggaagtgtttgtttgtttgtttgttttaaaaaagctctcatagtaatactagtgttctgtcatgcttcaagataaagagattgtcctttcactagactggatatatcatattcttccttttctttgattaatatctttgtctctgtttttttaaattttttgtttctattcacaagaaaaaaatagaaattgggagacttgagtagcttattttcaagtttaaggaatgggaaggcacttcaatatagattatcttatttcactyaataattttgtaaagtaaatgttattatttcccttttttccattgagcattgaaggtttttaaaacttacagaaagccacaaaacgagttaatgttagaatatggcttggaatccagaggtgtgtaactccagagctcatattcttttcccttaattaaaagcaatgttaaagaaaaaaattattcttggcacttgttaaagatggtgagggaggctttattcaaggggccttggccataggtatggggaccactgcgatggggcctcgcagtgtgggagagagattgggctctaccctgattccaacaaggacaagtggggatttataaccaaagagcatgtggtgcaggattgggtggaaagtccctaagtggaagcatcacctgcagggggtttctggctaacccgacttgataggaccactgttgaaggcatgccagatgataagttatccacggtggtcagataccaaaggtgggtgattttccctaaactgacttaggattcttgctctaattggattctacaaaagcagagagggaaacccaatgtctgcttactcagaaaggactcagaggaggctggctcaagtttaggtcaatgaagagagtctatcaccagctctrctgtaaaaccaaagttagctgttttataaatgtgttgtactgactgcatatgtgttctgttttaaaaacagaagaaaatgaatgagttatttcattawaaaatgtaaataatttatgaaaaaaaaattatgttgatttatgtgtgtgaccttggttgtgttgtgttttgtttacccctgctctctgtatcagtgcctttccgcggcgggggtggtggtgggggaatcctggtctattgtttttttaaaaaacattgtgtatagtttaagtagtgccttcacttctgtgttgagactgttattcttaaagaacatgcaggccagttgtggtgactcatgcctataatcccagcactttgggaggctgaggcaggatgatcgcttgagcccaggagttgaagaccagcctgtgtctctacaaaagacacaaaaattagctgggtgtagtggcgcccgcctttagtcccagctacttgggaggctgaggtgggagatgcacctgtgtgtatgaggttgaggttgcagtgagccaaaatcacgccackgcactccagcacagacaccagagtggtgtcaaaaaaaaaaaaaaatatagaagatgcgatgcatatagatatacaactattttttcacactacagactagactatataactatttcttaaacttacaaaaacagcaacctatattcagtgtgcacattaacacactctgtgccttgtttttttcttatggcaagtatgttggctattgtttttctgtcttggtggctttgaggccatgtactgtgattttgcatagcatgttaaggtttagcagttgatggttaatttatttgtgtatgatgtgtgtctgcaatatggaaattaaaagctgactgtaacaataaattatgaaaatgaaaaagtaggcaataaaataggcatgtgctttgcaagttctatagcattatattgtatttcttgtaaaactgtgcactaccttgaggttgctttctagaagtaatgttattgtttagtatcagcattcactttttttagaatcacattgatagatatgatgtaaatatttgcacaggtgaaattaaaatacacagtaaagaggatagttcgaaatcttaagagagggatatatttaatttagagtgtttaaaatgcatgttcttacactcttctctctgtttggaattctctttcccttttttgctcctggagcaaattggtttgcagcccctcaggtccattcctcaaaagagccttctccgcctgacactttcctagactgagtcagtgttttttcccccagtctgtacctgcaatggtttttttaagtgtatgtcttatcaacctaaaataagcaacagaaagaccaactcgccaaagagtttattcaggaatagcaggggagcaatccagaatatgcctgctatgatggatcataggcgcttccagagaggcaagggaaggtaagagtctgtaaaggcaaaatgagggaggttacagtagttgtttagcatcagttcgttagtggaacaggcagttgctgggctggtctccttgtagaactaatctgtatgtagggttgcggtggcctttatgtaatgttgtggttttggcagtctcttatgataattcctgttgtcaagcaaacatgcatgagggcctgtctttcatcgcatcctggctccattttgttggggtttgaataagtgactctcttttgacatggacaactttcacagtcttctcaagtacatgtgagctccttcatgtaaggaccatctgtgggaggtcccatagagtctgaaacattgaacattcactaaatgtttgattttgatttaatgaataaaatttattgtttgcaatagaaaatgtaacagaacaactaatttcacattatataattgtgacatatgttatgattcttattttcagaaaaaccgaggtctgaggtagctaaatagctttctgaagtcatacagattgtcccttagatttagtctgacattatgttcatgtgttattcaatcctatatgcttttcaaaaaaacctgcatttgcccagctacaatccacatgacactattgcttccaagaaatgtaactggaatcatggccagtggaggggaaatggattttggaaaaaactattaagtaaaagttaatagtattttttacttttgactccaggacttttctcaactataatgtgctaaagtgcatagtaccaaagagattgatttaacacgcaatattttacagttatatgttaacagaagccctcttcaaaattacttattttctcttgagggactatttttttttaaggatgtaatttggaggagctacactaatctattctgtaagatgttgattcaagttctttatatcaaagtcatctcaactttgtatgttaacaaaagaaattgaaaatatattggttgtgggctcttttcctatattcgactctgatatgctctataagttttgacaaattccaaaattgcaggaaattgtttccatttattcattagcaagggggctatctgaggagacacatggtcaaatactcagcttttggatttgtgaatttcagcttgtagtcattgttttgctaagaggtcttagttaagatgtatatgtcagatcatactataataaataatagacaatccaaattcatttactttactggatttatgtttttattagctgaaggaggttggcttggtaattgttttttatatggagacttaagtatcaaatatagtctaaggaacattacagggacccctctctgtggccattatttttagttagtaaaggggaaaaagaggccttctctgatagtcagtattaacttagtttagtagtgtctgttgtaagataatttaacttgatcaaattcaaatattaggcttagaatgagctcaggagttcaaggtcagccagagtaacatagcaagaccctgtctgtaycaagaaaaaaaaaatataatgtattcttacctggtgtaataaatagaaaagaccaggtaagcagtatgagaataaaaatatagatacgtatgttaatgaaaataaacattactttgaacttgcaagtggtattccaccaaagttaaaaacatctatgaagtcttacttttccaacttgaatttatccatasataattaaaagtaaaatgtcctagacttgagaaattttttattatccaaatagctcttacatgcccccaaaagatctccacagagtgcaagagacttyataattcagcattaatctgaattggaactgagttgaagcataatattgccttaaatattttaatgaaggagaatattaacctgattaaacaagatcaacaggctcaaaatggaaacatttgcctgtttaatcaacagtgttttagacactgttaaggattttgcatacagtggggccttgttatgctggttgttggttagagtgattcccccattatccatgggaaagacattccagggcctccaatggatacctgaatccatagatagtgccaagccctatatacactgtgttttttcctatatgtacatacctatgataagatttaatttataaattaggcacagtmagagattaacaacaataactaataataaaatgcaggttgaatatcccttatctgaaatgcttgggaccagaaatgttttgcatttctgatttttttcagattttggaatatttgcatgtatataaaatgagatatcttaaggttggaccccagtctaaatacaaaattcatttattttcatatacaccatatacacataccctgaaggtaactttgtataatatttgtgataattttgcgcatataacaaagtttgtgtgcattaaagcatcagaaaacaaaggtgtcactatctcagccacccatggggacaatctgtggttgtttggaatcactgtcatttttctttttctttttctttttctttttccttttctttctttctttcttttttttttttttttttttgagacagtatctccctctgtcacccaggctggagtacagtgtggtgatcttggctcactgcagcctcgacctcccacactcaagygatcatcatttctgactctgaatgtataagctactgattagcaatcattttcttacgcttattcacacataaatacttaatagcaaaatatataacataccattaaaatagtgaaaaaataatgtgttcrgggtatctaagcagcacagcagcatcaccagaacacccgcatcagctgctgaaccacagccagctttgtcgccaccaacgatgctggtttgttcattctcttctctyctcttcccttcccatcttgacaaggtctcacgctgttgcccaagctgcagtgcagtgatgtgatcacatttcactacaaccttgaaatcatgggctcaagcaattctctcacctcagcctcttgagaagcctggattgcaagtggggcatcatgacttccagccaatttttttttttgaattgctatgttgccgaggccagtctaaaactcctgggttcagatgatcctcctgccttggcctcccacctcactgggattacagatgtgagccactgcacccagcctgtattttatttatttaggtgagaagaaacatcagaagcagttgagggaccaagaagtggatcacctagggatgaggaagcattgtgctaggtggcttttaaaaatgcttccagcagagtcatcygtggctccataacaatttttgtcttagaagtctttctttaattttataaactgccatgttctgttatgaatgtgcactgctctagtccttcagtaagctcatcacatatttgcaccatgttgtctgtagatagtaattttgcagtgttaacaatgccatctttatcgtcactattatcacaatcaccttgattcagaaccattttggttattttgccatcagtcaatgaatgaaataactgaagcctcattatcaatgttaaatttctttaacatccacttcttccagcatactgatgaattctgaagatacatcttttgcatatgtaaggagatcagacttttttttctcacttgacatgtgaaatccttcaaagtcagcattttgttcatcattatcactgaacatagtcacaggttagaagctgtgccaggcacgcaccactgtgtctttagtcacagtgttctaggtgttggcaacagcatatgtagcattatttatgctaaactccttttgaatatcttccacaaccacaccaatgttcattgctacrttgctgctagcatgttgttcaagaatacatttttatattcactctacattgatgtaaggataccttcgtcacatggatgaattaataaattcacatttagggggagtatatgtggcatgaacatgatttttgatgagaatttctgctggaggatgagcagaacagtggtcaaggaataataaagttgtgcatttgtcatcccggccagcttcctttcagtgagcacaagtcactggtacaaaatgtttgtgaaaccgatcagaagagatatccctggtgataaatgcctttttgttcatataataatagactagtaagaaaatcactccttgaaaactgtgagatcatagccttttcctatcataacaaattacgcttatgcatgcctactgcattagaacatcccaacacagctgttctgtctttggcatccttaattcctgtaggagctgtctcatcagctgtggccagtgtcgttctgggaccatacaccaaaacagtgatgttttaacagcattatagacttgttctggcatcagatttccatcagcgatgaccttggcaaattcatcagtgaattgctctgctccttcatggtcagcagatgctttctcactgtataaatctttaaaacaaattgaattccatgtttaagtttctataagtagcctgttgaatatttacagttcccttcaattttcagttcatcttgatagagctttgcttgtttcatcatcagcaataccattaagaggcatgtgttcactgtgacactgatcaatccactctttcaacacctaagattttaaaaggaataaattaatttttaaatagtgacgagaacttgccatgttgcccaggctggtcttgacctcctgcaattaggtgatcctcccgtcttctcccaaagtgctggaattacaggtgtgagccaccatggccatccctaagatctttatttttagctttatgcagtgtttttgtatttttcgttaactttgtttatcactttcagcatggaacttcaacagtttatccttgttcttcaggtcatatatggtggtcattgtaacaccgtagtcttctgtgacatgttccatacttacactgctattcagtttctccaacagcctgactttcagtgctatagagaaacataaatgctttccctttttcctatcactgttattcatagccttcttgacattttcaacaatatctttcaccacagagcagagaataagcacaaaaatacagtgagtaatgcacgtaggtcttagccccatcctggggaacctgtccttgctgcatctggcctgtacatgtggcattgtattacactttgtgagtgtgcttttatgggagggatccgggtgtgtgtggaaaagatayattgcagctgaagggaagaaaaaaatctgtcctgggagggtaatttgttccttgggagtgctgaataaactgtgttgtacacctgaagttgaactgtgacttgtcatgtgaggtcatgtgtggaattttccacttgtggcatcaggtgatgctcagaatgtttcagattttggagcatttcagatttcagacttttggattagggttgctcaacatgttgaacaattataacaatatgctgttaataatttcacagatttgttcttaccttagatcttagtaacctcagcatatgattttattttctttccrtaagttaagaacttttaccttttcacttagcagaaaagccgggtagatactatactttttaaaaattaagagagaggcaggcacggtggctcatgcctgtagtccaagcactttgggaggctgaggccagtggatcacttgaggtcaggagttctcaagaccagcctggccaacatggtgaaactccatctcttactaaaaatacaaaaattagccaggtgtggtggtgtgtgcctgtaatcccagcaattcaggagtctaaggcaggagaatcacttgaacctgggagacagaggttgcagcgagctgagatcatgctgctgcactccagcctcagtgtcagaggaagactccatctcaaaaaataagaagaagaataattaagagagattatttctaaaattataaatgtactggaactgctagttaaattctgtctgcttctagtagaaactatagttactaaacaaataaaaatatagtagttcctccttatccacaattttgctatctgtgacttcagttacccatagtcaattgtggtccaaaaatattaaatattaagaragcattttatggcttatttttggtatatccaaattgccagcatcactacttttggactctggggccattattaagtaaaataagggttacttgaacagaagcactgcaatacccgtctgagagttgacttcataatcgagatggctacgaagtgactaatggacaggtagcgtaaaacgcacrgatacactagacaaaggaatgattcatatcctggatgagacagagtgggacagcatgagatgtcatcacactactcagaatggtgtgcaatttaaaatgcatgagttgtttatttctgaaatttttcgttttatatttttggaacacaattgactgcagataactgaagccacagaaagcaaaactgtagataaggaggaattactgtattttaatttgtttattaaacttcgtttctactagaagcagacagcatttaactagcagttccagtgcagttataactttagaaataatctctcttaatttttaaaaaaagtatagtatccacctgccttttctgtcaggttgtgtataaacttccctcccagcgagtttgaattaatgtcattttgatgaccaccatgtgtatgtgtaagtgcaattctgtatctgtgtgtgtgaaaaattgtgtatgaatccttttattagttccattagcctcaatataattaaattattgtactaaaaatatccagataagtaatttccagcatactactatgattttactttataagaatttacaaaataggcttatcaattacaaaaggatacagcaaaggagatgtgcacaaacatattagtatttgtacttatatttacatttatacacacatacatggaaactcacaagtcatcattagacatggcttttggttgactaagagccctctctgataggagaaatatagtgcaagccacaaatgtaattttatttccaacagaaataatatgagccacatttaaaaagtgtaaagaaatagatgaaatacattttaataatacattttattgcacccagtacatccaaaatactatctcttcaatctgtaatcaatataaacatttttaacgagatattttacattctttttttcatatcaggtcttagaaacccagtgtgtgttttatacttagagcacacctccatttggactagccacatttgaagtgcttaatatccctgcatggcttatgagtggagcaaggggaaaaggtggagagggaagagtacctgtctctcttcttctttgcttaagggcactaatcccatcatgagatcccacccttatgaccccatctgaatctaagcacctcccaaaggccccacatcctaatactgtcacactggggattagggcttcagcctgtgaatttggggaaacacagacattcagaccatagcatttataacctcaagctttcactgtctctatcccagtaaaccagagctcttgtaagacatgtgtgtgtacacattaagtggccttttttttttttgcctgttcttctttaagaaaaccaatataaaattgaagctaagacactaatttaggacataattaattgttgaggtgctttgaaggatctgtattgaagcatttactggtaaaagtatagaatttaacatagatccatgattagccaagaaaatgacagaaaatgtggtggtgcatgtctataatcccagctactctggaggctgaggcacaagatcactggaacccaggaggtggaggttgcagtgagccgagatcatgccactgcactccagcctgggtgacagagtgaggctttttattgacatatcaaaagaaaataaaagatgatagaaaagccattgttggtttttttttttccctccacaagagtctactcaaaaaagtcattgttaaagagaaacaaagaaaaagttaaaaatgaaataccaattaattaagttttctattttagtgtagattttaggaatctgcccaatttttgctcacctcccaggtgcttatttctgaacaatatttgccctttattttttatttatttatttattttttttgagatggagcctcactccatcgcccaggttggagtgcagtgatacaatctcagctcactgcaacttccacctcctgggttcaagcaattctcttgcctcagcctcctgagtagctgggactacaggcgcacgccaccacrcctggctaatttttgtatttttagtagagacggagttttgccatgttgggcaggctggtcttgaactcctgacctcccaaaatgctgggattatgggcatgagtcactgtgcctggcctcatttttgtttttgatggaatggaattcctggattttgaaattctgaaactctggttatcatgagtgacagtgaacaattacttagataatggaatgataaaaataccagaaatttttaaggtgctctgtggttcatattatttataatgtgcttttttgaaatcttcaagatagaatctaataaaaactttcagactcagaagttggaagtaggagtactgacttcttagtataaggtgaagcagaagtrtatgactccttgttacaaggagaaaaagacacaaaaaggaagaatatgtggtcaatacagaaaaataggaattcttcatacgtgacttgataaactaaaataaatgaagaatttgaggcatttattatcataatctcttgttgagtttgtgatgctgagtttgggaaagaacaaacattttagttggctagatggggaacattgatatgaaacaattcagtgggttacctagtcctaataaaagaattccattccacagcatggagaaagagagatcaacattaattgacattgaatggattggaagaagacaatcaacacatttattcatttatttattcaataaatatttattggacatttattatttgctgcagaacagacaagattccctgccgttgtagaggttaaattctgatgagagagaagtgtccattttgttgtgagcactgtgatgggttcttcccrttcattctctcatttaagtcctgcagcaacttatggcattatcattatttcccatttaaagatgaccaaactgagtctcagtaagttgctgaagattacacagcttgtaartaactggaaaggtaattgatgtatacttattaacagattcatcaagttacatgcattaaatatgtacagcatcttgtttgtctgtcagtcatatcctaataaagtggtttcaaaaaacaaaaatctcagttggtctgaccccatggatccatagctccactactgtactgtctccttccatggtcacactttttataggaatcccttaccaaatgtccacatttaataattttagaacatgtgagtttgctcatcattcagttgcattttttcagagcagttattttggagtattaggcttggttatgtcttcaaagaaatgacatctgatgtggctgttctgatctggttgcacaaatggctacttctcgtcagtaacagcaggaagatttgtaatgggcactgtgttcagaaaggttctgatcagcagcttcctctttactagtgtagtctgtgtaattgcaaaggacaacaagttatcactaggctgtgtctgccaaggtggacattgatggaggtgctgtagaaacatatagattttgtggaggaataggacgtaggagatgacatcaaggaggaagaaaagataaaaaggaagcaagacagttccatgcacagaccagtcagctacrgtgaagcatcctgcaaactggcaaactgattatcagcagtggctgtcaccaggctctgccccagcaggtgagagttgctacctgccaatttgtttagacaccttgtttgttattagattaaggttttgaatacatctgatccaagagaatggggcataatcatatttaatgtggatttggccagacctcagactacatagctggaagattatgtctattcattgcctaagtgagtttagcattgttttaaaacattctctgatggactcatcactatcataatctgttttctttttttttttttttttttcaaagtggtatgtggtttcagtgtcgtcgtgaagactctgtggctttttagccaaatcatcttaatgccaatctcttactacttgtgaaaccttggrtaaatgacttaatctcttgtctcagtttcctcctctataaaatggggatagcaatagaacctacttgatagcatttttgtgagtaaagcactttgaagagtgcttggcacatggtaaatgctgtaggcattagctagactgctattactgtgattattgttattgctgtagttattattacacatatgttattacaccaaacttaaattggtcaccattatcctcttagcatcaaatgacagatgaacaagagcatttacttttagattcctggcactttgcctatgagtgttgtcatttttatcagccataaaataacttatgagtttaataaaatatcgtatgccatagtagccaggcatttagagaatacttgggaggaagtgcagcagaagcagcaatggtgatagtctgggcttctatcacagggtgggacagaccttggagatatgctgtctcctctgtacttgatctttcatgtgccatcyggagtcttccctcttgctcaaaggcctgggtcagtgcatccttagtggctcagtttgaatggggatttcactcagtgatgagatgatgtggacacagaaactagttgtgataaaagttggtagttgcggccgggcgcggtggctcacgcctgtaatcccarcactttgggaggccgaggcgggcggatcacgaggtcaggagatcgagaccatcctggctaaaacagtgaaaccccgtctctactaaaaatacaaaaaattagccgggcgtagtggcgggcgcctgtagtcccagctacttgggaggctgaggcaggagaatggcgtgaacccgggaggcggagcttgcagtgagccgagatcccgccactgcactccagcctgggcgacagagtgagactcygtctcaraaaaaaaaaaaaaaaaagttggtagttgcagatacaaaatgctactgcatgagatctgtccagtagcctcaactattkttartatgcagtcagagagacagaaatgtatttcagggcagctgctaccaatttctttttttttgttttgttttgttttgacatgatactttttgccagatactgttcttttctatagagtaatcctaaatcagaaaaccatgtcatgatatcaggcttaattttaacagccagaaaaaaaaaaatcgccaccaagatataaaacattttacaaaatgaatgagggaagagattttgagcacagtattggtaaagtagagttcaaggggtgagagatgtgatacaccacaccgtccccacggaaaaacagcaatacaaaatgaactgtatcattttttactgacttgttctgttggtgattgaggcatttcagtgcacaaccaggaaaataataggttactttcacaatggtagaagtttaacaaatgctcaattattcaccctacatcatcgctgtcattggtgagagttttactgtatgatattgatgcctggcttctttcttattgctgtattcttttcagattcaatctgtctgcaatgggccactaaacatttcaatttgctacctgtggagctggattgcaatgctcagactgaaatgagaaaaatggatttagtgaaactcaaaatagagagagtttcatggatttttgtggaaggatgcacaaactgaaacccactgataaaaatacacacgatcacttttgagtgtctcataaaagtacatggtattaagcaattcatggatgtttttagggaaaatagactcagtgagatggagactgacaagactcccaacacttaggggaactcagactctgtcaatctggggtgtagttgtgtatactcagtgccattatcatagtccttgaatacagtatttgtaaagccgtacttgtttaggtgcacttaagagagctgagctagcaaagaacaggataaagtccaaattattttctggccaaccctagcatttagttttttcctagcaggaatcatttaggagatttcctggttgggagagagggttcatttcatatgggtgcctcttattattgtcatttcctgactgytgcccatagttcttgactgactgtagtactcactgtcttaccatgccttcctgtttatttatttatttatgcccattttggatttatttttctctttgactatcaagatgctctaaaagtttccccacattgcctaaatttgagctccatgaaataaagtggatttgacaaacatcaagaacattcagaagtacttgatagaaaatgcaagtattaagaattagaggcttaaaaaagactgaagtaccacagtaaggtgttacttcaagcccactaggatggctgtaacataagaatgcaaaataacaagtcttgccaggacattaaaaaattggagccctctggccggacgcagtggctcacgcctgtaatcccagcactctgggaggccgaggtgggcaaatcacctgatgttgggagttcaagagtagcctgaccaacatggagaaactccatctctactaaaaatacgaaattagctgggcatggtggtacatgcctgtaatcccagctactcaggaggctgaggcaggagaatcacttgaacccaggaggcagaggttgcggtgagctgagattgcaccattgcactccagcctgggcaacaagaatgaaactctgtctcaaaaaaaaaaaaaaaaaaaaaaaaaaaaaaaatggagcgctcctacactgctggtaggaatacaaaagggttccaccatgatgcatgatggcaggtttggccgtgcctcaaaaaattaaacatagaattagcatataatttcactattcactcctagatatatataccaaaaataaaaatttaaaaagggactcaaacaagtacatatacacacacattaataaagctctattcacaatagctgaaagatagaaatagcccaaatagccgtcagcaaatatatggataaacaaattaatggtatatccatatagtggagtattattcagtgataaaaaggaatgaactaccaatacatgctacaacacggatacacctccaaaccattatactaagtgaaaaaggccaggccccaaaggccatatattatatggttcaatctatatgaatatccagaatggataattttatagaaacagaatgcagattgatggttgycaggggctagggaaaggggacaattgggaggaagtgcttactggataagggctcttactttggagtgacggaaatgttttggaaatagagagaggtggtgatagcaaaatatttattgtactaggtgcccctgaactgttcattttaatatggctaattttgtattatatgaaattcaccttaataagttattcctgaggaaaaaaaatagctaagaattcttatctgggaagacaaagtaaagggttaataaagacaagtcctcatatgcagtaggttttataagaataaccaactcatctcctcttctacagagttgcctaagtaagaaaagataatttatagtggaaggaatatggaccatgttcattcctaccaactagattgtgacctccctcagaatggggattattctttgacttaccaattatttttttttcacaaagttacataacagtcattaatttcatcattctgaaatattcataagagcttgctgtgctataggcattatgttagtcttggggatataaatgtgagtaagatagatatcatctagaattaaggttctgtttgaatagaaagaccaaaaaataagtaaacaaacacaagaaargtatttgatatggttaggctttgtgtccctacccacatctcctcttggattgtaatcctcataatcaccatgtgtcaagggagagaccaggtggaggtaattgaatcatggggggtggtttcccctatgctgttctcgtgatagtgaatgagttctcatgagatctgatggttttataaggggctctttccccatcgcttggcacttctccttcttgcctccttgtgaagaaggtgccttgcttccccttcaccttctgccgtgactgtaagttttctgagcctcccccgccccaarcatgctgaactgtgagccaattaaacctctttcctttataaattacccaatttcaggcagttctttatagcagtatgaaaatagactagtacagtatcatagaacataagagctataatggaaaccaataggaagctgagacatagaaatatggcggggaatttggtctatactgcttgataggatacacagagccttggatgtgggcacaaccactgtcaggcccaccctcacaccagcatcagtactaggtagaagctttctagagttgggagagagttttttctgcaaaaaactcttttgcagtttaaagggaagataacctgaggacaggctgaccatggactaggcaagagccaagggagtgacagacagctggagccacagttcaccgtcctggaaccctccccaccttctgactaactgttgcatcctcttgctgctgaaagcctactgacggagaggtcaccttggatgtttcttccatagtctgtattgtatgttcaggaattttaggaaycaattgtgttagcaagtcatccccattttaccagagtgagaacaaagcctctagtggtgtagtgacttgcctaagactcagccaggattcaattcctgatctttagaactcaaatctagctgtcttttccattcatattataatgattgtcataatataataaaagtaacaattggccccccatattcctgggttttgcatccagttcaactgagtataaatcaaaacatcattgcatctgtattgagcatgtacagactttttttgcacaactgtttacatagtgtttacattgtattaggtattgtaagtaacctagcgatgatttaaagtatgtgggaggatgtgcgtaggttacatgccaatactacatcattttatatcaggtacttgagcatccatgggcagtgggctgggttggtcctggaaccagtccccatacagataccaggaatgactgcactagactacaaaagagcaaacagatttggactttagcctctactctgctactgtgtgaccttgagaaagacatcacatctctgggcttcgtttttctctgtggtatgatggggtaggttatatctgttgatctccagctcttcttatggttctaatacctgattccattaatatttcttcttctgttttttctttactcctcaaaatcatcatgatcatcacaaaagagcagcagttttttcctgggttgtataaataaaggaggctagacagcagagaatggaaactgtgggcagccttgtactgggtattccagtatctctaattccaaactagtatatgtttttaaataatttcttttagagacagggtcttgctatgttgcccaggctggcctcaaactcctgggctaaagtagttcccctgctttagcctcctgagtagctgggactacagttgtgcccaaatcagttattttccagacttcagtgttctcattatcctttcatttcttgtggctaccactgaacactttagctagaaaaggtgaaacctgactgcagaccacaaaaacggatccggtctcttagctcctttctctgccaccctcaaagtagccattaaatctttcacattttctaatgactttttttttttttggaagggggagaaattgggaatgcaagcaatgggagagatacaagttatagtaatataaaaagttatagtaattcagtcatacagtataaaaacccttatattttgtgtgaatataggaaattttcttttcttttttctttgagggccttatctctgctcttgtctgctgaattcaaagctgaccactttctacctcttctgcattttgtgtgttgtttcagcagacattgttcgttgttttcttttcactgttagaggctttcagagagagaaaggaagggaagagaagggaggatgctagggtaccagtgccctttcactcctaaattctcatgagtctgtactatagacccatgaggctgagcagtttacttcccatgttaactctaattcttagtctagaaagcatatttttttcattggaatgttactgtcaaattgctatattattcctgttcaaatggggagaaccatttataggtgatgcagaatcattaaagcagttaactctgctggagaaggtggaaggcacatggtatctcaattgagaaattcttttcctgcttctttaaattattaaagtcaaatacttaaagagtacatgctacaacactacattcaaaaaggtttattctagcatgatacttaagtattctttttctagatgcatttcattcatttaggcatccattcatcaaatgtttattgaatacttacaatgtgcagggcactacagagtgctgggcatgtagcaatgaaaagttgacatgggactctgtctttaagtggctttcactgtgttggagaaaacaaatkgaaaaatgtaagggcttgttatagagctgaaatacttgtatatgggagcgagtcttgggtgaatgcaacctatgtatacagataaggatttagaaaaatgtaagagcaaaaatactgctttagaaggatctgtaagagacattctgcctattcacagaatagtgtatacttattacatctaatcttgcctgatagacttgaaaacataaaatggtttttaatatagattatgatatggtctcctgtcatgacatatagaaatggaaatgcccccaaaaaagagcttacttctagaatatgtttgtaattataggatttatttgttttacactacttagaaaatattctttggccgggcactgtggctcatgcctgtaatcccagcactttgggaggacaaggcaggcagatcaaaaggtcaggagattgagaccatcctggccaatatggtgaaacctcgtctttactaaaatacaaaaattagcaaggtgtggtggtgcgcacctgtattccaagctactcgggagtctgaggcagggaaatcactagaacctgggaggcagagattgtggtgagcccrgatcacacccctgcactccagcctggctacagagcaagactccatcttaacaaaaagaaaaaaaataaaatattctttaaaagtacatttcttcaattggccataattcataccagtcctgtgttctttgagctcaactataaattaagaagcaagaaatttagtttttctttcatagttacattttttaaaaaaattggtatcccgaatagattccaataaaaaaaattccaaagatgaactgtaaaaacttctgaaaggttcactatttttcttatcctttaaggtggctactgccaaagaataaaatcagtgaaattgccttttgtgtgtaattcaaggttaataacttgtgggagaactttcgatcataaagtgagctttataattttatcaatgataggaacaatcttctattaggttagtattattcatttaatagctaaagagttggtgtatttctcattcagttgtaagtgttttctcccttttaatctgatccattagagcactactagaatgtagctgttttggctgtgcacatgcttgccgccccccaacccgtgaggtcctccatgatgtgctctccacactaccccatggttctgcataaattttttgaatatattgtttatatattcatcttactgctagattgggagcttcttgtgccaagacagtatctttgtgaatccagtgcccagcacggtacttggtgtattagatgtgcatatgtaaataatgagtagatgaagtgtggtcatgtgaaggatagaatatacttacacacatacacacacaacaagcaaatatacattaaatgcctattttttacatgtttatatctgggcctgttgaagttactaaatataaggctcttgtcttatccttggggagcttacagtttcattggaaccaaaattaacatttgtgaaaaagttgccttaactaaagatggtgtatatctcaaagccttgctttattcacaggctaaaggatcacctctcttataaacagaggctaaagaactccttttaataaggagaatcagggacttcttcacagagggaatgggactttagctcagccttaaaaaagtgagtgagacacatgacaaaaggcactrtcatataggtggtgatggtggtttcattcactagattccatctaagtctccattcatcatgcaccagagttcaacactgattgcccgcctcacccagcgtgggttaaggaataggttttactggtgaaagggaaaacttacaaggctaagtcagcaagagaaaagagggagtactaggtatactaggtttggattctgctgaacctactctgtgggtttgagtttccctggtattccgccttaccacagggcaagaatgaggaagcattcttattggtggggaatacagaggctacttaggaccaagcagttcaatttagggccccagctgcctagagaagttgtctgagaatgtcagctgctttcctagtacttagatgcctttagactgatgtgaattggcagttttctctttttagagaagccaccagtgctgaggagaactgatttgggaggaaagtgttcacctacccaagccagcccattgtccaggcaacactgggtcagctctggggtcactrtcagataatcctgcttcttgcactaccgaggttaagaatttgcaccctagaagacttcaattcaaatccctgcttccccactcactggctatgtaacctgaggcccttaatgtctctaggccttagtattgtaaaatatgaagttgggatagtaatagttcatttttcctgggattgtagtgaggattaaataaaatagccatgtaacacatggtgaatgtttagtaaacattagctgaaaaggaaggatcctctgagaaarcgagtggtgagaacatttttatgggcatagccatgctcagggatagtgggtggacccactttcccagtcttgttagggaaagggctcattctagggagaatagactggatttgtggagggcccttaatgtaagaccaaagagtcctcttccagtccatttggagccattcgtgattttcacgtcgaaccatgtgagatggtttggctgtgtccccacccaaatctcatcttgaattgtaactcccacaattcctatgttttgtgggagggacctagtaggaggtaattgaatcatgggggcaggtctttctcatgctgttctctcagtagtgaataagtgtcacaagatccaatggttttaaaaagagcagtttccctgcacaaactttctctctttgccttctgccatccacgtaagatgtgacttgctcctccttgccttccaccatggttgtgagacctccccagccatgagaaactgtaagtccattaagcctcttttgtaaattgcccagtcttggttatgtctttattagcagcatgaaaacgaactaatacactatgacacatagaagaatttttaggaaaaatagtgtggtggtaggcattccacatagattggaaagtaaacaaattaaaagcaggaagaccttttaggctagaagtaatttattttccaggaagccatggatttgagttttttgaacttcgacttccatctagtctgccatcagccttcattcctttcattaagcccttagttgcagtgtgcctcagacctttgtctgtctgctgctcttcatcattgtgtgcatggtttgaggcttagcattgcaaaaaagagttaagaagtaatcaagattattttaataaggcatagtgacaaaaacaacataaatggcatttctctgaagtgagwtttggtgatttctcattaaattgaattggcagaaactcagaaacaatactttctcatttcaagaaatagtaattgtttttaatgtagcgagccagagttctataaaagattgcagtgtcttgttcaacattctgttttctaaccccgtctagcataatgcttgtaagaaactaacttctcaggaaaggatggatggatggatggatggatggatgaattgaaggtatgcaaaggagttcagattcattggaccttatcccactgattgtgattgattatatatgattgtctaatatgttctcaccatcgccacgtttggctgtggacctcttggggcaaggtctgtgtctgtttttctcactgtattaccagttcctatctcgttaactagaatagtctttcattaagtgggtaagtgaatctacccctgaaataatgctaagcgtggggttctgggagagtatatcaccaataaaggattatgttctggccttgggccttaagccactcacttaagatctctgagccttgatttccttatctgaaaaaatgtgtatagtacctattttgccaatacataataggttaaaatataataataccttagagtaatactaattaaatctgctatatgtgcaaataatcaagagacttatttaatgaatgttgcgtataaaccttcataattatgagattgcaaggcataaccaccggtaaggaaataacctctttacccaaggaaacyataatgcacaaaacagtcgaccataggatcttattttgggggtattttattttctattcatgttaaagcaaataaaatagtcccttttggaatatatcaagttatacaactagaaatttctgatagtttggtggattttgcatgcctgcctcagttgttttctgttaaaataccaaagaaaaataaatttcaagagagtcaggacaatatcttgcttaacttgttgatgatgcttaacggcaacctgctattgtatttagcaaacaataatatttccatggtagataaagagaagatagactatttggagatgtagaaaatgaatattccagcaagaggatagataacttcaaactgacctgactgctgtcctaagcatgccaccacaaaaacagctaatagttatttaggacttaaatttatctgataattttgagaacaaaatcttttgagctaggttataatataggagccttcgattttcctacattaaatgtgtagcttagtggtatttgatgttgaaatggtaattttgctctattccttttgcttctggtagacttgctcttgaatttactacctgtatccaattaacggaaaatagagaacttgaaattcagagaactcattcttcccatcaaaatatgtactatacactggccttggttttgggtgaagatgagaaaatatggagcttaattttcatttttttcattaagattatgaaaaaatctgtgttttgcacatttatcagcaatggcattaccttgcaatttactatttcccatactcataggaacttattataaagaaaaatacctcaaaacattatcagacataccttttgagtgttacctgtttgagattcttatagtatccttagggaaagagctacgaatcaaaactggtaattggaaccattaataagatagagattctcataatttgaaaccagggtggtgtgtcagaaaaacgatacgtttggaagtcaaggagtctcattcctgttcctaatgttgtcagaggccagattttatcacattagacataggccagtttaagatttagaaaaagaaaaatccagataaaatatgatgcttggtgtatgacacagtaagtttttgaatctttgtggtcaaccagaagcaccagttctttttcatgacttcctaataaatcaggygtctcttttcatgtagtcatgggttaggtttacatggtaagaaggaatttgttgggagacaatgctccatggatcgcttgtgtccatgtgtcatgaacagaggcacagtgacacccttttggttgtgacctgaaggatggttggttagtgaacagccttggaagaaagagataatgcctcccactaaatgatgatattctggctactatttttgtggggagtaataaaatatccttgtccctgacccaggagtttttgtttgtttgtttgtttttaatttctaccagcatctgtgaaatgatggcaggctaacttgttagcttgcaagtagggtaaaacctgagattcttcacagtttctggcagaattgagtttgaacatactgaatttaaagtaagggacagagatgaagttatatacctgatgcaatttgcagctgcatataaattctggcacgcaaacaggaggtcagaactaaagacataaaaatgtggctttatgatttcttgctaaataggctttgccctgtatcccatttgggacttggacgcctgaaaactgttctttcattgcaatgaaatgttggaaatctattgataatgcactttgattttgagagtgttaagacataaaaccagagaaaactggtatctctggccacacatactcagctactttacctgagttcattacattcttgttacctttgcatttatctagagtacagtctctttaaatggagaaaatagttaatgtctttctcctttagaaatcaagattctacagaatgagaaatgctaaggaagcaatatttttttttccacagggaaagggaaactggctattgttaaaccctgcctttggcaattgcatgtctctatcagtagccaatttggaaatattgaaaccctgtctttggtgtaatacaactggtgtagtaagcagaggtgataactgttacgtacttcaccttgaattttaggcattttaaaggtcattggggaagggaaaataatccattaatttttactagagtgttcatgtaagtgtcttctgctgtgaaaatcaatgtaaaatttcactgccattcaaaatgcaaagtggtgtataatatcactactccaaactgccctaaattgttgcatttttaaacaagcaggttttgagttatgcccttacctcgtaaattcagcttcacagattggattattgccatgtggatgtagtagcaggaaaaataaatttgtgtcagtctgaattctacttgtgcatttattaaactactcttaaccttttcttaggtcagtgatcatcatacagatttgcttttatatgccttagagaaaaattcctctatgagtattatttatgagttaagtgttacttatccatttacattagtaatcttaaattatttacctgctttggaattcatatgttacaaatttgccagatgaaagctgccagatgagtgaatatatttgtgctacatgtctgttgctcattaaagtagctggtttgggattcacagcaaaaataaaaagtgttacaaggggtagaaaagargggagaagaggtcaggcagtttatagcaaagtctgctgtgctgcagctggcactagctggcgcctttgggcagtttctgctaaaccttgagcaattgctttcactcttccacctcccatgttgtttcattcattcaatcttagatggaattggttagagaggagaaatagaacactatttaaaacaagagaaatggtatatccccctctggcagagaacacaggtaagacattacctcttgtacttgatgggagaacatctttttytttctttctttyttttttktttgtttgtttgtttgggacaaagtctcactctgttgcccaggctggagtgcaatggcgtgatcttggctcactgcaacctctgccttctgggttcagcgattcttgtgcctcagcctcccaagtagctgggattacaggcatatgtcatcatgctcagctaattttttgtatttttagtagaaacggggtttcactatgttggttgggctgtacttagactcctggcctcgggtaaggtacatgcctcggcctcccaaagtgctgggactacaggcgtgagtcaccatgcccaacttatttatttttttctttttaatgagacagggcctcactatgttgcctagtctggtcttgaactcctgggctccaacagtcctcccacctgcctcctgagtagttgagattatagatgtgccaccatgcccaactgagaatattatcttgatctactaaataaatagattttatttccataatgacttatttagaattaaaagcgaagccctgagttatatatatattaaaaaaacttacatgcatttgctagtcaggccagtttaacttatgtgagagccaaaaatcttacataattattaacagtttwatgatgatagattattgattataattaaacctaggctgtcagactaatcaatggtaagtttagtcttaggccttgagttgctaggtcagatctggttttcccaggctgatatttcaaaagtcttacagtcttcttttgttgagaatccttcacttttccagttactccaaaggagacctcagtcagaccaaagtttgatggaggtcaagttaaaatttaaaccatatctggaagcaaggtcagtgcagcaaaggcacattctaaagcattacttcatataccttaattcttccggaaactcgtttgctgggtgttttcattcataagttcatttactcagcactcattcaacaaatattttttatttttttcaacagatatttattgagcatctactgtgtacattatattgttctaggctctggagttatattagtgacaaaacagaaaaaaattttgttcttttggaacttgcagggaaatacagatattaataatatcatatctattattttattaatgaatcataagatacagataatagatcattyggtgacaagcaccatgaaggtaaagtggactgaagggctcattaagaaagggatctctgaaggtgatatttgagcagaggccaaaagaaatatgggaacggttcatgcagttatttggagacagatgttctagcaagagggaacagcaagtacaaagtacctgaaagaagcatgtgcttggcatttggaggaactgtgaggggactggtaggattagaacacaatgagtgagaagtgaagggagatgaggtcagagaagtggtgtggaattggggatgaagggtgatcacatcataagccatagcaaagatgtttacattgaattaaaaagctattggaaggtttagcgaagtacaggaaaatgatgtgactttggttttaaagcggtcctgaacaatagcactttctgtgatgatggaagtagtctaaaatctgcagtgccctctaaccctttgtggttattgarcacttgaaatgttgccaatgcacctgaggaactgaatttttaaatttaatagaattttaatttaagcagtaacatatggctarcgtattggtcagaaaaattttatacattttcacaggttgctttatggagaatagtatgtggaagcaaagaggcaaaagcagggagaagccttaggaatgcagatcaaggcttagcaaaaattttttttcttataaagggctagctagtaactatattagggtttacatttcctttttcttgtttgtttgttttgagatcgagtttcactcttatcacccaggctggagtacaatggcgcgatctcagctcactgaaacctccgcctcctgggttcaagtgattctcctgcctcagcctcccgagtagctgggactacaagcccccaccaccacatccagctaatttttgtatttttagtagagacagagtttcatcatgttggccagactggtatcaaactgcagacctcaggttatccagccacctcagccgtccaaagtgctgggattacaggcgtgaaccactgtgtctggccagggttgacatttcatagggactctatgacaactactgaagtatactattgacagtatgtaaatgaactagcatggttgtgtttcaatgaaagtttattcattcattggtcagatttggcccataggttgttgtttaccaactcctggtgtgaatgagaggtgcgatgaccaggcttatttcaaaggtagacttgacaggatttattggtggattgcatgtgtggtgtaaaagacagaggaaattcaaacaaataacttaaaggtgtttggactccacatttgacaaaaaggagttgctattcactgtgatgggaaagacttggatagaagcagatttgggagaaactgttaaatttggcttgaagtttaagatgtctgtcagttatccaagggaagtttggaggtgaggactgagatctggactgcagctatatacacttgatagttataaaaaatggtattaaaaccatgggtaggaataagatctcctagagagagaatttgacaaagaagagaaaaaggtctgaggactaatccttggcatacttcagtatgtggtaaaacacatacggaaaactgagaaaagaagactgcagaagggtgaaagaaaccagaaagtgatgttttagcagccaagtacaagtgtgtcaagtaagacttcatcagtacttatcaaatgctgcctggtacgtaataggcacacrtatgtgtgctgagtcaatgaataactgggtacgtgctattctatactgacttctgttgagttctaatgtacaacacccccttaccccattcagaggcctttaatggctccccattgccaactccttgaccaggaatttgtattttaatatatgactgagttgaactgcaacacctcttcataggcctccaataggctctgcaattttgcatttctttatttactcattctatgcaaattccttcatgtgtgaaatgccmttctgtccttctttgcctcttgaaatcttatccctctactaggagccctttcaaatgccctctcctaaatgagtacttccccttccctccacttctcttctaacctgtccttaaacccttgtcatggctctactgacatgcatcccactttccatttggttccagttgttcattttgttttgcacatgatattctaggatccctgtgagcaggtgcatgacaccatagtggaatgattgtgaacatggagaatggtataaacagacctgttttcaaatactagttttttatttacgaacctgtgactttcctaagtaacctaaactcctgaaggctccatttcttcacttgtaaatgaagacaaataaggcgtcatggaattagttgagatagttccattaaatttattcaaatattgcacttattgcctgtcagattcaagctaaattttttcaatttaaataatttatttttaatagattgtcaatctgtttttgttattgatctaagcactatacagtgattatatactttaagtaagtgratgtcaagctagtgttaacagatagctattgccagcataagaatattccctgcctacccaaaaatatcggaaagaaataagaccagccacttataagagaaggtgccaatgcaatggctaatctttatgagaaagaagaaactttacagcacattttgagtaacttagtgcatgggctcagtgggccacctgctgggacaccaccttytaatggrttccacaattaaggcattgctgggtcttgcctttgcacagccaaaaccagatgatgacgctgttgtcctcttcacagacacagccccctatttgcttgttggtgatggataggaccaaattaggctccttcttggttcctgaggctgcctttggggttagtatgttgtagggtccagtcccttcagtgcagccatcataacctccctctccaacccagtcacctgctcactatcactaggagcacaacctccagatgccrtggagcgcactgcggtcgcccactgggactgcgggcctgcgtagtcaatgctgcagctccggaaagtaacctcgaagtcgtcacacccacaacaagcagcagtacctccgggtaaataatttaataaacaagtgtgtgcaaggaaaagttataacaagattactcccatttttattcgtttttatatttttatagtgtttaccactttcccttgtgaacacatgcttattcttaaattatttacattgaaaggattaagcattaacttttatgttttaagttaattacagttgaatttctttcttttttatttttcattttacactccttgttaaaattcttttaaatcattgccgacttggcagtttattgccttgataacagcaaatgagtatctgattcttcctttaccccaaattgccacttttcttgttgatcagcagcatcactgagtgaaaaccagcaacagccgaagtcaatatttataactttatcattagaccttaaaatcttatgttagaaatttatggtagtgcatcaggtggagagagaaagttccatgggaagctaaacctctgcttaaaggctttgtgaaacttgrctagtaagaagcatagttgctgtttcatgaaagtaactatttgctagggagccatcttgaaaggattatttctgtgacactatgtactggggaaatttttattgagactttgtattgatgttgtcacataatgtttactgtagacagttttttatttcagaactgtagataacattgagagttatagactgtctcaagcttttctgaccatatcgaatgaatcaaagagtgtctttccttgttagatttaagttggattttctgtccttcccttggaaaatggttgtatttgctggtaatttgtcttcatatttagtgtaaacttcccttacttcattgccatctagctatttgtaatttacagtatgtgccactataacatgatgtaaaattcatctattctgtaaacttcttttgggctcttaccccatttcattattagttggccaatagcattaacaagaaggacttctatgtacaagtcattatactgagaccttgaaggttttctagcccagacactccaacacatgatcttttctctagcatcccttcatcttgaattttgtccaccctaacwtactgttagtaatacagaactctccaccttttgaggaaacccattccatctctcaatgaaattagctattaraaagccttcctttaatgcaaaacgcagtctcctcccaggaggattatttctgtgacagtatatactgggggaaatttccattgcacttctagcctttgggtttctatggaaatagtctaatctctcttcyacaaaacagttcttcaaatatttgaatgacagatccatagttctattctgtagactctgttggttctcagataatgttrgttattgatgaattttcttccattatatttccttagaattagtttcaagaagacctaaaaagaacaaatacaaaaatttagttgcgaactaaaaacttgaggcaagttgtgagaagaaatgtgggaatgattgacagctggcttggttaccttctattgagtaaatatataattatgccattttttaaaaatgttrtttttttgagaagacagtaattgcactagtctattgtataattgttaaagcaatgctatttgcttatttgtctttaatcaatgggtttggactcacattgacctaatatacaaatcttgcaaactgctttttgagggcactggggaagggagaaacacataaaagatactgccaggtaaatatatatttaaccagaaagagtcagcactgtcagctcagttcactgcatattagggagcaatgaaaaggcctcattgtgcctcctgtgattgaaatgatattatctggcatgactggaagggagtgcttacttacagaataacttctttggtcttttcaaagatggtaagacttctcaagctttcttgttattttatttttagttagttatagatttttcttttagagtatttttcaaacttccttattttgatggtaactttttaaaaagtattgaaatagtcataatcagcttttatatttctccttttctaaatgcttccatgtattcaaaagatagattctctcctcactacagaaggctaagaaaacttccttttctaggtctacagtagtccagtctcttggtcaaaggtatacgatacattaaatctttatctggaaacctctcagaggaagataaagtaatcgacctttagaaattaaatgttatagcattcggataaataatcattggctattgttattacttttcttggatttmggtgaaggaaataaaagatgcaggcttttgaccaaattagagcatggctttaatttcctgttattccagcattgctactctttctaataaccacaaatcaaggatgacaaacaaacaaaaccgcacactagatcccaaaggcagctaaaacagcttcttagtgaccttctttctgacctacattgtacaaatgagatgattggaaacaggataataattgattgcaacaatatgacaatcttgttaaatgggcttaaaattacattctctacctggacagggaccttataggggagatcttagaggtaacaggatcctcatgtatggagcgttaggattaattgtttatgatggcactttactgaaatgttctaaattttcattatttctttctaacagattagtaagatggtattaatggtcctgccctatctgctgagcacagttcttaaaaaaacagctttctgatataacgaaagtcaacttggtgagctaccagctgttttagatttggcagatttcacattcgctttgggatgcctgtttggatatgtttataaagtcattaatcttctgtctctcctctcttcctgccttccttcctctattacttgctgaattctggacatacagcaaagtgtaagatgaatctctgtcctcatggagcttacaatccaaagcatattgaaagaagagttcaaaaataccaacattgaatatcaaactatttgaaattatgtgctatattggttttatttttcaattttgtatggattaactygcaataacagataaacacaagtatggtgcactttggtaattttttggtgaatgctgtggaagacaggcctttagtaaggttaaatattctactttcctctattagatctcatttgacttcacaagattcacttgataatagttacaaagtaaatccagttcttcaaatggaagataggatttaggtattttttactttagattttacttaaaactatagattacatttaaataagcagcatatttcacagagattttcaaaaatattagatttcaccctaatttatgttttgcacaatatttcaatgaaaatttgatgtggttgttaatgttttattccttttgatcattgcaataaaataataaaatgtaacatcagatttactgttttaaccatttaagtgtatgattcagtgacattaaatacattcacattgttaaacaaccatgaacaccatctatctctaggatctcttcatctccccaaactgaaatgctacccgttaaccaataacttcttatttcccttttattgcttgctttcttttatgtgagacatgcataaatgaatatcccatatctttggcttttttttaagtaataggtactaactgaagactctccatttgttactgggatatgaaaaaaaaatagtaacttgtagaactactagacttctagaactactactgtgatcttgcaaaacagcagagaaaaaaataaagagataaataaaatagtaacatgtctagccaaataaaatactcactaatacagtggagtagcatggaatttggcatgagacctcagtttgaatcctgactctaccatttagcttaaatggttgcttctaggcaagttgctaacctctcttagttgcctcagctatagaatgggtataataaaagcttgttttttcagcctcaygttcatgttgtgaggaccagaaatttaattatatcaaagtattctgaaaattagaactcacatttcaaaaaaaaatttaaacaaatcagactatgggaatataaattagttcaaccattatggaagacagtgtgacgactcctcaaagacctagaacaagaaataccatttgacccagcaattccattatgagttatatacccaaaggaacgtaaatcattctgttataaagatgcatgcatacgtatgttcactgaagcactattcacaatagcaaagacatggaatcaaccctaatgcccatcagtgatagactggacaaagacaatgtggtacatatacaccatggaatactgtgcagtcataaaaaggaacaagatcctgtcctttgcagggacatggatagagctggaagccattatcctcagcaaactaacacaggaacagaaaaccaaacaccacattttcacttacaagtgggagttaatgagaacacatgaacccagagaaaggaacaacacacactggggcctgtcaggggtatggagggagggagagcatcaggataaatagctaagcatgcggggcttaatacctaggtgatgggttataggtgcagcaaactgatgggttgataggtgcagcaaaccaccatggcacacrtttacctatgtaaccaacctgcacattctccacatgaatcccagaacttaaaattaaacagcaacagaaaaaaggctgaattttaaacagattcctgaactagtggttcacacccatcagctcmttcaacttcagcacctgtcttgtctctagtagcttttccagaaccactaccttcaccatgaagccccatgccctttcccaattcaaacttgggcttagcatttttacttttctaaccaagacatcatggaaaggataaatagattagcaagctgttttaatatattttgcaatgctgtccgaagtcaatttactggccacttctttcaagtcatctgtcttgcagtttttgggtcatggtttttatcattatctcctggatttggcagacctgttggtgctgagcataagaagtcttttgtatctgattgttgtactttttagtaaaaccaacacagaacagatgaagcaaataaccatcagtagtcttgacatcaacatgaacttcagtaatggtctgccatttttttgaccatggaacatattttgtcactggtaggatccatgccatgaaagttaggcagtttttaccttgttcgtcttcagtaatcagcctgaattttctaaatgcaacttgactgcagatcagcaaggctcacttcaaacacgcaaacccttgaggccatctgatgcaattttggttccttgagtcctggtgactagtgtctttccaatacttcttatattgaatgtagctgctttcacatcacactagtcggtcttagaaaatgtatctaccggctgggcatggtggcttttgtctgtaatcccaacacttygggaagccgaggcaggcagatcacaaggtcaggagatcaagaccatcctggccaacatggtgaaaccccgtctctactaaaaatacaaaattaactgggcatggtggtgcatgcctgtaatcccagctactcaggaggctgaggcaggagaatcgcttgaacccaggaggcagaggctgcagtgagccaggatcacgctgctgtactccagcctgggcgacagagagagactctgtctcaaagaaagaaaaaaataaagataaaaaaaggaaaatggatcaacaactttcttggcttcctttttgccactttttgtaaggcacttgttcttggcaactgccgtgctgctactgaaagagccaaaaggaaagaaagtgcctcaaatgttaatgtatatggcatttggcatatacagatatatggcataaatgttttcctcttattgcctttccttgccaattcttaactactagttttgtcattacacttgacacgtctaggtgtcactctttaattttcattctccctgaactttaatttttacaagtctatggtaactttctcttcagtgtttgtaactaccacatttctatagaaatcttagggtgatctattgagattcttcacccttcatttctaattcctcatgatactatgcaagtgacaaaaaggtggcttgtgacagagaaatatgatatttaaataaaatccttagaatcaaaaaagtgcctaagttaacaactttttaaaagggctattttaccaactccataattgacattctgtcactgctyagactttatttcattcctgctcaactcaatatatggatttttatacaaaccatttaccaaccactagacaatagcgcctctggcagatcaaatttgtacaggtaagttgtttgttatccacaggagagcttcattgtatccttgggacagcttccgttagcagcccagagtgagagttggtgacactcaaaaactcaaattattgatgagaacatcccaagtactaggaagaatttaaaattaaaccttttaagcctgtgcagtcattatcacattaagcagggagatggtgatgggtcataaattggttttccattttacttaaacaggacctggcagaatgtaaatggaacctttgaagttcacttatctcatgataattcttcacttttttttttttttcgagatggttatgaggttgaaactttagatctctaattgtttctgttagattccatttattggaaaaattatatttcgaggatttttcccccggtttctgtatgccttccaraaacccagggacttcttgaaattctagttttcctgtacaggttgaatctccctgattttgaattagaaaattcaaaatctgaaatgctccaagtttgacactttttgagcactgacatgacattcaaaggaaatgctcatttggagtattttggatcttggatttctggattagatatgctgaactggtaagaatatgtgatacaaatattttaaaacctgaaaaaaatccaaaatccaaaacacttctgatcccaagcgttttggataagaratactcaacctgtatcggtttcatgcaactttttgaaatattagagatttaacaagtcatgactcacttcattgtctgtatatcgtaaatgttaaaggccaggcacggtggctcacgcctgtaatcccagcactttgggaggctgaggcgggtggatcatagggtcaggagtttgagacaagcctgtccaacatggtgaaaccccgtctctgctaaaaaaaaaaaaaaaaaaaaatmcaaaaattagccgggcatgatggtgtgtgcctgtaatcccagctactcgggaggctgaggcaggagaattgcttgaaccttggaggtggaggttgcagtgagccaagccactgcacaccagcctgggtgacagaggaagactctgtctcaaaaaaaaaaaaaaaaaaaaaaaaaaaaaaagttaaagtacggtttggtgtttgtctttctttagacttaatgtacatgttgaaacatcagtttaagcagtgctttttcttttttataaagcagctgggatctgacttttaatcttagcatattgtttataaacctctactagatgacttacaagtttatctgagtcatctccatgcacaccactcatcttcctgatcttttcttataaggaaatctgattagttgcattagaagattatgtacctgcctcagttaaatgggatcttagattctctatttttggagatatgatagtcctccactttttgccatttgagaccctctgaagagtcttcttctagcatgactctattctactcaaaaatctctttttwtctttctcttctcttcttttttcactttttctgaggaacgagttgtcttctgctatatcaagcgaagctccccatttgtgtttttgattataaattctccaaattttctagaatcttgctccatgatcccccacctaacccaatccagccctctattaccataagatacttatttacttccccggcatggtggattatccctgtaatctcagcaccttgggaggccgaggcaggcagatcacttgaggttagttcgaaaccagcctgggcaacagggcgaaattccatctctacaaataataataatataaaaattagcctggtgtggtggtgcatgcctatagtctcagctacttgagaggctgaggtrgaggattgctggagccagggtggcggagattgcagtgagcctgcatcgcacgactacactccagcctgggtgacagagggagaccctgtctcaaaaaaaaaaagatatttattttctctatgtccactgatttctttctttctacttacaagcatgctcattctctccttatcctaaagaaaccttccccttacctgagatcctctcaagatactcttctaccccaagtttatccaaacagtaggctgtgttccttttctctactttaaccacccactgactctactctttctcttttgaatattttttgcctcatcattctgtgtagaacagtgttttcagccctggttggaatataatcatctgggttgcttttagaaacttctaatcctttgtttccatcctgaaaaattctgatttaattggtcagtgataagtcttcccactgataacttaaaaaattaccccagaagactctaatatgctttgggttgaggaccattgctctaactcatcagtataatacctcctaaaggttacatcaacagatttccttcccaatatttacccttctaggtttattctttcaaagtaggagaaaacattccctatgcccataaatattcacggttgaaatagtgcaccatatttatcctcccacctttctgactgctcattgtctttgtcctcttttgactggtcttcccctttcctgttccaaaaatactacttctgccccaattattaacctgggtagttgttctaatctatgtagtctagagtaatgatcttatttccttgcttttccattatgtttgtgtaatatcaccctactctttccccaaacccagaatcctcaaaacaaactgccttctggacacctttttacatatatcattggcattcttgtccaaagaagaacctattgtcttgctgaaattgtttttgttttttctttctagctcctgtttcttcagccacctatgccataaacatcatatttaaattttatctttctttttgtcactaacagttattatctaaaacctatagattccgtcctatacactgcttcttaatttgctattcttttagtattcctctagtcattaatcatattctggctgcayatgtacaattataataacctagtagctggtctttactatgtaccacacactgctgtcatattttcaggcacagccccaatcttttcactgtcttttaatgtgttctatggctccttattgactgtaattgaatccaaacaattaggatgaaattctaggcacttggtaatagttctctgccagcattttcaatccatctccatcactcttctgcagagactctatgctgcagctaaactgggctgcttgctgttccctagcctttaaacttttttttttttkgacatttcttttctagtataaatgttcttttttcttatgaagcttattaattttttttctgacccccttaggcaggaaaatttttgccttgttctaggctatatagatctacctcatgttattagacttccaaattcagtatagaactggtagcttaccgtttctagttgtttgtatctcatttaaccaggatgtgtttgtacattagaagatggcttgtggctgattgtgatgtatgtgacatcctgcgacctttgtgtagcagattgttttttccttcaaactatacatgacamagaagaggtttttcaggtttgttttgttttttaattaccatgtttttgtaggccagaggctatcttcacagcctccatgatttatggaatatgccattcagactttcagttaaatgacaaaataaattccctagaaagttggacccatatacttttagattcttttaactttgcccacttttttgtgcctcttgatttttctttcttttttttttttttttttttttttgagacggggtcttgctctgttgcttaggttggagtgcagtggtgcaatctcatttcactgcagcctctgcctcctgggttcaagcaattctgctgcctcagcctcccgagtagctgggattgtaggtgcaccccatcatgccaggctagtttttgtgtttttagtagagacaggatttcaccacgtgggtcagactggtctcggacccctgacctcaagtgatcctcctgcttcggcctcccaaagtgctgggattacaggcgtgagccaccagtgccgarccctgcttgattattaaatccaaattgtcctcctgctatcttaaaagaaatgaaatttctcagtagtagcaaacaatgtcaatctatttgagaccattaatgactcatttataatgtcaacagtcacatgaaggctagaaaaattaaatgtgtagcctcattacctttgtggttagcatttcttggaaatagcatggtgcttacttagtgcaacattgtaaaagacaagaagaattcctttggagaagagctttatagttgagaatgtggataatggaataacaaaatgataacttcttactctttgagctgcattctacgagacattctttgtgattagctatcagactctgcatgtatgaagaagctcagttgttccagtcattgtgacctgtttttcatagataattttgacatgtatttttggagttttgaaaacatcatttttagggaatatgatttaaaatatttttaaagtagtaattattagaaattatctaaactattagcttcttctaatttgaagataatgttacatctccaaggatactgcagaaaggagcttgggtaccatgtgaaccagcatgcctgtaagtttcctatcaactccaagttgtgttggtacttccrttctgttcaaatggttatcagcacctgaaatgaatatgctctagattagtcttcctttttatatatagaatacacttataaaatagatggattactttaacagtttgtagctgtgaagagagcgaaaccaacctgcacaatggagactgaaacataacttgagacccaaagtgtactcttagctataaaatgtaatataaatgtaaattatttgttgtggttcaagaccttatactcttacttctggtgccttttatgaattcccaccatggtataggactatactttttctaatagaacaacaaaagacattttatgaaaggatggcattgaagtttatcgtgacatctacctaccttacagaagcacatgtagaggggtttgtgtgtgtgtgtgtgtgtgtgtgtgtgtgtgtgtgtgtgtataaaaagagatttgtttcaggaacttgacctcgtttaawtgtgggatctggctaaacagtctctgtaagatttttgtcttctcaactcatgctggagcttgaagttcacaaggcaggccatcagaagacagagggatcataaagtcagggagagcagtgacaagctggaactgctagaatgggctggaattcatgtcagttctccctgtctccagtcctaatgatgtggatgtcctgtaggagaagcatcatggagctagagaaacacttggcttacacatcagtgaagcagaagggggatccaggaaagttggagcagctgcctcatgaaaagttgctaagcagcaacattaaggctgmagctgctgagtgtctaaaacagactggctactgctttacttccacccttcactgctctagcaaaaatgtctcttttagcccaccctagccctaaacacacagggaagagaattctgggaaatgcagttcagcctggccaagttgcacattagaaagccaccaaagcaaataagccttctgcataacttctctaatatttcaaaagggtagtattctgcaaccagggctttttccaaccttctcataatacctggatgatgaaatttgaggcataaccagtgtatttccttgcatcattattgttactgtggggctgagagtcctatagcatggctcattgtttttaagggtaaaggattctaatgtagcaaaattaagagtaaagaaatgaagatattagaggaaatttctttgaaaatttcatcatcaatttatggcatccagttttgtaatatttcatattataatgtagtttgattcgatgagttaactttagcaagcagaaagatactacaagcatgataatagtaayacttgctaccctcatagaactatatgaaataaaattctactgagtgtaaaaaaataatgttagaacttgacaggaagacttgatatgcattagcttgtgcactggaagcaacaagtaagcatatgaccctttgaaaactgtaggaccataaaattcccaatttttcacacattttatatatgagtctgcatgaatgttagcatgtacattaatactaagacctgtcccttaaacttcaggttcttgatcttttattacctgctgggatggcagaattgcttcataaatgtagtccatcttcatttacatagtgacactgctcaggagagtctctgttaaaaaaattatctggaaacactccaacactgttgggcagtttcatagtttgctggttgtctttcattagatgtaatctaaccttctttcccacgatgacaatataaaatgcttcagaaacacacatctcagcaaattgcttttcctcatgacaattatttgtccttctaattaacactattcagaatgagatattttctgagaaacaaagtcccctttctcactcccccttataataataattgcatctacttgtatacagagagtttacatatgtcatttaatgtgatcctctaggaatgatggccccattagatagtaggcataggttctcatgggaatgatgaccctgttcgatgagtaggcagatattaacatcctcacattagaattcaggaaaggaagacactgagatttggaggtataatagctagagtggtttctgtctgttacagtgagaccctatttgccacttttagtcagtttcctgttacttgcagctcaattaacactggtggaaacagtcacatacagggtaaatactggagctagaacttaaatccagcccatctaacaataaattcaaagctctttcaattatcgcatgygtagaaagttggtaagaactagagttcagtttctggaagatgactgtctacttttttatttcatctttctttactcttcactttgtctcctaaagtagctccccagcaggtatcttcatctctcttcccgttcttgcctctaaacacaggtctgttcttattcataccagcttgtctctccccaccaggcctgagctgacctgagcatgccagggcctctttctacccactgttccagccctgctgctctcctgctgattatttgaattatgtttcaagatatagcttaaatgtaacctaaaaaatatgaaacctcccattttctttctttagttaacataacacctcgctcctgtcataattattgttcctatcacatggtatcataattattagagtgtttctctccactaggcaaagacctttctagagagaaagcctaggtcgtatctggccctgtattctaccatctgggacatagttggcactcagaaaatgtttcctgaacttctgaaacattgagtgctctaattgaactatgtgcacagtacggtattacttttcagaattaggtcattcaaaatcctaaagatatttttcagctttcatttctgagccttaaatttaaggtacctgaactaacatttcactaaggcatgtttgaaacccatattatggatgrgtrtctatgactttatctgatgctttttatactgttgtatagattgtagtatgactttgtttctcagtaccttccagtgatttgtttgccatttgctgatctggattggtgatgtagttattccagagactagctgattacagtgccctcagggactgataaagttattttaatagaaatccatttgcccttttatgaaatgaatgcccccaaagtctatagaattgtcacgttgtagtgaatgtgctgttgttgttattataatacactttgtaggtactaaactacttctgcggctgcttctactgctcatcgcaccatctgtgttgaataccagtcattagccctctttttcagtctgatgattttttaaattcatttttcctttgaatccattggattccttctcctgtcactttccccatgcttcttggattagacaacactaacaccatttttagggctgttgctagctagcccttgagaaagtcccgtttttagagatttctggttacctttagcattgagaactgctcctgcttcatttatttcttcttagagttttgctttaaaagatacagtaaaacaatgcaacatgataccctggtttaccaaggtcttcttggctcctagagaaaggatttgcgacaactttactgaattatgtttgcttaaagtgaactacaccttgatagcaatttaagattctcaacatrtaagatgttattagtattccataaaacttggatttatgagaaaccaaaaagtttaaagtattttagaagtatttttaaagctagtttcatatcctgcagcaagaaaaccataaatttctctctgacaaaggaatcagaatctgttaaaagcatttgtcagtgatacattaatattcacgatagctcatgcaatattgcttagtttttggtttgtttttccccccaagttgagactttgaatacagcagcatttaaaagggaacacatgtagctcgaaaggatgtcaccttcattcctgggttgtgcatccccctggagttgttgacctggaagttctaatagaatatgtgttaaaaatacgggaaacatattattttaacatcaaaagaggaacaaagaaaaagattgtttttgcttttcccaactgccctctggtggcaaaggcacaacagacagcaaagacgtttaacaaagattcttgctgtgtaggtgctgctggtggttcttamgaggctcttaaaccaaagtctgtactgtacatgtgtgcttctgaaaaagaagaacagaatattgggtctcataattayattttacttcccagcrgcatctgttcttatcatagtagcaccaggctctactagctcagtcaatacttgtatattaacaagagacaatcgatagaaaaattaaaaggaaaagtcaaggtaattaggctaaagctgctgcttatgggttttcaataattactttagcttcctcttgktttcccatctccagaaaaatagggcctgattgaaggccctgattgaagggcctgggtcgtgtttgactgaggacatgtcaaaattatacaaagccaagcaggaaataaaattaagctgtatttgttttagagcagtaaaaggggctttgcatgatggcatgggaagaatagatgttgatttaaatgtaccccttagcagctgtgccattgttggtacctgtttcatgtcatcagtttctgtactactggcagtagcccactcaaaagcactatgacatgtcatgtattaaattaaagctccagaggaagatagcgaatggatttctccccaaaacatcaggatatgtttggaaactagatgccatcctttatgaaaccatgaaattagtcaaaaccccccccmtggttgccattgtgggccatacttgggccattgttctttatggacataattgctagagatcactgtccrtttagtgaggcttaatcaacaagccacacacattgtgtgaaggagtctaatctttggttttgagctacttgggtgttttcgtgccctgatgctgtgaaatcttctaaatacatcagagccaccctgcttctcactgctgcttagtaggttggtgtgtctgcctcctaggggaaggagaaaaccagaggatttcctagttttggagagagaactctgaggaggaaggataggctactgagagagagatttcattttttatgttcatttacagtcttcatttgcactatttctgtcagctcaaagtactttataaactttacaaccaaattatgtaccaacatcatttcattcattgctgatatatagctgttaaacatctgccaggtacacatttcctggaggcaaaaaaaaaaaatgtggaagagaattagatcttgttaaatgttcagagaaaatgtagatatggggcatattatatgaagatatttattgagcacctatgtacaaggcattatagaagacatcttaggtacaggaaatatagcaaactcttaactctgcccctcatcaccrctgcccccttgaacctcccctccttccctcctaagtttgttaatcaaaagtgagtaatagagccaggatttgaatccaggagagtctgatttaaaagcacaaacctttcattacgatttttacttgatgtttaaaagaaagcctctctaggggaagaagaaatgtacgaagctggtattaactcagtgaacccaaaatctaactgatgatagagttgttggtttgggagagtgagatagaagagtattgaattaaatgtacatgcccaaaggcattgaaaagttaagatgaggaagcacagatagtactagagctttgatgagaactgttgttaattatttttaatgccacaaatggctttatattattccaccactggttaagcttgcatgtgtgaatccctgctgtctgtaaaacctccagcaagtaaaacctttgctgattggtgacttggctctgtcatttttataagactgtaccgaggctcgcagaaaatgcttgattctatacaccctttagctaaggccaatgaattgcacatgcagccaaacctggacaaagctgatcgctacatttttgctgctttttgctcatgatcccaagcgtatagaaggttctagctgatgatttcatggtgaaactagtacataataagcatttgtgttttttacttaaaaaaaagttattccaaatgcataatcacttctggatcagcaatgtctagaaatttgccaaggagataatttttgaaagttcactttttctcccctttcttgatcctttttatttaatcattcccaggaaaggttctttctactgctctgccttttttcttttatttttgttgcttccrttgtcactccatattttttgtctttaccgttttgattttcaccctatagaaagtttgtgtgccaaataccaaataagaatgatgggatattatgcaagcactaaggcagtagagtgtagttatgtaataagagcttacactcgagtacagctgcctggtttgaatctcaactgttcttttaattaattatataatctttagtaagttctttaaacttactgtctaattttatctataaaatgagaattatagaagtatctatcttctagcattgttatcaatattaaatgactaacatataggaagtattttgtacacagtgttctataaataaatgttaacctatttaataacaaaaacttattaaattatgtctgtaaggtatgtgtaatgatacagaaaatgttcatgagagaactttaagaaacaggatataaagtgacrtgatcacagctattaaaacaagcatttaaacatttttgaaaagactggaataaaatagracaaaatattaattatggtttattttagaactattgcctcctgttactcttttttttttttttttttycctgtttgggttacttatcacaatccacagttatagtattggtctatttagttggttttgatggtctctccttctagcatgtatgttttaaatgagaaaggactcaagtcaatctttttctaccattatatattgtgtctaatgccaagtgtctggcacaagacttctcttcaataagtacgtgttaagtgaatatgtttacctcttacttttctgtgtttttcagtcatattaacagaaaatccctgttacaacattttttaaaaaggctatttttaaaacattagctcagctttgttaaaggcttaaaataggtaaccttaaaagtattaccctatagttcatggtaaagtatcaaagaagaagaaaaaatttctcatattacatgttcacttgttttgttttgtttttagaagtgkccattccaactcacagcctttatttattttaamtttttgatgtttttcttgttagcttttaatcagtctgagaaaatcctaggtatatttaattttcccctattctgttttacacaaactaaagctcttcctttttkattaggatagttagtttcaagtgacataaagaactttcgttactttgctagttaaatgttaccttaaagccttattgtaggtgaggaaatatccctttttttaattccaaaaattgtagcatgattaatgaactcacagattcctttagtggtttactctgtgttaattatcccagtgccagagtttctacctagtatgctttgactcactgggccacagtgcatttctgcctaaggctgggttacatgtaacttacctgcagatatgccagtgagaggaatacgtgtttctttgccagagactttgctttccagtaaaacttggccttggcattcgttgttgaggttcataaggttttctgttagctctgtaattcagtgctcatttttaaagatgaaacttcagtgaaataggattgtaacgatacacacaggttcatacagagaaaattcaaacagaatgcagaaaccttctcatctgttactaaaaaatttcaaagccagagatgcagcccatctttctcgtgattcctcattcaactgccagactgacagcaggaaattctaccatgatccttatgagtcagggcagmgttttctcttttctaaagagggtctcactgaaggactttagagaaagcaaaaacaggagatgagagaaagagagaaggaaataacttgaggaaagtcagaggttcagactggtrtttattgactgggtaatactagtagtacaactacacctggggaatgttaggaattaggtccagacaaaaggtatgttgtttgaagcagcacttagaaaaacatccacttctctgaatctttggttgaagtgacgtaattagatgtgcataatgaatcttccagtagcattttgttactctgaaggtctgagacttttctgagcccttaactccaagttggtagtatcttcagttttctgaaataccatgctattattgctctatattaagatctgttgtttaatataatattggaaagtattgcagcgaacacacctaaaagtaattactattgaaagtaatgtagtccagaataaagacaactgtacgctgagtagaaggaataaatggtacaggttgaatttttcttatggcagtggtagtactgttggggatggtggtcactatcactgttattttatttttcttacagggaataaacttggcatgtttaacttgtggttagaacgccaagaagactaatattatagtatatagtaacatttatttaaaatcacactagaaatagtcatagaaattgatatgctgtatcaaatgaaataatttgtgaattgattttgaaatgcgtgtacattgaagtgtatgttggtaaaatgatgatggtgatgtacctttctgaccttggtgtattcatttacccttgtcaaaaaataaaggtgatttgagctgttttgctcctcagaggatccaactgaccatataacctgacttcctagccactctgttgctccccgctccttcatccccacgccaacataactgctcctattctgagacagtgttttaaatctgtattattcagcaagaaaaacacaacagtcagggagaatatcaattattttcttgcctatccgtaccatcacataattgcaacatctacatcctgatcgaagatttggtctttcagattcagaatgtctcattagctttttgctccctgtctcatactgaaaaaggagaatctaaacagtcacaaagactagcagaccagtagattttctcttcccgkgggcatatacctaaatctttgtgctagaccagccctatttgcagatctaagagctgctggtgtattatgaccagagacactgcaaagcctgtattgcccccagatttttgttttcactgatcaattattgacctgtcatctttctacctggcctaagatttctaccatgatagttaatactttggcttagacaatgaacctgaggattttttttcaagaatgatacagttttgaagaaagaccttagatcttagaactctacagtgacccttcttcactaacacactgtatcagtaatctaggagagtatgagctaggcaggtttcaacatggggaaagtgaagcctatcaatcaatgagccccagggatgagaggaaccacatgaaggcccagattgcctaggcattgcagagttgcactggggtccccaaaattactcccaggtttggagattcactagaaggacttatggaaccttagcatgtaattttatttatggctatgatttattacagtgaggtagtaaggttactcaactggataacaaggggaaaaagcacaggtgttgaggtctagagaaatccatrtacaggcttcctgtgctctctcccttccctgagagggtcatatagagcacagtcttccccaacagacaaaaatgcagcatttgcgagagattcagtgcctaagataagggasttgtcacctggtcacgtcagcaactctctcactagcataaaccaaaatttcagacttccagaaggaaatcaggtatttggcataaaccatgttatttgcacagtctagcataggaaactacccttatcagtcagggaaaggtaagctcacttccaaaaccctagttcccaaatgctactccaaggccaaccttgcagacaggcccttcttaagatagcagcctcagactgcacaaagataagtacttggcttcaaggatttcagtggataggcaacatgtaaaaataggctcaggagcctggacagttgctgcctgttttcatacatgagagataaatacttttgtgcttgcattcgtacatataactcactattagtaatctaagggaacttcattacttggaaattaaattcaggagatttwggtgccctgctcttttgtttgagaatcactgccctctgtgataggcttttcactggagcctgaagggatgatggaaaggagagatattcccccagatggcctactttacaattttatccatatctctgggtcctgatggatggtggcccatatttaaaagctttccgcataatcagaatgaagaactctaaaaatgtgacttaattgttttgagtctttttttttgagccagagtctcactctgtctctcattgtggagtgcagcagcatgatctcggctcattgcaacctctacctcccaggttcaagtgattctcatatctcagcctccggagtagctgagactayaggggcgcaccaccacactcagataattttttgtatttttaatagagatggggtttcgccatgttggccaggctggtcttcaactcctgacctcaggtgatccacccactttggcctcctaaagtgctgggattacaggcatgagccaccaggcctggcctgttttgagcttgttcaatctatgtcataagtaaacctaatcttgttaaacttcaaaggaataatattgtgtytaaaatttcaattcaagcactgagcatgatatgaactagtatcttaacatcaaaccaatggtcaattatttttctaagctaaattgcttctccttttacagtaccttgaggttcagtagaagacgaaccctaacacttgtttaagatattytgctctcccttattgggcttcctaaaggtggttggcagtttttttttttttttttttttttttttttaaccagtggattttggtgccatgaactctaagcagataagccactgagaccaaaatgggattgctttaaatttagcagaagtgaaggaatggtacaaggcctaatgtgtttttcttgggtcataagcagagaagggaggttgtatattagaattatctgaggactcagattacatgggcttctgtttctccactacatccacttcccattgtctcctttccctgaagactctggattctgtgtgtccttaacagtgagccattgtcatgatcatggatggaaatgtgcttgatatttcaagcatatttagatctcgatgtgtttaaggatcattgacctgaaacacttttcagggtatccattgaactccatttccttaataggtcttacactcttttggttttatatggwgttccctaatcggagattcagagcaccattggtagctcactttcttctgtaatgaatatatatgtaaagcagaatgcctgtggtgcttcatgctgtgaggaatccagctttaaaactatggtstaggtagtgtgctgctagagaacgtgagtaactgttgtgtgaggggattatggacttgtttttaacctttttttttttttgaaatagggcctcattctgtctcccaggctggagcacagtggcacagtcatggctcactgcaacccaaatctcctggttcaagtgaccctcccacctcagcctcccaagtagctgggaccataggctcacaccaccatgcccaaataatacagtttattttctgtagataggggatctccctatgttgcccaagctggtctcaaactcttgggctcaagctgtcttcttaccttgtcctcccaaagtgttggggcttacaggtatgagccactgtgcccagccttgaacttttttgatgggaaaacttacaaagacccatttttggagaagataaagtttcctgaaatacaagaatcacaccacttggacagacgttgtttgtatttcacgcccacacwagtgtgttagtgtggagaaggaccattttggaagaaagtactttttcctctgaactggtttcctgaatccttttgagtttcatgttttatggaagaccatcaaaatatttggaaggccagcttatttcatggtcacaaaggcagctttaattgcttgcataaagttggagcttgtctttctccttttccaacaaagtgacatttattagcaattctctggtagttatttgtaattgcactagtattcaccattcccaaatgttacaattaaatcatttgagagtctagtcacatttctaagcagatgtaccaaattacagctcaagacttctgcttgaaatctacaaatccaattagtaaaattttggggctgggaagggttagccagggaaagacctgagaaaacacatagcccaaaatagtttgaaatttccttgctgctttgcctccacccaaagttgatttgtcagcatgtaagggggtgttacatcttttcagaaactgcttggttttcttttcattcaagtttaattggttttcatggactgaattgaagcaggaaggcataagttaggtagatgatgtaagtgagcaaatctccatgtatagcagcatcttgatttgggtgtttgttctttgttgttcttttatttctgtcaaaaccacagcttcatatatagctctttttgtcacatgagtttttacgttgtcttaaaactgtgaaacagttacatytagttttcctttttatcttgattcaagagcccttgaaactatccttttacatactattttttttcacttggaacggctactctattatattctctgaattttctaatttattttcttcaagaccagcattagccaggtgttgtgacccatacttataatttcagaactttgggaggccaaggtgggagaatcgctagaggccaggagtttgagaccagcctgcacaacatagtgagactatctctctaccaaataaataaataaataaataaataaataaataaataaataawtwatctgggcactgtggtatgcctatagtcctagctacttgggagaaaaaggcaggaggatctcaggagcccaggagtttgcaggtacagtgagctatgatcgtgccactgcactccagcctggacaacagagtgagaccctttctcttaaacaaacaaacaaaaagaccattatctaaaatttcttcctctagtaagtattccttttctggaggactcatttatgtttctcagcacttaagaatttaattttacttgttttaaaaggcggactctgtgatgaagaggaaaaagcgaaaaaagcatgggtgcagagtcctaagtttttggacttgcaactgcctttgctgctttctgtctctgtgaatttggtcagatcagttaatttcccagtccacaatattctcatcataaaatgggactaatggtacccacctttctgggatgatgttttctcgtttgcttatttgttctttcattgattcaggatatgcattgagcatttaccctgtgtgaagccctgtgccaacaccagaatgtcaggaaggacatagtctatgctctcataaaacccaccatctattagggaaaatgaacattaaaaaagtggttataagtgtgatcactgtttaaaaacaaaaaacaaaaaagagtgagtacaggatgccatgggagcattaaacagaagcagcaagtagaaaccatcagtctttcttttttgatggggtatggagagaaggcacaagtaacttgactcaacgtgtaaatgttaacttaatgaatgtcttcacgaaggatgaggaaaaataggccttgttttgctgcccttagcaaagcttgcaggtgtttcaccagtctcagtttcccagttcttctcaacctttgaccgctccactggctctgtcagacatcatcccacacagatgcccacctctgatgccatgttttgctaatgccatcctgcttaggcaaagctggttcatttgtcttcctttctctgttatttgatcacttccacttctgcaacaccattctttttatccttatcctgaggaatattcttgatatttttcttcgtcatattgaccaactcttttaaagatcaaagaactcaatcttttaaaaatgtgctttatgtgtaaattatgttctgtgccttttcagcttaaatgtataaatatagaaaacttgatccattaggaataggaatgggaagaagctgaggtaactgttctttccaaagaccaactttgtagtcctcattgtaactgtttattttctgaatctgctaccttactgtggtctcagtgaggcaggatgagaatttattcacctttgtgttactagcattgacatccaaggatgacagacacttgataaaatgttgtctaagtaagggactatattaacaaacatttagggctgagcttagatgatatctaaacaacaacccaaaactctagaaatcagctatgtaaatatctaataggcactgcaagatataattactactacagagatatactgaagacattaaatcgccctaccaggggaggtgcagaagagctcgatgaatgttatactatttatgttaaaggctgacaagaatttctccaggtgaacaaggaaggaagcacattcctgcctgaggagtcaacctgcagaaagcatagaattggaaagaatctcacatttttgcacagctacaagtttctcactgtacctagcatgctgagtgtatttagtggcgtgaacttgaggctggaagggtggggcgaggctggagcctaacggcctgttttacagaggactcagaactttagactttatgggttgtggaatgttgaaggagtgtaagtcaaaatgatttgatcagatttgaacttttagcaggtggaaaaaagggaagagaaggtgattataattcttctaatgtgccaaaaattcacattctttatatatactaactcatttaatcttcacatctttgatgcccacaataatgtgtcagtcacgtagaggatgttttgaatgggggcaaaaccaaaggcaacgaaagtagtttattataataccctggttgagaaatgatgggtccttgaaatcagattgtttcagtaaggctgagatgaggggttttgtcacaagaattgacaggtcttagcctgttggaggtaaaggggagggagaaggccayggtgatcccccaattctgccctgggcagctggcratggcagtgcctttctctgagctagagactgagagcagaagcagctttctggagaaagatgttaagtttaggttcgaatttgtggcatttgaggtcccaaacaaaaactgagaaggaatacgcttgttagttaggaatgcctctcaagagctcaaagggctatcagtaaaaggtttatggaagggagttgttggtacttgggtgctagctggaaccatgtcagtagtggaactatggaggttgttaaataagaagagaactgggtgacactttagggaacataaccatttaaggaatggtcagaggatggggactaaagggaagattctactactatatactgttaacatttttactgtgataaaatcattagccatcataaatgtacagtattgattgattatatgagatgctctgatgtactatgagctatgcatatgtactgttttaaagtccaacttgattttactttaatgctaacaaataagacaaacatcacatatttagttaataataattttctttctgtcttagaatttagaagggctaagaagtattacttctaagatgtggtctaaagctcttcaaagggactaaattgatgctttctttttctctacatatttgcccttgctctttatgaggagggattgtttgcattttcccacagatctgtaaacatagttttatagttgctggtcagtgaatgcgtattgatgatgttcttttccctacttaaaacaaaaatcttgccagaaatgttgaccctacattttttccaacataccyttctctatcaacttagtctatttaaaatataatgaaaagctgagaaacaggctaaagaccaacagaaaataagtgctaacaaatccttcatttaccagttttatttctgcaagacttacttgaagttatataaattcttcacactatgaaacagttagtaaaccatttgtttatatatgtgtgtgtgtgtwtatatatataatatatataatatatatatwatatatatawtatatatatkatatatattatatacatattatatatattatatatatattatatatatataatatatatatacacatctcttttttttttttggcggggggacagagtctcaccctgtcaccaggctggagtgcagtggcgccatctcagcccactgcaacctccgcctcctgggttcaagcgattctcctgcctcagcctcccaagtagttgggactacaggtgcacgccagcacgctcagttaatttttgtatttttagtacagatggggtttcaccatgttggccaggatgttctcgatatcctgacctcgtgatccacccgcctcagcatcccaaagtgctgggattacaggcatgagccacttcgcctggcatcgtttataatttttaaaaggtctgtagaataataacagtaacacctaattccatstgctgaatgcctagcacactaggttctgtgcgcataggtatagtacatgtctcctctcatccacagaactatgtgctcaaccaccctgagcctcttaaaccatttccaagatattcctgtttttaatttcttcgtgtctagtgtcaaggtgtaatctttgatctaaatagcttgcttttccttctctctgttaacctcttcatcctccatgacttagcttatattaccagagtctgcatggtggctgtattctcagtaagatcattgggaaaatagtctgatactaatgaaatatttgaatgaagaaaaaacatcatgttctatcccaacataacktcttttagttccataccctccagctcttttcctcatgcatgtgtattcttataaaaccacttgtactattttgtattctgcttttctcttacacagcatattttttcatatttccatataattttcataattatcattttcatcataaaagcaatgttaacccattacagaaaataaatcaaccataattactatcttgatgacacttaactgctttttttcccctaagtactcatgttacaatttaaggtaaagggtgggggtatttagctgaggaagcctagactgtcacttttaattttgataatgttactttttcacaagagttccttcagattcacttaccctctctgatctttcattatctcacctgtagaawagtgttgagcttgatcatctgtaagattatctcaaaagtcctgttaagctgtaactagtctgtgactctatgatactctgaatgttataatcctctctaatgttggtaattcttcacctttttgtgtcatataccccactgagaatgcggtgaaagttttgaatcctcctccatttaaaattgccactctgcacaaacacatataatgtttcatgcaataccatctggggatcaagaatcttytgccctaagcacaggaaagaaaaatttatggaaatgacatagaattcagaaagtattccccacctaacaggtgggagamwttatgtggcttattttactctaatattatgcaaccaagaaagtagaaaattggaagatattctgaaaagcatgtataaaacacattgcaaggttacataaaatagtgacaaaaatgagttcaatatatctggatctgatctgattatttagtttaggagaatcgctgttgtcaaagatggtgactctggaaatgctaaactcaggcttctagaatgagaaggggaaaatgggcaaggtcacgatggtctagctgctttttaaaaatatgtattaagggattgaatatgtttcctagcttcactgtatattattagaaaatctatctgtgaaattggttgttcgagatttcgttttctgtgcgtaagtggctgttcagatgcttacatgctgtcttaataccgaagatgccatccttttttccagggccctcttcttacatgggaagatagtggatcctactttaaaatgcgattatagtggggaaataatataatgttgaatgtgagccattgaacacaaattgcattttatggctatagttaaatggctcaggattgttctgctgagttaagggaggtgggaggaagtagttttaggaaaaaaatatgaagcatcttacttttaaaaaaatgcagattgtgtttgctttgtgattttgatgtttaaaggagtgtcatgagtatgcttcagctttggaagtgtccaggttgagatgagagagaggaatgttagacagcccttttcctgagggattctgaagtcaaaactacttggtggattcttctgagagaggcctatgccgtggaatcccaagttggattaaattatggtgaaaaaaggacaataatcccacagtgggatatcttccattgtccgtgcaaaacccttctatattaacattcttgcaatactgcaggactggataaagacaaggtattcgtatatctggattcacctaaatatgtgtttgttcagtgaccccattggctcctcgtcagccctgagtgctattcatatgacaaatactgtgtgggtgcttctgtgtttataaactcatttaatccccttaacacgcctatgagatagttaccttactattattatccctcatttttaaacagataaggagactatcttaaaatttttaacacaatttgcttaagttgacacaagtaaatgggaaaacrgagctttgaactcaggatgtcgagctgcagaacctgctttcttatccagaggggttgaagaaggatcacattaatggttgcttttattttttgttcagttgggggaattttgaattgctagactatttaggaaaacatctttattgggattattagtaagtgtgatccaggcagaaagtcatgaagctaatatgaaataatgaaatcagtgcatagtttatttattttatttttgtttttgagatggagtctcgctctgttgcccaggctggagtgcagtggcgtgtctcggctcactgcaacatctgcctcccgagttcaagcgattctcctgcctcagcttcctgagtagttagaggcacgtgccaccatgcccggctaatttttgtatttttaatagagatggggtttcaccatgttggccagagtggtgtcgaattccagaccgcaagtgattctcccacctctgcttcccaaagtgctgggattacaggcatgagccacygtgcccggcccatagtttattccttgaattgaatggttacttattgaatgcttatgatatcccaggccctagggacagaaagatgattaaaggctaggtctcaatccctgaggagctctctgtctgggagaagcagatatacaaatcaacaggtacacagagtcacatatacagatgccatgagggcactggggatgaacacgtgttctttgtttcacttatatttcgagaatgcatatatatttttgataagtaaaatagacacatgctatatagttatacactgaaagtgtgtatgtgtacatcatagtttcattaatttttcttgccagacaaccagatgattctttattaatctttgaagtttaataaccttactaagatatagctcttccccctgccccccagagatacagcatgcctttttagtctgtagactacagaggacaaagatcatgttattcataaggggaaatcaagaattcaagtgctttggcagtttcaagtgcttaaggaaaaaaatgctgaaattttgaggtgtctctagagggtaaagaggaataaggagagggaccactatcatgtggacagagtagacagttttaaatgtgatgaatttttttggatttagggattgctccccatgccaaaaaacccctacgggcacacctcctagcccagctaatttaaaacaaacaaacaaaccaacaaaagaatttttttttttttttttttgttagagatggtatctcactttgttgcccagactggtcttgaactactggcttcaagcagtcctcctgcytttatctcccgaagttttgggattacaaggatgagccactgcacctgtccagaatcctttttctcatggaatattaaactaagatattatttctctgagcagtcatcttttaaaactcaagtggatctgggagaggctactaaatgatgatgagatgatgatggtaacattatgatgttttaaaatagtacatagctgcactgtgtctcaggcacagatctacagtggctttccaagtacaagtattatctcacttaaaaacagctgtcctatgagtgtcctcattttgcagatgaagagattttggcttaatagatttacataactttttcatggttacatgactagtaaatggcagagccaggattcaaaccctgatagtatgactcttacccccactgcatataaagttgtcattagatacttgccacctggaatcatgaattgactcctttcctgtatcctctatgacagcaaactgagagaaggtccctgcttagttggaattctgatggaggttgagggaaaagaagaaggagaaaggttatcagtccttggatgttgggggcgtgggggtggtcagagtttaggaaggagtacagtagaagaaaagtaagatgggaaggcattggcctactcacctgctttccagtttgggctagaagcagtctcaggtatgagaaaagaacatgaaagggctacagaaaagaactgagaaggaacagtgtgcaggtgagaattcagttttgactctccacgtcagcacgagtttggccaatgatgaaatggcgtaatgagtgaaaatcccttactggcaaaatcaccagaaagtaaattctgtttttaggggtgctgttgtgctgcttagttccgtgtaatcaggctactctcttgggacagccattgtaaacactgccttcctgataaggatatagcaagttgtatagagtcaaagccaatttgtttaacagagccattcagaagaccctgtccattttttgttcttttaatgaagaaagtaacgttttgaatgtagtgtttatgtatagtgactatattggaatataatgtgtaatgctttcaataaacccagaaacttttccaaaatattgtcttggttcataggatgtgatatggaaggatagacaccgtcttaatattttcccccaacagaatgtcaattcttagagtaggggtggggcaggaaagtgggctataaaatcactggctataaaatcaacttttcccctttgaatctcagaattcagtgtcttctagggcagatctctactcatcatctctacctgatatgaccgcacacgtgagtgcctggcacctgctctttctcttgctctgatgaccacttcctttctgcccatctgttttgacctcgcaccattctggagcttttaggaaaggcatttgtaacaaaggcaggacccaggtctcctggttttcatctccgtattgttttcactatattataaaaccttctttacttaaaaaaaaaaaaaagtttaaatgtagcctagcatgcttaatgtcctatcaggttgatttaaaaggggccttttatctggacaacagaaagttctgtgtaacaaaagtatttccaaggcttaggaaatgctcttatttcaagcaatatttgatacaacaacattctaagcaaataaacagatacatatcaccttttgtatttctgtttatcattatttgacccataacacccagttttacagcttgatggcaaaaaaacaagatggcaaattcacaaccctgcagcaaaattatcatgtgttcagcctattgatgataagtgagagggcaaacaaaccgataaattaagaatttagtattaacaataaatctactggggcttcagccttccctaattaagaagtcttagagggagattagcattctctgttgatgtttacctttgaaattttgaacaaagcattgtaagcagaagatgccctaaggagcatttttggaaaaatcccaacaagtgcatagagcgacacagatgagatgattcaattagcttggataacactatttcttctaaagtatctgaaacagactcatgaaactcataaaaagccttgtattttctaccatatgtgagagtttaagggtgcttaagagcctgctttgaaaggtttgctgaatctctcggtaaaaattattgccggattatatggaaaagagtcaatctatagtattctccaattgtcagtgtcatcatggaatttagaactggaaagagactttagaactcttcatatctgactctttacaaaacagtgaactgatgcgttggctgttgactcagtgaagttcccacggctggctttggcaacagacctagggctagactatgttgcctggaagataaagaagcattcactgctcttcccatcccactgtattgcctggctagtgtttgatcagcttttcaatgtgcggtcaagttgttgattgagctagtaacttataagtgaattatctttatgattgtgttcatttctaaccatgtccctgtgcagtttacgaacaatactaatcataagcaaatactttcacctgggcccaatgatttttacctgtactgaccaagtgaacaacttaggctggcttatgccagtgaagtggtgcttctccctcctgacatgagacttcactgaagtgacttgccaagaagaaatgagaagatggcacgtggagagtcatgtggatgctcttctctgcctcaagctcagctctcacgtgcttgatctgttctgtctgtgtcctttaatataaatgtttaaatgtttaaatgtcattgggtacttggttataggaggaggcagagctctgagtggaatccatgatggtcctgagaccaragatatgtatttttttcttttcatgtatgtatgtcttatatccccaattgagaattctatcactgtgagtgatacagcttcagaatcctgaaggctaagctattaggtttgaacaatatgaaattgctggtttgcaactatattatatctacaaaagggcaagttcatatagcttaacctaaaaagtaaaaatcaaatgacatcaggtatgtgcaaaaatgtcataaatggctggtgaatatataagaagttcaacattactaagagccaaaaattgaaaattaaaataagaaaccttttttttacttcatcaaatagtaaaccaacaattagtcctatactttcctggtttgagcattgattaatacaaccagtaagtatgcaaatatttaaactcagtgtttttcactgatagatatttatatcaaggtgctagattgatatgcatataaatatttttgcacaaatatgttcacaatttgtttataacagcagaaaatggaaaacaaactaaatagcaatagggaacgtaagttaatcatgctgtatccatattacgtagtgttatataattaaaattacataatttattaaaatgatatttaccaagtgtttttaatgacactggaaaacatgtagaatataagaagtgaataatttccgaatagtatgtacaatatgataattgtgtaaaaagctgtaaacatagaaaagaacaagaaaatacaccaagacattgataatgttttgacttttaagaaatattttttcyttgctgttttaattttgttatgcaattaacatctatttttatatcatgtatatattaataattacatatttacaagtgttgtataccgatttataaagtcaatatgctccctggccaaaaggttagcatgttcacatgaaaacatgcacataatgcgtttctaacaagttcccaaatagtgttgatgctataagtctggggaccacactttgagaattactaatgtagagaatcaccatatggggatatatatcccagtgagtaaaacaagttcctggtgtcaacatgtatccattgctactcccccctgccacagcctctgcttccagggtcagaaactcttaccaatggtcgttggatttctttaaaacagggctgagtaccaagtataaatgctgtctcgaagtcaccaggctgtaacaaattaaaattcctgtctgtatccctttcacctagcacagtccatgacttaggaaaaaaatgttcagttgtgttggttggtttatggaatggattaagtggtaaagagtacagttttgaaatcataaaaaatgaattggaatcttggctccataaacttaccctgatgtgatgttggccagattatgtaacctcttgctccccgagtttgctcatctgtaaaataacttcatgaggttgttggragaagtaaatgagttaatacacaagtttttgaatagcacttagtaaatgttagcagctgttgttactgtcatataggattgcttgcatttttaatctttttcaaaaaagaagagttatttgaacacctagccaaaaagaaaaaaaaaaaagattgcaacagcaaacactttcaagagggggaaattatagtttttgttttgttttgtttttgtttttttaatttactagggaaacttgcggaaaggactacaaagaaaatagaattctctgaaagtaatatggcaggttttactggacatttctgcttttagtggctctaacagtcccaggatttaccaactaggagacctctcaaaagcatatgaaagtgtcttagtcttgttttgatttttgtagccataaaaaataaaccacaaagaagcatgaaagttttctctttggcctcagtagaattctttaaccttgtgactttgtccttgtctctttgtgaatggtgacaatactcactcccttataggttagttgtgaagatgaggtgaggaattagcaaggtgccaggcacacagctgattcagtttcaatgttaattcattttatttttcctccccactttgccttctgctcatcctgcagcccacaytcccgtcattttcaaacgtacagaagtgaaaactgtgttgtcactaggattggcaaactttttcaagaagtgctgtaaaagttcacagtctaataatttttctgatactcccaccattaaaaaaacctatgctctaagagttaatccaaatcgtcaaaatatgaagtcctcctttctcttccaggacgagaaggcttcatgaatattttatgatggcgtctctgttgagggatgaatccattcccctcctaggagagttccagcatgctgtgggctgccaggacttagcccaggagtgtggtgttttactgaggcaaaggtgacactggaaattgtttggtttgaggcgttcagttcaaaaactttctaatcccagaagagtgaattaatttcctgtgaggattaggaaacaaactttatatctcatatatgcacagttgccatttaattttctttttaggtaatatttgaaatactgagaaagtttgtagttttaagtatattgggtaacatttctagataagttgttttgccatcagctaacccagctgggaggtgcttaagattgatcaagcttttgctcatctggagaatgatgatgtctgttatacatatgtacagatctttgttctctttgacatctggaaggtggtgggaaggagcaaattcaaaatacaaagactggttttaagccccagttgtgccacttattagttaggtgatcccaaacaagwtacttaacctctgcaatctcaattaccacatcattaaatacagatatgaatcgctaggtaactacagttgtgaccatcagctaagttaaaatgtgagaaaatttctacaaccaatgaagtcctacatagaggtagataggacctctagtcctctatagaggtaggctgttgctgctatctttatgttatactgtttatgaaaataagttttcttttctgtaaartaagcatacctttattccttagggagggtttacactttcattgaactggatattgcatctaatgaggattgctgtttttttctccttgatttcaggatttaacatttaaatgaaagtgatccctgcctgcctttggattgaatttatcactggtttagaataacatgtatgacacaaaatttaaaaagctgaatagctgattctttttgaatgcagagtagatcatattttcaaatggcttgttctcatttaaaaaacccaaggcgaatagaatacctataaggatggtaggcttgggaattgaaagctctatgtgtgtctccagatgtgccctgttaacatggacaaatcgtttatttcttgatcactaaaaccatcatagtttttgtatgtttaggataaaaataaaaagggagtgtggtattttaagatctttgtgtagcatagcattgtgatgttaaagtttatacttgggctcattttagaaatgacctaattaagtcttccttttttctgcattaatcgccttcctttgtattatgatctttcctataaggaagctagcagactgacccatcatttttctttcctcagtgttaaataagaatacatattttaaactttacctgtgaatcatattcctgtctctttggtaatttatttccctactctctcttttkgtactcaaagtagtatatgacttctagatgacttgctttcctttcgaaggacagattacttactactaggagctcatgtaaaatcagtcttttaaaaatatgactttgtccctcctagcttagagatagagctccataaaacgaaagtgaggatgatatctggtaaagttcagatggagctaaagaatcaaaatcaactgaacttttaccaggagtccttagtgaagtaattgattgcattctccaacgcccctccttcaataagatttctgttatttgttttcttttacttgaatatggcttttaggaggcttgtatttagagtttctgtgcttatgaaaaaagagatagctttataattactatgtaagaactatgaagtgggaaagaatacattggcaagacatattacaattactttgtcatgcatctggttatgttggcatatttgtttaattaaattccctgctaattataactgtatgtgcttgtgttaattattatttacctaacactggtaacagtgtaattctttaaaggaaagcaactcgctttctatttaaattaaacttcaatttaatatgcttcctaaaataataatagtgacatttcattagaatggtagttgaaaaatctttatctacctcagtggaatttggactggctaaaatttaacagagttgttttaatatcagattgtaattagggatcttaaagttagagtaaaatggttaacatggccaaaccaccagctgatgctgcacatggttcatctgctgaaggaaacattttcatcctttaaggaaaaccttgcctgcccttccaaacttcctgatcacctactatagaagagagagggaggaaattatacttgacaatgattctcaaagacctaattagaagtgggtctaatatattctctgaagcatttgtttaaaagtcaaattgcccaggtcacttggttatgatcactcacccagatacttagtatatgtgtaagctttttcagggttgcaaacctattcgagttaaaattgaactcccagtggagttgagtctttcccatttcattcacttcatcctctctgtttcaaaattcttctacctctacagatatcttcttcctctcaccctttgtcagacgctagatatttttaaatttcccttacttatcctagtgataagcggggaactctgatttccatagctgctccttctttttgcatgcatacttgcatcttttcagagagtttgactcttacctggtttttttttccttcaatttaaaactacttcctctctctgaaatgccaatctaagaaaatttgcaatttcttctacctagtcactctccctaatttacatcaaaaactttcttttctatcacaagagctggatctttggctccagacagaaacgagtttaaaacatgcctcttcaggtaagttgctaattttctgagcctcagagtccttatttataaaatggggtgctcaatgatgacagccatctagggctagacagaaggtgaaatgacgtaacatatgtaaagcatctaattcatagtaggctccaattaaacagtggccttttatatacacacacacacatacacacacaccccttatatatgtgatgttttatatgtaccatgtacacaccactgagttccttttgtcatattctcacactcttatttcaagagacaaaatataccaacaaatgagacagaagctactaaaagtgcttttcaagctttcttagcagtgaaaagtcttttcaactgcartcttacatgaaaacatatgaaacttatgtgaaacagagaaaggggtaactgctgtccatgaaatacaaggtccttttgtgttctaagtcagaccctgcaaaatcagatagttctgaggtatataatttaaaagctactgaaccattattttgaattcactcacattaatgagtgcccactacatggtaggaactgtgctaggactagacacaaagacaaggcatagtccttcccgtgaaggagttcatagtctggtagacaacctctttgaactcttagattcagcaattctagattcggttaaagtagttttagggcaatatgcatggcataaatggaatgtgtaagtacctaggggatagaaagttgtgcttatccatgaactcatctgagaaggctttctttggtgatgatttgaacagtttgagccttgattgtcaggagcggaaatgaatcctcgtgtaaacaaaaacctctgcaagactatcaaggactaagacagaagactaagaaaccctggtaggaaacaacaaacatattgcttatcacatttatcctcttaaatgggaaagacggaactaggaagctggaaatgaggtagaaggaaagagaaaggaccagttgtttgatgatttgaaataaacattttttattatgaggaatatagatttttttaattaagaaaaagtgcaattcagaaagaatgctattgtccatcttgaagtctttattgtctccccyacaactcttccccagtgtcaactgcgaatgggcaatcaggctgctgtccaggagagagaggccctagggtatgtaaaatactgcagagaaatctactgtgtctacaacagcaactggttctctaggaacctaaaaatagtcaaaacttcttttcaagttcaaactgtcaccaagattagttaaygaaccttaattggcaaaatgaaaatgctgcgttattttttgagaaggattcttagttatcatatgaaatttgtatctggttcatagtaaagtgttatttattagccacactttaatgaattccctaaaatttgttgctgaatttaggagagatgttcagttcaattcaacactctttgagattgactatcatgtatcaggcactgtattaagtgcaagagtaaaaaggcatggcccttcttctcagagagcccatggtctagtgaaggagtcagatgagtaagtagataattatgaaatattgtggtaagtgctatggaagaaatctaaagaacaggttatagaaaagaggatgtcacatcagaggccacgacacttaaactgagtctttcagaatgaatgagaaattaggcagatgaagacagagggaaggatgtcctatgtgccgttaacgtgcaaatcacatacgcttggatgtctgatacttgggccggttaacttctctgaacatgactttccayatcttcattgagtgtttatcacaaaacattgtgagaattgcacrtgcaaatgcaggtaaagaggctactcaatcctggtgcatagtcatttacaaataagttggtttccaccatggcacacgtatgcctgtgtaacaaacccacacattctgtacttgtatccggaacttaaagtaaaataaaaaataaaaatacatagattgttttttttttaagtgttgaaagctgggctttcattgccaaagaaggcaaatgttggtgtttcatagcagctgaatttgccaaccacctacccagtggttaggctactaaagtggaaagtttcattcccaattaatgcaccatttttctcagagactttgaacagacatgtttttgatccatcaaatctttctgtcctggggttgtgtttggtttttattccaattctaaggtctgtctgaacacgctgtgccttgagccatgtagcacacagaaggacaaatgatttcttcttattattmtttttattaacaattgaagggaatagttaacatttaagaaaaaaaaagactgacttgagagaaacttttggttattttctagtgagggaaaaaaagctctaaatgcagtatgtcaatcttgtttcctagataacaaagcaaatctaaaacagttttgaacttttttccttattccctttatcatgaatgtttaatatccaaaggagccaatttttgttgagaattagcttccaggtttggaggctattagcaatcaccacagggagcctcacactccagttctatttcccatcctttttcctgaatcagaatcattttctgtgtagttatagcaagtgcctcggttttgctagcctcatctgctgtttttaaatgtcagcctctgccaagctgaaacatcatgaaagtaatcaaattatgtattaggaaagagtagatcattgcttcaataaacttgccaaaatcaacatgtgtagccatctatacatgtggaatgtcactttgatccccctatagctatttcagtaatgtcataaatgttctcataatcattttataatcataatattagttaactattacattttatcacttaactcgtgctaagcatttagcttgtattacccactttacctgtacaatagttctctcaggtagatgctagagtgttatccaggttattgtgaggaagctaaggcacaagaaattaagcaacttgcccattakcctacagctaacagtcctggattcatacccaggcctgtgtgattccagagcccatgctcttaaatgctaggctacacctccttctttttatccttctgtgatcgttaaaaaagacatgacagttgttgctgtaaaccataatttgatgtcttatgataacacttaactagcttattggtggttttgtttgtaaacattgaaagtaagctttagccaatgcacacttaatcagatttgtattcagcaagtgtgcttttgctaatagtaagccagacattgtatcaggcatcagggtaaacatacatatacatatgtatatgtcccgaccttgaggaggtcatatctagctggggaaacttacaaattgtacataatccattatccacaattccaaattccaaaatgctctgagaaatgaaatttttaaaatatgtagactcatttagcctaattcctgaattcatatgaggccacattatatatagcctttgtttgtacctcttaatataatttttcatacatgtgtttgattatgaggtgctaccctaagctctcctggcattgttgcataatacatagtaaatgccctgaaaacctttctaaaatctgaactttttgaattctgaaatatatctggtcctaagagtttagcagaagggattgtggccatacatgaatggacatgttgtagcccagcaaaaggaatgatttacttcccatgattgagttaaagattcacagaagaggctgcaggcagtgaaactggaatttaccaaagttgttttggcagcctaggcagaactgaagttacagccaaagatatagacttatagagaatctggggagggtatacatggaagacaggactggaaaggcaagttggcaccagattatggaaggcctcccatgtcacaggagaatgcattctttttctatcaactgacaggctcttttctgatttccttcagcctcatttgctgttgtaccttgctttgttgcagtgtgtcatggatccatttggagaagctgatgagtcatcttgtgaaagaaaaaatgaattgaaggacattgcttactttctgtgttgattcaggcctcatttcatcttaaccccctagttagaggacatcagtaatgattcagtctctgcaactcattcctaaataaaattaattggaaagtagatagctctctaataaccatgcttgtttttgcataatagaaggagaaaaggattaaattctttgttctaattaataggaatgaaaatagaattgcaatccgtggtatggcaaaatragagaaaataaggcttgtaagtaattttcatggttgtttaggaataattgtttcattattgagttaatagtttttacaaacagcttccatttccatatcatattgctacagtcgctctttattgagattgcctcggcagaagatgacaagaagttgttttaaatccatcacttgtctaaaatatgagttccaaagtagttaggggagggtatgcagcaggaaagaatgaggtatgggagggaaacagggggtcagattgaaatcagttgattaataagacaacaaaattcattcaccagcttgtttcaaaggagactcttattattctggaaagaaattagacatcagatccctcataggccccaggctctgacatgtgttttataatgacagttaattagatactgtctgcagcaatcataggctgtcatttctaatacatttctgggaagttgaaggacagragaagtcaccccctcctcatattcccccttcccgtaactgaaatcggttgccaaaattaactgtgaatrtatgaggcacgagttcaacaattatacagccgttctgcacatttatgtttcctacttagtatgtactctgcattccaggctggtctgggcatgcattttgcagacagagatgttactgcagccctggtaatatttaggaacatctcacacagcagtctaacacctggtcttaagtggaagatgccacttgtcattgcaacttatgcattagaacacaaagaatctttcacaccattaaattcaaactagcaggcttccctcttttctaaaatagaacttgcaatgcattaactaaagtcatctattctcacatgtgcaccagcacggcacatgtatacatatgtaactaacctgcacaatgtgcacatgtaccctaaaacttaaagtataaaaaaaaaaaccttaaatttgaataattcctgcagtagtacttaacctaaatttttcatgcttccttttatcaaacatcattataacatgaccataaagtataatatttcttaaaaactaagccatgaggtagaaaccatgttgaaatcatagatgttaacattttaagcattctcagaaattctctagtccaatcattttggtctgcaaacaaggacatttgagtctcagaatgctaaagtaatttgccaagattgtgcagtttctgggcaagcctgacttgcaattccattctcctgagttctacgctgttactctttccccttaagagcactacctagtgacattacctgagtaactttgggctaagccctggatgtttctgagcttgagagtcctagtctgtaaaatggacataggaataatatgtacctcatagaattacagtgagcgtcagtggggaagccactccaaagccttcagtaagactccaagcaaccttaygttgccttctgattgcttttatccttaggtgtccctaggtcattgctttcatcccagagcatgcctggagcttgtaagtgcctcctaagggacataagaaggctctcagtgcctttgtgattgaaaaccatactattttatgggccacccagtacatttgtttcttattttagagacatgcccactcaagccatgtgctgaaattcaagctttttcaacccaagttatcataactggtgtctctaggacagtgcttcccaaacatgcttcccaaacatgccagaggaagaattacctggagaatgttttaaaagtacagattctcgctccctgacccacttaatgcccttctgtcaattccccttgaaagaaaacctttagtacaagaagtgtggagaagagtctgttaatctgtgtatttactaggtttttattattattattattattattattatttttctttttgagctccctggacaattgtgaaaaacagccaggttttagagtgcctggctctatcagagcagatcataccatacccaaaatatgctagctttaacagctgctaaaatatctgggtactttttgtgggttctaattaactttcacatgttgggggttgaaatatcatcagtgaactgataatataaatttttggatgcactggcacttctttccttgcacttatgtactcattcatgcacaaagctatccagcacccactgtcaccaccygggctacaacccttctaatctaaatggattatatagtagatagctgctattgtctgtgaagataagcctgctgtctgctaccagtagaagacatgtttgagatttgtttcgttttattttatggtggtagtggttttaatcccctcatacccaccatccaaataatatggctggttttgtattaggccgttctttcttacatctggtttcctcataatcaaagatacagrttttcaaaacacgtagctgggattaaggatatggtgtgtggtactggttattctctgtgcaaaataaactgggatcagaaagcatattaagccataaaacaaggcctgaccttgtatgattctctacccaatgagctaaccagccagggcagagttgggaaggctacaggattgtaggccattaacatccccgaagagccaggctgatctcttgtattattctcaggcatgagcagagagtgtatgcaatagccagttccatatgttactataatggttcacttgctttctaaatgaatgcagcctccttaccagctgtggactcttagtgtttgtaaaggtttaaagatgccccagtaggaagtagaatgacattgaataaagatgttgaaaaaaagaatgcaaccaaagatgacgagatagtatatattaaagttagtttagccagagcccagcacataataagctttcaataaatgttaactccagttgaggttattactattattcttgtgccatcgtcgtttaactcaaattattactgatmatcagtggcatattgactatggatgtgaagcatagaaagttcaagacatttaacttgattttctagaaaacagcagtttaaacaatctacttttttcaagcctaacttcttaccctatttgtgcatattatagtatatggtccttaacttatggacattagttmtgaattcatatttccattgggtttagtgcattggatgttttaggtgaactaaatgggctgtatgaagctcatctctggagtaatttcaagaatcactgaggcttatggataattcacattgtcaattcaaagtttatgattatttttccctaaagactcttaatcctccacccagcttgctcccccgcccctcccccaccactttattagttgaataaataaggatgaaaacatggctaacctgacgaaagtctattctctctagcagtggcccagatgtagggcagtggaatagagcactgtctttacccctgggactccaggtctgcagattttaaaaagagttaactctatggagctataattatggcagtttttcaaaaaggtagacagcattttacatgatttttttgttcttagtttgtcttgtcagaagtgaggaattgcatttccctcctaaactctttactaggttgtgccatgtgccaggatttcttaatgtctttaatctgtaatgtgcctaatctttgggggaaaaggagtagaaatcaacatgcatgaaatgcacagccttcatgtgttaggctttgtctcagttagacgagtgtacatggatcatttgtagcttgtagcatggagaaatgacgtcaagccacctgtgaagccattcatttaagcagtcagtttgacartctcacagggtgatctgcgaacacgtgaccttcttaatctgggtacacaatgtagctctgtttatatattcttgtcttttagtttattgtctttaataaagttagcaagaggataaattagttttatctgccaaatatrtaacaggtgcatcagcaggcatgtctataactatactaaggctatctgggatgtattctccctatagtttttctttgtattaagtacagagggagaactgttgcacagttaaagcatcaaaatgtctaagaaaatgtacaggattttttccctatccatgtctcctgtggggcatccgtaagcctttcattcacttttctattgcacatcctaagagacagttggactgatttcgcactttcagtgaagaaagtcatggcttatagaccatgtgggatgttcttctgtctacattagaagaattgaactttgatgttctctacttttcttcacttcaggaaaggatttctaggagatataagattaggctcgatgctagaaggaaaccacatcatcagttatctagaaggaattgcatctatcttctttttacttatagtcttaatagacttaagatttattgggcattattgggcattctgtagataaaaagcactcttaaagaaataaagcaaaataagttggatatctatttctagctgggctagaaagctaaagcaagtagggacttcaagttgcaagcatgattttaaagaataggttagcaacttaaagatactgagtttttcagtttctttttccaccatctctttattgtcacgagtctattttctaattccacccgggttctatgaatacaaatggtgttgtctttatgttgttgcaaaataaagcaacaatgcagcatcctccttaaagkctactctctctccttttctgatcctgccaacygagatgacatggtttgtatgttagtttcggttccatattaatttattcagtcatttttcaggagttaattgaacatcttgtctcttgttccagacatttggcacgtgttgccccaagcccaattcctttatgtggraaaagggtctgccaaagaaggctaatttacctycttgtgaatgaaggactccagaatgtgaatgatggrttgggatccattgtcagtgtggacacgagtcatttactcttctgtctaattttttagatcatgggtaatttatgaaaaattcaattcatgtttgatttgtaccctcttaaatcatcaacatattattttttaagagttatcaagtgttcaagagctaacatttggcttagagtaagcctattcatatgccaaataatttggawgaagtacagaaacctattgctttgggtcttcaaatggatgatcttaacaaagtatgattctctgtgtttctttattgcatgttatgggccatgaatttgttccctgctttactgatgtcctcctaattgcttgatatctaagaatacttatctgtaattcactgccatattaaaaatacgaaacaaagctgtcctgtaacaagaaggtccatttagccttctgaaaagtaacaaaaatgaaaacaaaaaggagcaggagctttaaatttgttctaaatacaggaccatttgagrgccaagagaattaatttatatttttaaacattattttataaatatattttgttgttgattttttatatttagtctgctaagattatagatttaaaatrgtgagttttaccaggatctttaatgattcttgttgcctatcaagcagaattctttgagcacagtatttatcagaacttctcctgagattgaagatcatgtatactttcttctaggcctgtgcttagtctaagagagaragaaagagaaagagagagagagagagagagagagagaatatatatatatatcaattaaatgtgattgtactagacattttcagaagaaattatcaggaaacgttgttactgaattctatatccaggtctgattcagacaatctgaggatcaccttttggaccacaatgtatagaaaaatacttcctgcagagggttatgtgagaagttgctactctagagctgaaaagggctttcacattcttagggcatttattctaagaaacaggacagtgttatgattattggtggaatgaggatgcactgatttggaattgtagtagaaagtggatgagtaacatagatgcgagatggcagcacatagttgggaatgcagactatctgggttcaaattctgacccagtcactaattagctttgtgaccttgagcaagtcgctaaacctctctgtactttggtttcctcatgtgatatatggggatgataatgatcagtaccaccttttataaggttgttgtaaggattaagcttgttaatacatgtaaagttattagaaaatcctctggcgtatagctagtatatatgaatgactattatcatgagtcgttatgaagtttgtcttggtgcatactttacccaggtaatagtctgtgctttctggaattacatcatctctgcatctctgtgctaattaaagcctacatgtctagtaacattcattctccgtcttccattttttaaaaaaatgtctctgaaaggtttataaaaatatacttgattgagaattacaggcattctcccaagaatatttacattttaaccaggactgtgccatgattaagacaaaggaaaggtccaaagtattacgagttttgacccaagttgccatccatcctactccatctcttgatgcttatcttagsgggggtaattagtgagaaaagaaaaatgtaaagcaagttcctcatgaatcccttattaactttgaacaggactcagtctgagatattatctcatttaagacttctcgggtcaggcatggtgggtcacacctataatcgaagaccagaagagagacwggaggatcacttgagcccaggagttcgagaccagcctaggcaacatacggagactctctctacagataataaaaaattagcygggcttggcgtgtgcctgcagtctcagctactgggaaggttgaggcgggaggatggcttgggcccaggaggtggaggttgcagtgagccgtgatcacaccactgcactccagcctgggcaagagagtgagactctgtctcaaaaaacaaagacttctctactattctaagatgcagataggtcagaaggttgtgaccactgactgtatcccacgattactcattcagaaagttagcatcgtctaaccaaagtttcagaggtgcatcctcttcattctatcatacagaagaaacaatgctcaagcaataattgctttatcgaatcccttattagtctataatgtggtctctgttatgtcattttttttcttttaatttagttctactaaaatgctaacattgttttccttctgatttagcctcacatgggctgcatcagagatttttaaataaattgttacagtgttaattaggatttcatggtcaggctccattcctttaatagatacgatatgatttggccttctctgtatcttcaaataagcagtcctcaaacatccttatgatctctcctgctgccttagaagatktgagataatggagggatgatgaagcaatcatacaaaatctattgattcaccttggtgagtatcatttatacatcagtgagtaccttggttgcaaaattacctttggagtttaaatgtcattgcaaagttgtattggaaagrtaattttgttttggtaggccacagggttttgctttctgatactgtaaaatttatatctacttgccattttcatcatataagtgagaggtttaaatgctatgtatttaatgcccctgtctataaaaatgaggatttttttttaatggctttctcaatactactaactcttatttttgccgcagtgttgagaagtacggatttatgatactataaaatgcaaagaatagggtggaaagaaggaacacttcaaatatcacagaagctctgttccttgaaacttttcttacttcaagtaggcctttggatcattttggacatttcaattattgagttcttgatatttaggtcagaggacttatccttgagaggtgggacttgctgggtcagtgaggacttggagaaattttctgtagctagctagaggtttgtaaaatgcaccaatcagtgctctgtaaaaatgctccaatcggtgctctgtggctatctaggggtttgtaaaatgcaccaatcagtgctctgtaaaaacgcaccaatcagcgctctgtagctagctagagatttgtaaaatrgaccaatcagcagcctgtaaaatggaccaatcagcacactgtaaaatggaccaatcagctctctgtaaaatggaccaatcagcaggacatgggcggggacaaataagggaataaacctggccaccccagccvgcagcagcaacatttattgtgaagagggaatgctgcttctcactctttgggtccctgctgtctttaagagctgtaacactcaccacgaaggttggcagctccattctttaagtcagcgagactgtgtacccaccggaaggaacaaactcgggacacaccctgatggtgtgctggmgataaaagcagtgtgttctggggagttggaagagcaggggttagatgctggagggattttgcttgacaagtcatattatcaaaaaactagtggtcactaatagttttttacaactagctatgtttttatttctagtcatgaagcagtgccctaaatgctttagtaagcatagttaatatgcttcccaaaaaaaaaaccttccttttctttgtatttgaaataattttcttcctgtaattgcttttgaagaatctaaaaaaaaaaaaaagccatacttttagcgttttttgaaagtattaccaagttaatatgaggctttttgttttgtttttgtaaatccagaaaattaatgatattagcagcttcagagatgtgttagatttgggagctcaaaaactgtgttaagagcttgtcattaaacagcctgattcttgcactattttttttaactgcctttttatattgatagagacgggatcttgtttggacttaataactttcccaaattcactaggagtctacaggaattattgtttgtacaaatgattcctgggagagatgtgtttttttcattctagagcattacagtgtcataaagaatcccacattgggcaggagtgggccagttcaggttggcctgtcatgcttaatcactggctaggagcaacctgggggaagggcaggaactccatgagaatccaaacaggtggcgcctgtagaccaaccaacagctgtgctccccaaagcggattctcttgaagggagatctaaagggggcacttccatggctgccacacccctgttagcatgttggtatttttcaaatgaagaactgtgaatttttatctcctgaaatgctaagtgagtatttgaccatctaaggatcccttttgtgatatgttgcgcttcatggtgactccactatgacatcacaaaactgggtagataaccttttattagcctttggaagcaagaggcactggccactgagtcagcaaccccaacaggagtagaatatgctgtctgtgttcctgccaacactttggttctgaaagaaaatgctgactcttggatattatgtctttctatataatggagataaaaagtatcaagaagcaaaattcccttctaagtgttgaattcaaaaccatttgtgaagaaggcttttggaagcagaaaacttttgaaggccattctgggttttctygtccatttcttcacaccctagggtggccatgaaactcaagatcagaccagatctcttggggttcctggagtcaccataaaaaataaattggctttctgtaggctataaaatctaaagctggtttgtccacactgaggtgccattaaaagaacagygggcctggattttgtagacctgagtttggaatctggctccgccacttactagttgtgtttycttgaagatatcagttagtctctgggtttgtttctttgtttgcagagtgcaagaattggaatggcagtgaatgcacagaccctgtacaatcctaaaacttagtaattctgtcagtgtcaggrctaagtaattctagatgattgcagtcctcgaagcccagctgcccacgtacttaaagctcgtgggagagattgatatgtccccrgagagtctgccttgcactgggccttcttcacctcttcgagtctcccatgcgaggctcagcagtgactcatcatgatcactggagtggtagggggctcagaccctcaactcccaattgtgttctggacttacaactcttaatgcctttggccaagttgtctaacttatctttagtttcaccagctgtgaaacacaaataatgtgtacttccagacctgccgcataatcagtgataacacaaaaaaagyttttattrtgtcagaaccaatctcttctaattttaattattactttgtggcttctaattttaataatcatttctktgtaatcctagcctatgtgaatcgttttgtgagatgaatacaaccaagtggggtcagtgtcaaaaggctgccaagtgtcactgctgcttgggttgcagtrttgtctgcaactagtatctttgaagcttttgttaagaccatattggcttccttagctcagaggaagtaaaaaatccagacattggtagttatttatcaaagtgctacattaggaaatgttgtatttatccatatccataggtttactaaaataaatgtaacctctgagggcatgcagtcattcagggatccaaagtagctagatacttgggtctctaggcttacaaataagcaagtatccctccttggttttataaagttcttggattatttcacatcacacaaatgtacccatccttggggmcttgagggcattaacattaatcaaagtgaggcaaaattcaattagaaattatcgatgctccctgcatgttgattttactaggcaaggagtctcttttgcaataatctgcttgaacagatgaaactcagatcaggcaggctgaaagctgtcaaaggataagtttcaaataagggcagaaaaatgaacccgacatgggagccttcttcacattcattcatagtaggagtggagcctggagcaaatcacactcttaacaggtcccctgaaacacatccttttgtagataaaatctggttaaatgaatgccaggaatgactgtcaccttagattaaatgttcctcggacccgggtacttaactacaattatgctgtgcacgtggagagaggggcacaatagcaaaggcgaatggtattgtgaggcatgtatggaaagacaaaattagtctccatagaccttccctctggcttcaacaccacccactggtggattctgtatggtcactcgcccaggccattggaaagcagggtgtcagagtgggaagacccaaatgtcaagacagactagggtctgaatctcagctatgccatatatttgcgtagtgattttggacaagttacttaacatcgccgtgcctcatctttaaaatggggaaaatgggagtattttgaagattggtaatataatgtatatagcaattcatataatgcytgatatatggtagcattaatacgttattttttaaggaaccatttacaacttatatctgctactgtgaatataagcctttgcatcccttgaaaactttacttttttagtcccttccctgtcacaggagacctaagtatatgaagatgtcttcatagcatccttaagtttcattgttgcccgtgttgccaaggccagctgtagttggacatgtcctgggatcaggggttggttgttgaaagagtagatcatcatctcataacccatatggactttgatgcttacatatgaagcactgctatgtgtgacatcatgatatcaagtcatggcccagccatcatcctatttgtggttcccttaggacataactgcttttatggacaatgaatttaatatgattcctagtggcagagggccagaatgttcatatcccttgccatgcagaattactcatccatctatattttmttgaactctgttacatttaggtagtgtaagaaagtgtgtattcggtgaactgtgtggagagttagtgtatgggatcattgcttgttggtagttttaaaaactgtagatgatttggaaaggaagaaggtttagactttgacagactcacaaagatagatcagttctttcttactttatgtacaatattccagagatacatgttctcagtaacaggaggtagtacagatttggggctgtgatgctttcaaactttgccagactctttcatacaatttaattgcacaggcccttagttgatggcatgaagaaaaagttttatacagtagatgaaatgcatgtttatttttgatgtggtttggtttcctttcttgggacaacttatgcaygtaatatattatattcctcatacccccatccttctgctcttaaagaataggaatcattagtttaaaaacgtctgttttaactatctttccattttcaatgataatattactaattatgttaataattctaatcaattaaaaatgccgcttaattttttaaaagagctttatcatttgattaacatataggcttctctttgctcatatttttttttctttatcatcatctcttactaggcaatggcgaagtagaaatgcttgtaatagtgcataacagttattgaactcttgtgattaagacttcaagagttcatkaagaggacagaaaaatgcacctttgatatcttaatctgatcactctaattgagaaaatacaccttaataattattcagtaggtatattgacctgatcattcatttgccttctaatttggacccttggtcttggcccttctatctccatttagctaggtgatatatggagcaccctggacatcagtattcaggggatagagcacaggcctttcttcctctctggggtccgttcttcttgtgtgtggcgttgctggtgagctccatcagggagctgacagtccaggctagtcataatgatgctttcagatttctaaagagtctgtaattaaatgacatcactgagtcttaaatgcatctgctgtgaaagtcagaaggctaaattatcccattaaagagagaaaagtgttacttggtattacagaatcccaagtttattatgctgaggagttgcttcgggaaggctattgaaagccagttgagcatggaacatagtgggaagattgggaggctggaaggccatgtggttcagaacaggctgttcaagaatcacagctgcactcaggctaaagtttaaaaaaagaagccattaaaaaatttcttttgctttcccaaatgcaattaactgcttggctgctggtttttattcctaacagctgtgctgtttcgggccctccagaagatatctgcagctacatgaccacagaatagtgtattgtagttaattagagcatggtttgcatgagaccaaggccatgagtttagtttccatagggctaacttctctaagttaaatcaccagttaatatatccccagccttacttacccgtcttccarattactgcctcatagcaaaaggcgtctggagaaaggaacttctatttatcagcccaagtgcccctgccattggaataatacctgacaattatgttcttcgggtctgtttgcctacatgggtaatttctagaattaaagcactattaatttttcagttgccagttgtgatgcccccttttaaatattaaaaaaaaatcggtatttgatcaaatctgagtattttcaatactcattttctttgacacttccatagaattcagaaatgtttttaattgatttttttcttcccatgtgtgtctcatttactgtactgtatcataacttaggagttttatcttttgatgactttgtaatatagggatagagtgaaaagacaaggaggaagtgaggtgacttggacaaaaactaccacatattccctcctttttcactaagcacatacttactttctctaaattgcctggcttctttcatcatcagcccccaagaatgccattatttccagtcaccaaactgaggccagaggaagagatggaagacagaaatgggcacatgttttgtttttgtttttttttttttgagacggagtctcgttcttttgcccaggctggagtgcagtggtgctatctcagctcactgcaagctctgtctcccgggttcatgccattctcctgcctcagcctcccaagtagctgggactacaggtgcccgccaccatgcccggctaattttttgtatttttaatagagatggggtttcaccataaccaggatggtcttgatctcctgacctcatgatccacctgccttggcctcccaaagtgctgggatcacaggcgtgagccactgtgtctggccagaaatggayacatgttttatttccttggtttcactttagaaactttgaaaaatattcttacttcatacttcaacttctttccagtataccaactatatcaataaagggttctatttggtaaataaaataaaccaatacaaaaaagcagaacttttaagcaaaagaggtacatttttggaggacactagaatgtctcgtagaatctaaccctttggaaggacaaaaaccagggcagcactgggggcctcagcaggagtcgtctgcaaatcttctctctgggtcattacggagacccagtcattacaagacccagttatcgctaactcccaagccccaggtctctcactttggccaggggtctgctgatactgtgcacatcacctagagcaaaggcaaggccatgagacagaaaacatggtttcagagtccaccctgctggatgctgtggatccttctctgagaaaggagactggatatgccacccaaaaactatccatgttggtggatccagggttaaagcacrgcccagaacgtaacttagaatattacgaaacaggtgtcaaagagttttccagaccagcatctgttccagaaatgtgaggaaagctctcaaagcatgttcagtacctgagaagtttggaaytccagatcaagagaagcatttttcctcaggcttaaggccacatagaaggtctgcactttgtgtcactttacattttactgacctttattcaactgtttgcctcttctcctccatctaactgaaggccatgtaagatccaacagtgatgatttcaccatcctggctattagaagacttayggtttaagtatctcatattaaatgtttcctcctaatcatccaggcaaacaaagtcagaatgtattagtccactamtgtatgttcagcatctgctatgctcagagtattgtgctagaattgtagaaaacataaggaagttgaaccagtttctgaattcaaatcacttatacttcagttatcaatataagatataaacagagaagtagttgcaactattcttaaaggttttaagtaaattccacatgatcagtctgtagatgcaaagtgctttaggcgtaaaagattcatgaataacaacaataatgataagcaatatttattgagcattttctgtaaggtactttttttttctkgttttttcttttcttttttttttcttttcttttttttttttgagtcagtgtcttgccctgttgccaaggatggagtgcagtggcaggatcatagctcactgcagcctctaactcctgggctgaagtgatcctcccacctcagcctcccaagtagctggcaccacaagcgtgcaccaccacaataggctaatttgtgtgtgtgtgtgtgtgtgtgtgtgtgtgtgtgwgatgaggtctccctatattgcccaggctgtgtcaagtgtcaaagcactttttatgggttaaatcatttaatccctcaacatataggtggtagtgctttatagttaaagagacaggcttactgtcttagtcactttgaccttctataataaaatactgtagattgggtggcttaaacaacagacagttctggaggctggacattcaagatcaggatgtcagtgtggtcaagttctggcagaggctcttggtggcttacagacggcctcctccttgctgtgtcttcacatagggtgcagggagagagcaagagcaagttccctgctgtttgttctcataagggcactcatcctgttatgagggctccatcctcataatcttatataaacctaattaactcccagataccccacctccgtatactctcacactgggggtttgagtttcaacatacgaatttgtgaggatggggagacccagttcaatccatagcacttgtaaaggttaaataacttattcamggtcacacaggtagcaacctagatacttcttccctgtgcatatatwtwtatatatatatatatatatatatatatatatatatatatatatatggaattttctagaggaaagggagcttgaataaggttcatatagcttctaaacactgcacttgctgggttcttggttggttcttctgctttacatgctgttgcttttcctttgctggcccctactcatcttctctacctcttaattggagtatctcagggctcagttttagacctctcctttcctctattccatcagatccactccctagtcttacrgctttaaataacagctgtacaagaatagcatctaaacttttattgcagtgccaatctctcctctcaactctcagttcatatatctactgcccatttcatgtctccacttagatgtctaatcagyatcttaaactccactttccaaaacaaaactcatgaattttttttttcccaaaactactcctcctattgtcttggtcatctcagtaaatgcttcaccctcctgtttgctctgacaaaagctctttatgtcatgctcaaaacttctctctttttttttgagacagagtattggtctgtcacccaggctggagagtacagtggtgtgatcttrgctcaytgcaacctccacctcccgggttcaagcaattctcctgcctcagcctccctagtagctgggattacaggtgcccgccaccacgcctggctaatttttatgtttttagtagaaacgggttttcaccaagttggccaggctggtctcgaactcctgacctcaggtgatccacctgcctcggcctcccaaagtgctgggattatgggcgtgagccaccacacccagaaacacttctctttcttttataccctacatgcaataggccctcaacaaaccttgtgtgctctaccttcaggctgtatggagaatctgactttttctagatggcaagatcttcagctcgttcaccatataatacatgaaatacatgtattctcataaaacaagcttgataccctacactgtctctactgctgcccctctgaatcaggccaccataatgtctcatctccattattttgcaatgtctcctatcggacactttttactaattttcttgccatatagtctggttttcacatggcagccagagtgatcctgttaaaacacagggtagattatggcacttcgtcagggtaaagttccaattcttcaccatgccctataaagcaagaaaggaaggaggaaaggaaaactaggggccagagcattttctggaccagcatctattccggaaatgtgatgaaagccttagtttattctttatctaaaaagttctctccagaaaatacttgaggaaaagattacagccacacagaagctctccatttagtgcgactttgcattttgctgatgtttcttgagttctatgccactactctctctcctcccccaggaccaaagggcatatattttgctttcgatgacttgtgcagttgttgatttccagcaagcttctgactgtagtttcacactgatgatataggattaccatttgatggtagaataaaagcagtatgatgtattggaaagaagactgggtgaggatttgaaagctgtggattctaggcccgttgctgatcctaggtatatttttggtctacttcgatgactgtatgtctacctcagtgactgtatttggttataaggttgtgttactgttataataattgcaggtttactaatcaacctgtctatccatttcaaagggaaattgttattttggtgtcaattgcagggtatgatggggaaagactttctctgttcaatttcagtttctaagaatacactgttgctaaaagtagtgataaactttatatacaaggtgtgcattttaaccatcacagccatattatactgacttactttctaactctccatcttagatgtagtcaacatattgatcataggttttaaagtatccaaggacttgcccctctttctggatagggagatcttcaacctgttgaccacataattagatgaaatatatattctcatgtaacaaacctgaygccagtagtgttaggcagctcctaagggagtcagaagctgcttccagcctcgtaaataatgagcacataactaacagaacctgatcttcccagcagaaataagtcagcctmcttcacagtatgcaatrtggtcaatgaatcagtggttgctgagtgaactgcacttcccccagctggaggagaaacaagcttttttaggagcgatagagcatgcaataggatgtagatgggaaaggaatctgatgaattgattttcactggaaaagtctcagagattyttcacctgagattgcttaatagtcctaaagctttaagctgctaatgagtctctgtccaacccactgggggcacttacatgttgctaagcactgagtaggctgaaacaaatcatggaaaatcatgcttccatttcctggagctgtgggggtgatgaccataacacctcaagttgcatcaaagtgatagaacttagacaactggctggaaatatgtggaagtaatttgctgctatcacaagttcacatgttaacattatttcacccaatttgtattttgtgggtgaccacatgcatttcatttgaaataattaggcaaattcgtcatataattcatttcctgttactagagctaggttgtccttctatttaagatttacaactagccagtacctgaaggcaacatgtgactgaaatattcttaagttccatgaaacaaacctttccagattgagatttgcaggtagagtttcatgctgcacgcagctgggggctctctggaacctgcttgtcaaataaacagagaacattcattctcaggcatgtggtcccaatagctttcacaagcattaaactcacttagaaaataactagtaatcaaaaaaaggcatttaaactcaactctctgaagcatggaaggagatgtacattacatcgattgaattgtcattacaaatatctactttagttgtagacgtaattaggttttagtgaaagaagacatttatgtagattggggggatgtggaaggttttaatcactggaataccatttttattacagctggatattagggactgatattgaacaatggatccactcttttccactgagaatggtggaatcttcacattttagaactaacaggaagcgggcaactgatctcattcagcagctgcctgtttaggctacccaacccctagaagtctgagaaattggtgatagggtttacgagttatttttagtgtatttatgaatatgaatgcatgcatgatatggccacaaaactatgaatcaatttatttatacttaggttggagttatatcaactcaaagtgtagcatgtattgtatgctccatagaaataggggctggatctgcctaatttagttctgtgtccatagcgctcatgaataggacttcacacatgataggaactttaatatttgttggttggatggttgaacaaatgagtggaagaagaactattcagaagttcttttggcagttatagaaacttggattaattttcttaaagaagaaatccattactgtttaataagcatagtttggttagtaaaaatatttcaaaacaaaatgtccatgagagcaaattagtaatataagttcttggtgtgaaaacgactttgcacacttgtaaactaggttcccgaaaacttaagtgtcttgctccaagttgagcagggggcggtgatggcaaaaccaggattagaatccagagctattggcccatggtcttcccaccacaaactatgttattgaaaatagatcaggttcctttagatgtttaataacctttatgagtgaaaatgctgcctaatatttggaaatcaaacatttatagctctaaataaaacttacctctacagttayttctcacttttattcttaygtctaaagggtgtggaaacatcattgaacattgtttttcacacgcagatgagactctgttgaagggagttttgtggtttaggggtttagggggttacaggtacctttgagaatctgatgacagctgtggaccatggacaaacacgtgtatgcccagacccagcagttttactcgtggcatcgggcagttcacagaccccatcatgaggatcctgatttggaggctctgccaccattctgtttggccctcttttggtttggatgttcctttcagaattgatgagctttcacatttgcttctactccgattaaacagctcatattgtttcatcatttaaaaatgccttaaaatgagatggctcacacctgtaatctcagcacttcgggaggccaaggtgagaggatcacttgagtccaggagttcgagatcagcctgagcaatgtagtgagacctcgtctctaccaaaaattgaaaaattagtcgagtggtgtggcacgcacctgtaracccagctactcagaaagctgaagtgggaggattgcttgagcccggaaggttgaggctgcagtgagctgagatcacaccactgcactccagcctgggtaacagagtgagaccctgtctccaaaaaaaaaaaaaaaaaaaaaaacctaaaaggtactttttacattgtccgtagaaggtgactacaactaaggcattttcatttttgaaaaatatggaatataaaaaaacctgttgtagaagaaaattgttcacaatgaacaaaaatctaaatcactatgctatgttgaagccttaagtggagctattgtaaaatatgcatttttatcccaaaatggaaatggcactgtaaaaatggagacaattttaatgttctgaaaaagtgtataaaaatagcatgcatttatcgttcttcaagaaaaggtaccaaataatagaatagtcaatggcaggttgtctattctaggtggatttggaggctcattagtatagagagaaccaaatggtgagtcatcctcccaggctgctctccttaccttcagaacatcagcaagaccctagtgaggaaaggaagatgcacgtggacaatcaccttggcttttttttgccattctcctggtaaccccgcccattttcgttacctgtgaaaataagccaattactagaaaagcaagctcaatgtatccaattagcaaattaagacatttagtaaaaatgaagcctcagaatcttgaaagggcagagtgaacagggagcactttcaactccttttatcttcatcaatacttttaattctggtgatttgaagagatattaatagaggcaatagtactctgttaatcttgactatattaatacgagattagggaagtttggggggctacagctacatttgagaatctgatgacagctgtggactgtggactaamacttgtgtgcccagacccaggcagtttactcatggcgtcgggcagttcacagaccccacggtgaggatcttgatttgggggatctgccaccattctstttggctcttttggtttgtatgttcctttcagacttgatgagctttcacatttgtttcaactcagattaaacagctcacactgtttcatcattttaaatgctgtaaaacaaggccaggtgcggtggctcacacctgtaaccctaacactttgggaggccaaggtggacggatcacctgaggtcaggaattctagaccagcctggccaacatggtgaaaccccatctctactaaaaatacaaaaattagyggggtgtggtggcacacgcctgtaatcccagctacccaggaggctgaggcaggagagtctctggtaccaggaagcagaggctgcagtgagccaaaatcgcgcctctgcactacaacctggggacagagggagactctgtcacacacamaaaaaataaataaaaataaataaataaaatgccctaaaacagctggataaagtttatcttgactgtatttatcaggtacctcacataacttttgaactgtgggtctcaaatatacaactccaagaggactttcagccttacattacccttctaagaacaataaaaatgtcccccttacatttgctaggtctttccctccatatgcagtcctgatacagtgagaactgattgaagaggtaggttcaaggaccttgagcttctcctcatatgtctagttcatttttttgctactaagtggtttgggcttttttggtaccctttccagttactataatcagctttgaatcctctgtgatgcttctcgtgttctttatccctagttggagaaataactctttgaagatactttttcatgtacattcgggagacatcagtaatttrggtgatattttcatctttacggtctmgatgagtcatagagtaagtgtctctctcctggtttaagtggtgaattccttcagaaagccactggccgactagccccttggtgactgtcccagtaacatggaggctacctggcctccttagtgagcccaggagaagaaccttattcttctatttggagttcttactttattttcagcatttgcgaaatctcaaaattaagttacctgttttcctgattttgaactttagttactaggctattccatcttttctcttagcacctaagaggcactaccctcagttcaatttattcaggtttcaatttcttcagcccagatgttccttctgtcattacrttagttcccttggaagctatccaggctgctgaaaatagcttgagtgtgtcacaacccactggcacttaccactttctcttcagtagcagaactcttgccctattgagtgagcatctcccaatcaaatcacaatggatagttgtcttttttttttttaattatactttaagttttagggtacatgtgcacaaagtgcaggtttgttacatatgtatgcatgtgccatattggtgtgctgcacccattaactcttcattaaacattaggtatatctyctaatgctatccctcccccttccccccaccccacaacaggccccggtgtgtgatgttccccttcctgtgtccacacaatggatagttttcaaagcaactacccattatgcatgtgttcttaaatggtacgttgaagagactatacaaagaactttttttaaaaaatcaagtattacgcagccagctcatatataaccattgttgaakagaactattaccctcaataaataagaaatgatgacacttggaaaagagagaacaatagttaatgggtctgcttttccctctaaccacaaccatgaaaatataatcctcattaaagggctataaagttgtctgctttcaaggttcagcacactaatgtctccttgcttttagtgctgttttagtatgttgaccctctgttccctgcagctgggagtttattagtctttgtggcctttgggaatgaatattcataatgagatagcagtgatgtttcagatcctttttaaggccccaagagtattactctgagcaactaggaaaactgagaaaaaggcaaatcatgccagcatcccatactgaatcatggaacacggggctgtatgcaaaggacctggtgaggaaactgaagcctagggctacccagttatgaatagcacagccaggccagaatccaggtctttcaattcacagtccagattctttctgtgacatcatattatctctatatgaatttgccttttccattcctgaggttctaacccatgaaaaagataaaacrccaagtatctaaaattagaatttgaccatgatggtggaacttatgtgacaaagttattcagggagggcagaggagtagaaaagcatctctatcaaccgtgtagtttcttagaagtaaactctagttatatttgggggtattaatttcaccaactatatcacatttttctttttaaaaattaccattattattcacgttttaaaaacatccttaagcttattcrgagagtctatgaaacacctgctaaatcatatttactcttcttagaacaataaaaattgatcactatggtagatacagttgagaataaggaagatgtatgatgatgcttccttttatttmttttttcctaattgtattataaacatcttatgaaatcaaggtaatttcattaaaattcttatgattgggtcttaatttcctatagacattcaagccttaaaagttttcagttaaattctacataactttctccataggcaacttcttttagtcartgtggtacttctttaaattcttaataagctcagatcagatgaaagaactgtttttctatcccaaggtgacatcatttggatcccagactgaggttgcctttttccttgagtgaataccaatctgatatacaggttgtgggggaaaggctctggtggaaatagggccagagaaccactcctcctgatcaaggctgcccagaaagattcctcagttcagaaggatgaactggatagctttgcctattacaggyatggcattgatgtaatattgagttaacaatattattttggccgggcgcggtggtggctcacccctgtaatcccagcactttgggaggccgaggtgggcggatcacaaggtcaagagatcgagaccatcctggccaacatggtgaaaccccatctctacaaaaaatataaaaattagctgggcgtggtggcatgcacctgtagtcccagatactctggagrctgaggcaggagaatcrcttgaacctgagaggcggaggttgcagtgagccgagatcgcgccactgcattccagcctagtgacagagcaagactccatttcaaaataaaaaagattattcatagtaatctatgtctttgggtttatttagaagacacctgacttcatcgaaggctccttccccagttacgtgcctgggaagctaattattcagtcggagggtaatgaaagacgctgccatctgtctgccgacttaatggagtgtcagcatatcccaaataggaagtaattggattgacagacacaaagccagttattagactgttattatctgattggaaaaaagcagccagagaagcatacagctatagcaaaaactaatctgatgatgtctgttgttctgggaatgcagaaaccaccacacagaatgcatgggctttgaaatccctgaccggcttaggaacgtttggagttccttctcagaattcatctctgtattcttattacaaatcattataatgcaatagaataaaacacagtttgcataaagatggggcccatttataaaactgtcaccacagccactctattaatagagccattttaaagatttattgtgagcatatgttactttttacagggggccagattgagagctgcaggatttgaacgtggaagagtgtgctactgatgataattcaaaaaaaaattaaagcgattctgcccaagtagtatcattagactggtactcttcccttttcaggtgtgattatcaaagatcaatcttaatgaggcattaaggacaggtgacaaggtctagagcagtgctacataactacttttttaaattcacagattctagttttatttcctgggaccgctagaggtcagggaacacaatgcatgggctaaatataagggtttggaagcagaactgggttatgagctttattgtcctttggaaaacggtggctgcatgtgtctggtggggaagaagtagtaaagacatcatctctattcattcactrttgattcagtgagagtcacagccctcctccataggattcctgaagtctctagtccctggagtttatgcaaagagctagacagttccacaagcttacatttattcagcaagttcctaaatagcacttgcaatgtgctaggcactttcctaggttctaggtatayagctatgaagccgtctaagaccctgccctcgtggggcctgctttccagtaaggcaaatgaaaagtaaacaaagtcaatgcttgtggtatcagattataagtgctgtaaagaaaaaaagaggcagtgaagggagatggagaatgatcttaagaaggtgatgtatgtgctggcaccctactgaagtcagcaagtgagttgtgtaactgtctggaggaagagcagcccaggcagagggaccaggactttcagaggcccaagcaaattatgagtatttttgccagtcctaccaccaagaaaccagctgctttcagattcctttgcctgataatattagagttagtcctcaacatttcttatttgtaagttagggaatactgaaaatatgcatgcaaaggtactgtaatctataaagaatacataaacataggatattgtgagtaagctccaaataagctttagagatctccatcattataatctgagtcatttaaaagctttgagggaattcccacttaaagagaccaagtctgtggtgatatcacttttatcacacaaacctttatcagtaattactaacaaggaattacttgttagtaatattacctgccacataatgagtgctaccatatttcagacactgtttatagacacgaggtgaatttaagatactactgcaatacatacatcactgccaaccttataataaccctgcaaggcagatattatttcctcattttacagattaggagcctgagtggtcagaaaagtgccacagttaaatatctgggaaagctgaaattccaacccaggcctgtctgacctcagaccctgtggcctctcctgtatattatgttgctcaaaagatcataccattgagttcttaatatgagtggcacactgtgttaggaaccatgagaaagacaaaawaaaataaaataaaataaaagcacaatccctctactcagagacatgaaaatatagttggggagagataattttatgagaaataacagaggacagtaaaagatgaggtataaacacatcattgtgttccttggactatgaaagctaaggaacagagagagattaatgtagactacagacaataaggctgaagctgcgattttgagagacaggtaaaattcaggtgatctctgtcatagagttccagtcatatattgatgttagaatctactcctgtacctagggtgaaaatcagatatcatcatgattacctatgaaaattgcttagcaagttagagatgaactactgtctctcaacatggtaaatataacccagctacattttcctccaattttatacccctttggttaaactccaaaagaggtatyccccctgtgaataattatgtcacataaaaagtacacattttaagtactagatcacacagtcacactcagaatgactagagtctgataccatgaaagacatccaggagctgagtctgactgaggggcctggattggtgcctccctgtcctgcatactgtgggacacattctcatcgagtggaatggcaggccaaataccttgatgtgtttgcattgcccctgtccctctcagcccatacaccgctgatttcatgtatattaaatatgggtattctaaaacctcactgaagtggagtatgttctaaataagcagaaaaacataagcaaaaggacaaggacagaaataattttggattctcatgaaatcatcaaatggccattatgcagagatatgggaatgtaacgcagcctgatcctaagaggaccatgmaaaccagagggaaaattaaagattcatgagatggaagtaaaagccattgaaagtttttgagaaatgaaatatactgtgaaagtttgatgcagattagtctagtggtgaaatatagggtgggtagtgaagtaggaatggaaaagaccagaccagagacagttataatccagaagaaggtatggactagagttagatcatttctagagatgggacttgtttggagattacttttcaccttacttaatctcattaatgtgatttaaaggaaataatgcacactcaaaggagcaggttaaataccaagaacttagtgagtcaggtagctgtagctttatagaaggcactttttcatccatcctttcatccatccatccatccatccatccacccacccacccacccatcatattttctttcctccctctctacatttatacttacagtcaaacatatcacttccccagatgagagtctcagcttagcactctaaaatgctggtggcattaagttaggtaatgaatgtgaaagtgactaaaaaattctgaaaacaaatttgaaatgttattatccagttgtcattcctttggattctcttaaagtcacatttaaagtaggtagatttatatattacttgtacttttgaaaataaatatatccttcaatcattctaatagtttttaactattctgattccttctgtgtttttatgatatcgtcttcttctagagaattagttgaccaaaaataaagggagtcgttctatttcttaagacctaaaataatcaytttggttcatttatgatgctctgaatgaaaaattcacaactttaggaataaaagttttccagttttgttttaataacattcctttttttgtcctcataaagtagtattaagtaatatcacattattaagtaatatttctgcactgaattttcagtcctctgatgataggattttctttctttkgtttcaaaagttgaagcaatcttaggaacaatagtcaaaaagaattcatttagggaaacatttcacaaagatcccctggtcattgctttcaaagtttagatgacccaagtaacagacagtgttgacgtctagtcataacttcagtgtgggtaggcaggcatcttctgttctccaataacgatactataaagtgtcaagcatacataaattctcaaatctgagcatgagatacaaaatttttaagataatctcatgcttttgttccattccaatgttttaacttacataaattatcttagggaatacagtggctcaagcttgtggttgaagttgatcaagcccttcttttgatgagtaaatgaataaagggatacccatgtctgctcagaaccatctttggtccgaccttatgaatagcacagataygtcctctataatcgtggcctaaagaaataagaaaaaaattgttagtatctcattctgtcacctccactgagrtgcctattacaggataatgaattatatattatcgggaaacgagccatgtagtctaagggtaggcaaaacatctacaaccctcaacttttaattcattttctctcactaatggtctctttttattcagcatgctattgaggattttcctgataccatgacagaaggaatgaaatctaccttcaattatttatggtttaaatgaatgcaaataagactttctggcttgctgtgctgatactcattaataaatatttcactgggtattaggaagattcagattgactaaatgaggctcttcttcaatataaaygaaagcccttgtgtttttcgctactgtgcaggcctaattctcgtgtctggccttcattaaggcaaatgaatgttagatgggtgcatcaacacagggatggatcctgtgggaacctgagttggcggggggctctgcagtgaaataatcctctagttaaaccaaatttaatctcattagcagggtaattgtgctgttaggggaaatggccaaccaggttacagagaaacccacatagtctaattattcttcgacttctgtcaytgragaactcagaggcaaaagatgctcagcctactatcgtggttaagtcttagaaaaatctcagacctttcacagttgccagaacctgtgtatggcattgatcatgtcctacccattcwgggatcctttcctgtataaattaacacaccaataatacaagctcctgtcatgttgctcctttttatatgtgcattttgcccacccacttttccaacaaggttggactttgctagtgttttaaaactgttcaggatatagtattgcatcagaaagttctaaaactaccaaaatatataaaacttagttataaaaaataagcctttccatatttctgctccttgggaaattttctagaatctttgaacctgtggaccatgtattttacattcctytggatttacaggcattgtgggctttgccatttttaggatgtggtatagaagaaagcatggtggactaattaggaaccagatctggcttcaagatacagtctgaaagcttgagaatagtgtgaccttcagcaaattacttaccttttctgaactgtaatttcctcacatgtaaaatggaaataattatcactgtcaaaacagcccccaaagcagaatgaggttcaagtatgtgaaagtcttttgtaagtgctaacatgcactatagatatgaacaataatcatgcatccacttgacttataagacttggcattcctagcttctagggcacagcttacatatggtcagtaaatgttaattgaattaattgcttagatatttggtaggcttactgtcatgtttcaggttgttgctggaatcttacatgaataactattgctgagaatttgtcaaaaccaaacagtgaaatggatgctgctccatattttttaataggccgggcgcagtggctcacacctgtaatttcagcactttgggaggctgaggcaggcggatcacccaagttcaggagttcaagagcagcctgcccaacatggctactaaaaatacaaaaaattagccagatgtggtggtggaagcctgtaatcccagctacttgggaggctgaggcaggagtattgcttggacccgggaggcggaggttgcagtgagccaagatcatgccactgcactccagcctgggcgacgagcgaaactctgtctccacaaaaaaaaaaaaaaaaaaggagagagagagaaaatacagtgaatacctcctgtccaagaagarcttattatattgcttccaaaacaagatatgcatgtgggaaatgacagaaaaaaaaacacttctaaagacattaataagtgtgaatgcattgaagtaatgaactgaatacataaatggtaaatgcaaaactaacttttgtgcttgtggttatcatgcctgttgccataattttttattgtcagccttatgacaatgagcaattttatgaatactatcatatttaaaataaactgtgttagaactggctgccaacatgatggctggaaattttttcgcaagttttatctgagccagagtagttttctgaaataattttttccattaagatgtattttgtatttgtgttatgataaagcatgtatttcttgaatttttccattactttgaaaacaggaaacatttctcagatgaaaccagggcttatactggagttttgttgttttatttttttaaatgtacaaaccatttctacaggctttttctgtctcttgcttgcatattcagctgagtataacatactgggcagagtcacctgattgcagacattgactcttgcttggacagctgttttatcttctgtgagttttaggaatttgtcatcaacataatccaaaagaatatcagttctgcaggaactgataatattgtaatcgaaattcttctacagagtctagtttttcttagaaaatgatgcatattstatcattttaatgtctatacaactgatagatattcacttgcaagtaatcagttagacaggaagacaccttttctttattatcctgtgtacaaatgtaataatctatacttttctatatctcagatttgtgagcagaatttttaactctgatttagccttacaggggatatgaaaacataaataaaatagaaaggtggaaatactaaaagtctttaattcctatgtaataagtggacctatttatgaaattaactataaagaatttaacacagatgcctcttgaaggaacaaagaactgtargaatggaatggtagctcagatggcttaaaatatttagtttggtttactgttagttcacttttgatgtgaatttgatgttactccaacccattttgttatgtcgaaatmctgataatgtgatatatcaatagatgacccaaagtgagactctaaaaggcaatactgtcttccaagtaggaaagggctccagaggaggtaactttgagaactttgaaccactgtagaaaaataactttgtgaataccgttgcaagataattgtagatactgttcaggcaaagtgtagatgtgtgaacagagaaagataccaacagtgatatgagattatcctggcttacctgaattaatgatcaagtgtgtgaatacaggaaaacaaaaatagaaaagtttaagggacaagactaatatcataactgtctttgcctgtctgtgactcatatcattagtgrctacttttttcttagggcactgtgcattcagaacactttgccagttaatcaagtgatagtaaacttaagagtgtgataagaaataatcataaactaagttcagcaataagggtggttgccagataggcccattagagatcattcaaactgagttttccaaagtattcatatattaaatgtaatgaaatccatcctgttgaaaaagagtggaataaccatggagccagtttgtttcttccagacaatatatactataattttatttcagcaggtacataagccagtcacatttttgacatatgaaatacttccagtctttgacttctgttattcatacctgagtaatgttcagcttaggccagcttcactaaattwcacgtttgagaaaaggactaggttttgatttgctgatagtttgccttaaaaattcctcattgatatgtttaacatagtacatgcatccttaacttcacaactttctttttttcctttcaccrtctttcttccttatcttgcttagccagccgtatttctttcctaaaacatagccttaaaataatctgtatattgtatccgctttaagaaggactagcctttaaagaccagcctaaacaagctgtaaaaataacttaatattatttattaaaacatttattaactgtgtccactgtacttgatgtagtgttaggtgtttcaggtataaatcaaagatgtacaaaacgcagttgctgctcagaaggaacttaattctaaaagagaaaaacaggtagaaaaaaagactaatgctatgaagttaaatagttcaaatacataaagcggttttaaaggcatctgggaaaactttgtgagtgacttagttttgaagtggtccttgaagaaaggctattgtgaaaatgataaattttcaaaactcctctttagctgatttgccacaatttagaaaatgcaagggaacagtagaaatagacsacatgatcattataagaaaaggcatgaacttaaaaaaatacagagagtacatggaactcaaagtttgctaatgagtagaagtagaaataatgttagacttatttcttgagtttcttacctactggataccaaacaatgtctacatgaaaaagacatgttccctcttttcaagatattttaaaactagtagggaagacagatacctccatagcagaattctgtggactcagggtggtgtggtgacatagtaaaagggcattcaccatacacgtaagggagaagggcctctggaggaagtgacatctaagctagtggccacaggacaagtgacagtcaggaaggagatagggggacagtgttctaaataaacgaaccagcttgtacagagactatgctggaggcaagagagagcaaggcatgttttatgaaactgcaaggagttctagattctttgctttaatgagattaaccaaatagtcatatattwtataagttgaaggaagaagggatggaagaaggaaaaatcagttaggagattattttagggaggcctgggaaaaagttttgccctattttaattctgtctattcacctgcgtcatctcattttgtaagaacctgaattagtatgtgagtgttacaaatggaggcacaggaatgtctgtctgagttcaagcattaaactacttgaacactattcatagcatgtgctaagtgggtgatagctcctggggcatrattstttcactgggggtgccttagacctggaacactaacatagtgcctacctttcagcataaggagtaataaatagtgaaggggtaaacaagtagataaatgtatgaacttaagatttaatataaagagaatgtctatacatctagaagcttcttgcatgagtagcaaggctgaagaaaaagtgaaagatgatttttaagcttgagcttaggtaactggaatgatgatgacacaaaaatagagaacayaggaggagagaattgaaatgataatgggagtgcagcagcraagagctccatgttggacatagtttgagttatcaggaggacatcatttgaaagtatctatcaagtgattggaaatgcaggtcaggagcaagaagtcagggctggagataatatttgttgtatttttagagaaataattcagtctttgatatattcaaatgcttatatttagtaatattatggtcctctccatccacacaakgtcccagtacctcagcacacactttagggttttcagcatggacttaagtctattgattgtcatccccttgcctgcccacctctggagttctaaccttacgggtgaacctttgagaggctttgatattaaagtatgttggatagcgtgatgaagtctggcatggtctctggagacaaactgtccaaggtcaaattttggccccatcccttgctagctgtatgaccttgggaaagtaactttgcctttctgtgccttcgtgtctgcttccaaatggcaattataaaagtacctaacttcatagtgttataaggaatatgtgaagcaaagcatggtgattacttaaaacaatgctggcctatacagttggccctcagaaaacactggtttgaactgtgcaggtccacttctatgctgattttcttaaataaatacggtcggccctcatatcgcagggctctgcatccacaaccaaatgcagatcgaaaatacagcattcacagcatgtgaaatcggaagatatggtgggccgacttttcatatacgcaggttctgcagggctgactgccggactggagtgtgcacagacccagatggtcttggaaccagtcccccagggatactgaaagatgactacaataagaacaataagaactgtcagctgttaatgttactgccattttttcagctgcccagttttatcacatgtaaaatggagatagtaaaagcacagtcctcatagagtgtctgtgaaagtcacataaaaaagaatccatataaagctctttgatcaggacgtggtaagcgctccatgggtttaagcaattattaatacagctcctactggaatagcaacaggtagaaaatttgccagattctcctgtgtcttgcattagagtctctgaaggtcaaactgatatggggcacctaaaacagagtatatttaatacgtgacacataagtttccaggtgtatgatggatattttgaataaattgcagtttttcttggaaatttttctgacagctttatcttctgaaaaaaaaataaagaaagaaagaagagggtatttaccgtaagataaattgaaaggataaaaccaraattccagacctcttggaaaagcaggattattattttgttctctgagttttatgtcagcatcccttatttatttatgcaatctttggtttaaaaagattgtttgatatgaagggttagagtttaagtcacttcaatttccaaattatatgcttaaaaaatttaacagctgtcgtttttagagaggcttacttcattttacctaaagtgcttttcagtctagagggaacacttaactgtagtcacaaatcacttgcaatatactcatggtaagatttttttaagttaaatttgtttataagcctgcagcgtccaaattttgtagataatattctttctccctttatttaatgatttttacctcttttctcctctacttccagacatgaattgcacacattacaaataagagcacccaaatccctttttatttgattagttcagcaaattgtctcctacgggtatgggctgaggacatgattgggctctgcagtgatgagcttattttgtacttttacacagaaaatctttatatacaaaaggcacagatagtagttacactcagcatgaacaattacagcttgttrggagagaacctcttcctgatgtgccaatggcttactcccatgaattaagaggcaaacgtgctccaaagtgcattaacctttatggattttttttcggttttcatgttccactgatttatggtcttaaatatgcctgttgctgctgtttctgaatgagtcccttgtaaatcatttctaaatgatctttttcgactcagataatactagtgagttgaatatatctcaaatcaattcctctgaggcttctttccttctttgcctaagttgttttccagtttgctctgtgtcttaaaagtcatacctgagagcagttgagaaagtaagaaatatatcttaaaggagccctgtttgctgggggcgccttctttctgcagactgagttgtttccagccttttgcatggcctcacttgggtttgattcccaaagcccawttgtcatctgagtatagctaacgggtcatagttctttgtacaaggatgggcccatgtctgggggtggattttattatgagttgtaggttgatttttttttttacatataaatctaccatggtagggattttgaatatactgtgttctcataaatagtccatgatttcccttagagtggtgtgcagaaagtgtcatcagaatgcaggactctgttattagtgctgtttgccatctttgtacatgggcccatatctctcctgaaaagttctgcatttgacagttagtgtttcattctcattctgggtccaaagattatttcagtttgctggatttagggtgtttcattctcattctgggtccaaagattatttcagtttgctggatttagggggaatgtgcattttattttctctttgtaactcatgtatcattcatgctacaggcttgtttttactgttgtttgcattctttacataaaaccaaaactcaaaatcaaaggtacagaattctgatgcagatctgtggcttttgtagcacacgtaattcattcatgatggtgtcacaaacagtatgtcaccgtttattgccaattaaaattttaatgcatgcttttatacacaatctgtgtcatataacaatattaaatgtgacagtagaggattggcacaatgaggatgggaccgtgtggacttacttttgatcatgcaaagcttccgcagacctgtaaatgtcatgcaacttttcacatagaaatcttggactaaaatggagatgaaagagttcagattcatttttttagtctttattaataggagagattcagagcttctyagtaaggatggtacatctctgcagagtcaagactagattagaaaacatgtaagaggaaatgatatgttgagagatcctgcaaaatgcagaagtcataaaggataaatcacgcgtttctattggttgtgatacatggaatcagcaggaaaattccaagacctcccaaatatctatattaatgtgtacgttattcatcctaaactaccaaattatatgtaatgatatacagcaaagtcaggagatagcaaagtgaaaagtttatgttgtatgatacagagcatatataaatgtacacattaaaagacataattagcaataaacagtgattcactgtttgtgaaagagtcatgcatgaattacttgtgctctaaaaccagaatcctgaatttgaatattctgaaatttgtacctttgattttgtattttggtttcatgaaaaatgaatgatgtgctctcatgattagactcaagttgcgcatttttagcaagagtarcagaaaacaatactgtgttcttctttatatcatatcagaaggcacatgatgtccattttgtcccattattagtgatgctggccgtcgaattttaaaagctttttaggatatgaatgtaaggaatacttatttaataagcaattatttttattcaaataaataaaacatcactgctgtcattgcagcttctacaatacgatataggacctctctgttaaaggatatttccagctggtagcagccacaattcttggctgagatgaaatggaagaaatggagctgtacagtgaaacagaatttgtgataaggctgggctaagtgagggatgcttgagtgaaattttaattagtttataatttcccttgatagcaatcaaatcaagattaaaattttgaaaatattgggtgaaatgttcatagtgtgtcctcatgtgtgcattccaaaggacacataacttgctgcaagaaagtaaattcaacaacacaggtattgcatatgtacatacatttagagggcctttagttgagaatctgaaaaggaaagcttcaattaaatatttataaatrttagaatttagacgataagatccatgctttrytttattttattttattttattttattttattttattttattttattttattttttagatggagtcttgctgtgttgcccaggctggagtgcagtggcacaatcttggctcactgcaacctccgcctcccaggttcaagcaattctcctgcttgtttcccgagtagctgggtctacaggcacccgccaccatgccctggggctaattttttgtgtttttagtggagacagggttttaccatgttagccaggatggtctcgatctcctgacctcgtgrtctgcctgccttggcctctcaaagtgctgggattacaggtatgagcyaccgcgcccggccagatccatgctttaaacatttgaaagcaatgagagtcagttgcrtactcgcattttttgtttttttgtttctcctactttacaaccttaagtttaggaggctgatctgaataagggtcctcaaaatcctgtgatgagacgctccccatacagcattatgtatacccttttctttactctcatagtctctttttccatatacacagatatacctgtatgttgtgtttccctgctcatcatttacaggggataggaaacccctggtrtaaaagtacttcacgagattaaataatactcttttgacagggctccatctgtgttctaacttaactttgaagtgaagtattttcttttctaatgagatwcttttcactgttaaaaattcaatgttttcatacttccatagagctaatgaggagcattgttgggaaaattgggctttttgattattctcttctatacccttgactctcactcctgtctcccattcaacagatcatttttaaatgcttactaggtgaaaggatccatccagtacactgtggtaaattggggaaaataaaataaagactcaccaaaaatgttgaagagctgcttgcaatattttaatttgtggaaataattcaacagaagcaaaatgaagatgttccctagtagctgtttggttaataaaactgttcattagcttggtagartgaatctgtaatattctgtcaaagaacagaatacaaagtagtgtgaacagccatattgcacaaaatataaaacagtgtgggatgtggataagaatgagaggatcctctgtcaataagaattactggtttacattcgaatggtggagatatgggatgattttttaaaaattttgtattgaaatctgtagtccaaactcttaggagaagggcattacatgccagatagattatgtcctagtttcaggaactatggrttatgatcaaaggaccttttaattattttatccaatattttattcaataaatatttcctacaagtctactgtgtgccagtcatagagtagcactactaggcatgaaggattcagcagttagcaatttacactttgcgcctggccacgtggggttttttgctcattcctacatccatttattagtgaaatattccaagtattaacctaatgktcwgaattgtcaactagggatgattagatatgaaaataagggagcaaagtgaaaagtgaaaaaaaaaatcatacaatatttcacactttcctctaatctccagcctcatcagagtttatgtaagatagtaattctaaaaaccgcagcagcaccatttactaagcagttactgtgtgccggtctctgttttgagtgcttaattttcatttcctcattaaaccatcaaaacaatcttgtgaggtaggtagtgttattgtagccattttacagaagacacaagtaaagccaagagaggctaagtaacctgctcgagactgtgcattccaggtccaaactctggaagccctactgtaagtgttcctctcttgaccactctccttctctaagtcmctcccctctgcagagtgacactgagtgaggttcatctcctggatggctaggaaggctcattttctgtgtccttcctgcccatgaagggtaggttgcccatttaatgtaactactttttttcatttttcatttttatttatttttaattgaaaaatagaaattatattcatttatgatatacatgttttgaaatacatatacgttgtgggatggctacattgagctaagtaacatgtattacttcacatatttattttttgtgatgagaacacataaactctgctctcttagtgatttctagtatccacacattgttactaactatagtcaccatgccgtgtattagatctcttgatctcttgaatttacccctccyggaaattttgtaacctttgaccaacatctcctcccctcccccatcccttagcccccgttctatccatttttcactgaggtaaagaaacactaagggactggcgaaacagccttaatatttctctttcattctcacccacatgttttgtgcttctgtacagggaggtcccttgccgctctgaaagcagatttggaaacatgttgaatgagtcccctccagttagggctgacaacgtcaacctgtatgtgtcatgtgagatggatgtgtatgctttaaggaaaaaatgatttgaatttgaaagaaatcactcagccaaaagcgatgggggcccctttgtctgtgctgctcrgcacagttcatattttaggtacacgaaaggcaaatatgggactagaaagaaagaaaatgaggctaatttagagtcttctgcccatctgtttatgagcagattgactagtaaaagttttgttctgataaatgttaaatattttgaaaatgtcagaagtatactcagaaaactcttttccaaagtccctttgaagaaaatagagattctgatgattaattctcataatattaaaaaataataaaaagagtttcggtgtatttactcattagcaaattaataacagtggttttcttttggaaggcaaccaagtagactaggatgcacctgggtagagtatctttttgggagttagatgagaacagaaggggtcatcgcagcaggatgtggtatttggagatcttcaaattgtggccatgcttaaccatctacttttatttcatttttccctgccttctttcactcaccctctctttaaagatccattatattttggttttggtcstattttatttttctttcacattgataacatcagttaagaagcctcaatgctctttcttgtgccttctcaatttcatctttctttgaaggaaagctacttttttcattgtgataatcctatatatacaccatcttcatccccccaccacacatacaccccaggggttaatagagcgtttaactggtaatatgtaagrttaactgcaatgtattggtttagtaagtaaagaaaactctttactaggttaaacagctaaacttaaggaactattatacagcaatttattaaatatagtctttgatatgtgtaggcaattttaaaattttctaatttaatgttatttgagtagctaatacattaacagtttttaacaatcaaatgattattaaaagttataattcaaaagtctaatttctactcctctcccagacctgacccccacccctgcctcctatgggtacttagtcgtttttttgagacttcccaggatgtctttatgctaaaataaacaaatgggtatataattgttatatagaggttagtgtagtaaatactgctaaccgtagattgatctgagcttgctttttttccttgtaacaatatatcctggaggtcttttcacattagtacatcmaaagtttccacatttgggggtagagggagctgtacagtattccaaaatgtaaatatcccacagtttatttattccctaattgatgaacttttaggttattcccagtcttttgcctaaaaacaatgctgtaatgatctatatactctgtatgtagatgatcacatccatatttagatatagctcycagaagaatttcccaggagtgagatttctgggcgataaagaaattcatctggctttttgaataatagtgccaacctgccttccataagggttgtactatttttcactcatgtcagtaatatatgagaatgcctctttcttcacacttatagcaacagagtgtgttttcaaacttttggaacttggccaattgcattgttgtaaaaattggtatcttagtatagtttactttgcatttttcttatgaatgaaaaatttcttctaatgtttaatggtcattgtattgactacaaatagtcttttcatgtgttttgataaatttttttactaagtcatttggttttttttcttgttgagttctagccatcatctgtgatataaattgtaaatatatcttcccagttggttattcattttatgttttcattgatattcttctcctcttttttgagaagaaattgaagtacaatacagctcttcctttccatagcattgtggaactgtaaaaatgaccatgcaagctgaaaccatgcaaagcaatcttaatcaatgaggatagtcacaattatttcatgactttaaaattttttatcaaaacgttaaaaacttttgggaggccgaagcgggcagatcacatgaggccagcagttcaagaccagcctggccaacatggcaaaactccatccctactaaaaatagaaaaaaattagctgggcgtggtggtgcacacctgtaatcccagatactagggaggctgaggcaggagaatcacttgaacccaggaggtggaggtgagccgagatcgtaccactgtactccatcctgggtgacggagtaagactgcttcaaaaaaaaaaaaaaaaagacaaaaacaaaaaactctattcctggcatttataaatatatacagaaatgaaaaataagaaaactgatatgtatttagtacactgtaacattagaaacattgacaaagtgttttattttttgttaaaatcttatcaagagtagtatagcagtgcttgccgctgtcttatdtgctttgcaatatacagcaagcatcttttctgggtgaactatcatacttctgagtttggctcggttgccagcattttatcctttattttttctgtgttgtgaaatatctccaagagtttttttaagtgtgaaatttgttgccaacatcacttcctctggcttctcatctctcttcatcctctgcatccctttggtcacaaccaccttcctcatttgtgctggccttcagtctggctatgcctctccaatggcagcagtgtcaacattcccagggtcagctctttctcctgtaactccgtttacattcagttcaaatttcacttccagtgttatcactttgcggtacttttatctttgttggccaattccctctttcawtgatccatttttataaaatgccacatggatttatcagtgggggacagggaggcaccacagctgcttgctttgctccctgtccatgaagtgaataacaaatgcacagtgaccagttgctaatagacattggaagaagggatgtgattggtcactaatcatgatgaacacacatcrgttatttacacagggatttcagaggagctaccaacaaagtttatactttagttacttaagtttaatgtactgtggtgactacactgtggtattgaggtatttaaactatgtaattgatggactgatgttatttaactaaaaaacagtagtaacttcaatttgttcatattaaaccacacaaatcagggctgcctgtatagaaaattaaaaagaatttaataataaatttattttgttattaaaataaraattttaataaatctatactcatctctgagacttgacaatcattaacattctgttatgtattctttaagggtttttaatagaggaartagatcattgcaagtaaggttgaagttctcctttgtcctccaactcccatcccattccctttcttaacctctgaactcacatatcatcatgaattttagagtatccttcattctctctctgtttctctctttttgacatttatatatatacatgtaaagcagcaatccccaaccttttttggcacaagcactggcttcatggaagacaatgtttccacggacaagggttgggggaaagatggtttcggaatgaaatttccaccacaggtcagatattagactctcataaggaacatgcaacctagatccctcacatgcacagctcacggtagggttcatgcttctatgacaatctaatgtgattgctgatctgacaggaggcggagctcaggtggtaatgctcgcccagctggctgctcaccacctgctgtgcggtctggttcctaacaggccacagacccgtactggttcatcgccyrgtgtgggggtagggggacccctgatgtaaaggtttcggtgrgaaatatgtactcttcggggatgtgctttttaatttcacaataatttktkttttttgtttttcacattttcccattgtttcttgtagtcttatctccttctggaattaaaaataatttttgtcttctccttttccccccatttttagaagtcatgttttctgtttcatcctatttctattcaattagtggagtaatttagatttttacaagattaaaaattatatagagatgagtattattgatgacctgccctcttcacagaaatagccaacactagatatactcatgtcctcatgtcgtatttatataacattttcctcataaatttaataaccttcttactgtttgtcctccagatttattcaggagattgagcatgctctgggtcttggcccagccaaacagtgtcctcttcgagagtttctcaccgtgtacatcaaaaacatctttctcaatcaagtcttggctgagatcaacaaggagattgaaggagtcactaaaacatctgaccctttgaagattctggccaacgcagacaccatgaaggtgctgggagtgcagcggcctctcctacaggtaataatacactttgaacttactatttttatcagcaattttcattgacttggcaagtgtcataaatttaaaaaagaagaattaccatckgtttccatattcatcagggacaaaacaaaagaaaataaataggcactagggaaatttagatttaatgtagttggataatggaagttccttaagatctttaaggaaaattaaaaaaaaaaacggttagctttggatatgagagatggtgaatctcattaacatgcaggcagttcctcattattatgcctggaattggtccttgaaaggaactatttttccattggtgaatgcatccctgagtatgaaggattaacaggaaggaagctatgatgcccaacttcaattaccagcaggaaaccctctataccttttaggggcagacttacctttcaatgacttggctacctcacagggaatttgaaccagtaaactggcctttaaaagtcaaatcactgaattcacatgatgatcttgttagtactgaaaattttactttatatraaaaaatggtttcttagcatcagaaaaaataaaataatctgtcagtagattttttgattaataggcttgaggcatatattttatatacattttagctggtgacttggaggtatatataaaactaaaacaaaattagtaggagtttaaattataggtatacattaactattattacgttggaattgaatccttattgtgtttcttcatttaagagtaggatgggcacagtctcacacttttacctaaattgtacaatatgagactattcaacatgtggaaggcttgagcttttcaaagagaagttgtatatatggaagggagttttacttgttccagttgcctgcccttacctgcctttacatatgtttcccttgatttttctttgtatgttagaatttacagaagtgctggacctttcttagagaagcgtcctagttatgagcattcttttttatgagcaagctcttttatgatattgataaaatagaataggaagatgttcatttggatggtctgggtctctgttagccatgtgcctggtgagggatctgtactgagtgttgggtgcagagaagggggaatgccaaaggaacgtgcttgctcttccttctgctggatatctcttccggctctttgcatggctggggtcttctcctctctgggtgtcacttaaaatgtcatgtccactggaaggcttttcctgactgtcctacctaattaggtcccctttcctggttattctccattctcccatttttccttaccaccagccccatccattgtcaatactgaggccaaaccctatggactgtgtctgtggactgtgtcatggaggcccccttgccaggtagcttctgatcaggttctgccgataggcagcacaagtagaagattggaaagtgggaggagaaagagggtgggtgatttcttctccccttcctcttcactttggatcatggccctggctgtgagtgcctccctccataacaggagatcctgccaggtgacacatcctccatagctccagctctcactggactctggcaatgtcatttcttctccttgcctcttgatttcagctttctgctgttacaacctctggatgcctcagtatcccttgttcctgctttcaaccctgcccatacctctgtaagttatttcttcattcatatttctttatttgaattatctaaatggaatactttttttttttttttgtcaagatcccagatagatctccccagttaatcaggattttaacactttggttttttcttcctaacacttatcacaaccctaattattaattaattttgctaacttgtatattttctatcctttcccactagaaggtaagttccaaacacatattataatgtcaggcagcaggaaggtgctcaatgaataacttactggatgaatgcatgttgcatggatggatggatggatggatggatggatacagtgaataagtttcgagagtcataagtacccacagagtcagaataaggagatgagaaatagagagtaacaaaaatatgtttacttttatgtgttgtctgaccatatcattagcctcatttccatcagaaagcctttcagtatttatttctctgaagtgtcacgctatatgccatacagagcaacttgaacatgtttagtgcactgaatttaaaaggaaaaaaaaggcatcagtacattacagagtgagtctgtgaaccaataatactggcttattaaatgtgataatttgcagcttcagtagcaaagatgcattaaaactcataactcattgatctgggccatgtcaaggccatatgctaccaacaaaatgacatatctgggcagtctgtccatgtgcctgtcagatcactcccaacctcatcaccgccattttgtacatgttactgtgcctcttgtcctttaagtcaccgtgaggctaggtaagaactccagctttacctgttctctctttgaccttgtcaacatataattatatataagtgaataagtcttgaggctaagaccattcaagctattaacctgcaaatttttttttctagagttaacacacctgcttcatttttttttttttttttttttttggtgattatgttgctctcctttttttcattaaaaaaatttattttatgaaaatgcaaattatttaaaccatatcactaagtttgtttaatattctcagagagagttatgcagtttaaaaagcaaacaaggagatggttatttttttttcctatctttggtwttttcctgcmttatagtgattgtaaattgttttctaataattccccatactcaagcttcattctttttttgtcttcctctacaagcacagggtgaattttattcttgaattttttctatgtttccttaatattttattcccagctaattgtaggtggctaatctgaaaaaagaataagaaataattctcaaaaattttagctgagaatccaaaacaaatgttaagaaggagcttggagaaatatgtgtgtgcgtgaaagatgcatgtgggttaaatattcaattacaggaagtataaaaatgtcctttaaaattcttccctttgctaaactgttgtttggtcacagagtagaagagaggacatgcctttccctgtggcaacacccagtgtcacacagcatcagcccagccggattctccagggagggtgggaggacagctgtctcagtgatgcttccagttgtttgataacggacagacacggtgcctaggagccctgtgaagagaaccccaggacactttgtccttgtccctctgaagtggcatctgggcagtacagacacttggattattagaggcatttccatgggtgccaacatgtgttctcagtgatttcactttctagkcacaggttccataggagggaaggaaggaagtcagtaggaaggaagagatgacaatcagcattttatacctaaaacactgtgcaagtgttagcccaagctgatacagcagagtaacactagtggtaataatagaagaagtaaaaacagtaatgatagcagttataatagtagatagtagtaatgatagcagctaacactttagtagcatttactgtgagtcagacactattctgggtgctttgtctgtattgawtgcaagtgtttaaaatgtatggcaactctgagtggtattctttttatgaggaagaaactgagaaacaatgaaattaaataacttgcccacagtcacatagctgccaagtagtagaactgtaatgcaaacccaggcgatgcaaccctggagtcagtgctcccagccagttctacccaaagtggattctgaggattatgcttgtctgcaagctgtttgtcaccagtctgctatgagacgtagagaatttaggagtgagcatttagacaattttttttagcattttgacattgtctgttgaatccagtaataaaaaattgggcctcatgttttgtatatctttgtgggttttaacatttcttttttctagcaattcatttttatgttttataaaagtatcaatgtgcaactgattggggataaaaactgggctctccatagttagagaagaactgtctaaatcccttacttttcggtactgcctcacagagaggtaaagcacagaaccatcacttttaccccagtgcctaaagcatttttcaatagatagatagaaaagtgcagatatgtgttacagttgggtctctcctaaatccccagctcctagaatagtgtctgccatagaggaaacactcaatatttaataaatggatgaatgaatgagtgaatgaaaatgaatgaatgaatgatgacttccttagtaccaggacatggctgtgttttctgcgcatggtataaaactcatggtcttgggtttaagatagttaatggtgctaaaattaaaatgtcacagttcttatgcctctaatgctcccaggatgacagcaggattggatacatctcatggtcttaccatttgagatccctctgttgccatcactttttctgcagaatggcctccacctgttgcaaggaaagcatgttgattcaaactaaggaaatacctgaagagaaattattcatttctcctgagtcagattctgaacacrgagttctggaaacagtccattgaagtggataccatctcatgctttatatatctcccagagtacaaattattcattccttaaacatgaggagacagacggaactgattcagttcatttccctggtttaccattgatttggagatgccatttaatttatttcttctttggtgtctccatctgaaaaaaagagcgaggggactaatgcttaaggtttttgaccccttacccatcaaattgctgaataggcaactatctatgtgaacaaatggtacaagcaaactttcttcctctatcaccaatggaatatgccatacccttgctacttagagagtgttctgtggccaagagcatcaacctctgatgagtctgcatttgtatagaatctccagatgatttgtatatacattagagtttgagcagcattgccttataccagtgcaaaagcaagtgtggcccatggaccgggagcatcagtgtggcctgggagcttatgagaaatgcagattcctgaacctcactccactctggaaatctctgttcacaccagccctctaagtgattttggtactcgctaaagtttaagaagcatactcttaacataacgtcgtcatgatacccagcgtgaagttaggaaacgggatctaatgttgtggggttttagctttgtggtgaacaacagtagtcattttttaaaaagtattcagctttgtttcatgcaggcccaggaattgtaaaaacaatatttgctgcagcagcagaagctgcttcctagtctagcacattgattttgcaaagttgtttccaagtacaggatgagcctacattttctggctcatgcagggcaatgtgagacagaggcagcttttctaatgctcaggcttaaactcccacatcactggaggaacaaacataagctgtgcaagtacaaattctgggcaatcttgaaatgtttagagcatattttcattttcctctctgccccagtatttgtcagagtaacttttgagaagtgaaatggctagaatccgcctgcaaacaccacactgtcatctcttcctctgccagctgcactttccacttatatctgcagacttagagcagtgattctcaccaacgctacccattagaatcacccaggaacttcctaaaaataccacttcccaggtcccattggttgctcaggggtggggcgtgcttgggcatcagtgtttggtatgatgcccagatgatcccaacatgcagccagaatttgtacctctgtccttgatctttctactccatcgtatcagttattgctggcagagagagtacatcaaaaattattgttgaaggctgggcatggtggctcacacctgtaatcccatcactttgggaggccgaggcggatggatcacttgaggtcagcagttcaagagcagcctggccaacatggtgaaaccctgtctataactaaaaatacaaaaattagccaggtgtggtggtaagtacctgtagtctcagctacttgagagactgaggcaggagaatggcttgaacccgggagctggaggttgtagtgagccaagatagcgccactgcactctagcctgggcagtaaagcaagactgtctcaaaaatacatacatatatatatatatatattatatatatatatatatatatatatatattatatatatatatatatatattwtatatatatatatatawatatatatataaattatatatatattatatatatagttgaggctttatttaatgcagccaggtttgtaaaagactgctgtgttggatactttgaaccaagccttgtacataagccttggaatcagacacaaatggatttaaatctcagccatttcatttgatagctttgtggctgtcaccaaattgcttaacttctctgtacctatttcttcccctataaaatgggaatcatagaatctgtgtcacagcaacactccagtgattaaatggagtaatgggtgtaaaacatgccctctccttcctaccccgggtcacctgtgagcaggtctctgcgttgactgctttgatgtgttacctgcctggcccttaacgcctgccttccttcctgaactctactgactgcrccccaacccctgccctctctgcccacattttcaacctgcgtcttcttctcatcaccagcttgctgtttacgcaccttctgttctttctactctagcacccagctggtaacttccctttcctgccttctactaccctggtgtgacagcaagagatgatattgtttcacctgctttctccttttcctggagtttgtcagctggccatttattagcagcagaagcagcgtgcagtatttttgtccattaaagctaggggattagtttcctagggctgccatgataaattaccrtaaacttagtgccttaaaacaacacaaatgtactcttgcatagttttggaggccaggagccacattccctccaaagctctggaggacgatccttccttgactctttcagcttctggtggctcccgtggatttttggctctggcagcgtaactgcaatctctgtctctatcgtaacgtggcgttctcccstgtgtctcctatgttttcttttctggctcttgtaaggatactttcattggatttagggtttgtcttaatccaggacgatctcatctcaatccttaccttaattacatctaaaaagatttccaagttaagtcacattctgaagttccgtgtagaattttggagggagacactattcagtccactacaactcataactagaatgcaatcgattcagtttgctatgttttccttgacgactctctggcaggaagcagtgtggaagtattgccattggctagtctgggtggtacacacctgtaatctcaatactttgggaggccaaggtgggggtattgcttgaggccaggaattcgagaccagcctaggcaacatagcaagcaactgtctctaaaaaaaaaaaaagaaagaaagaaaaaaagccaggtttcatgatgtatgcctgtagtcccagctactcgggaggctgaggcaggagggttggatcacttaagctcaggagtttcaggttgcagtgagcaatgatcatgccactgcactgcagcctgaatgayagagtgagactctgtctctaaaaataaataaataaataaataggtattctgttaaggcagtaggcccaggatggtctaaattctagatgtcaacaaggttcaaagtgaaagtttttggtaggctgagtgattgctggagctcttactgaaagttggtggacacagctacttacagtataataatttgctagagataattatactgctgcccaaacctattatctccccagccaagctaaggcactgccagtaacttcttctggtttcccgaggaagtgtggccagcagcagtagcgtattgttttcatcatatcacattatgttcatatgaagaatgttgcatttgartggcatttgcatcacagccagttgttgcccttccactctggtagagaatagattcagcttttattagtgtaaatagattagtcccatttaaggtctgctggaagtcattatgaaaatcattaggttgaaaagagaactgatcaattgattttttttccccctgtaagctctgagagatggtgctaatggtctcactgtgctaaaataagtcttagaaccaagatgccttggggtctaatctgattcttcagtatttatcgatacctaaagaaacattaacttatcactcatagttttgattttctttgcattttactcttgttattttatttattcactaacagtattattttgcctcttcatgtcaagaataatgacttgtggctacctaagactttattgaggaagatggagtggaagatgcctgtgttcttgtctttgtttagattgtccagcactcacctgttcacttccaagataccagagcaaattaaattttttattgctaatagagrcttttgggatctgataacattcgtccatgttttcagatcatttttatcaagttgtgttacttatgtattgttaattctattacttatttagtacattttaattttgtagttttgttgtgattcttcatagccatctttgaaagtgcttactgctacatttcatcatggtgaggtgggaaatgcatataaaacatagatttggtctccataatcatcagctcagtgaccttagacaagtccaagctacttgtcttgtctgagcttcccctctctcatgtataaaatgagaatgacacttgcccagacttcctccaaagactaggatgagaagtactatggtatcatggattcagtagggctttatgaagtcttctacatattgatctgtttcataattattattagtggtccacatacccacatgattgctccattcagaaaaaaaatccaacagtgttaacaggagtggtgctaagaaaacacctacatgaataaaaatattttctaccaagtagaaagcctcactgatatttactggtttgtttcatatatgattagacaaccagtataagaacctggcaatattttttccccagtttatcacaaagatgttttaaatatacaaaaaatcaagaaaaaaatgtccagtgaacacccacatactcaccacccrgattctaacattaacattcttctatatttgttttatagcataaccaaacctggtcattttgattcctcttcagccttcacagaaatgaattctgcgtcattccctgagtaccttaccatggtgctgttcccagtattttaatcttagaaaatctgaacatacaaagagatacattaggtaagaaagtagttgcttcaaaagagtatttattttctaaaagtactcatccacacatttccttcacatagtgtcrtggaataggaaattgaccagctcattcttatgattaatctataagtagtgcctttattgatataatattacaaaggaacttgtcctcgtaactgttgatgaagaaggctgtgagttgagccactgagagatgattttttaatataccggcagaacaggcccattatatgatcaaattgaatttccataaatatcattaacttattgtcttacctttgaatgaaaaagaaacaggatctcatctgactagctggttttcttagagaagttcctagttaactagacttctgtaagtaactttctgcaaagcaatgacagaaaaaaattatttaactatatttaaactagcttctatataatatagccagctagggtttyggaataataacagagggactagagataaacattattttcatttgtcttcagaaaatcatctgccaccaaccttacacattttataaggatccttaatgatctcagcattttttatttttgaggtcaaccattattctgaatgttttcttcaacaatctatcatctctcataatgtatttggaacagattttagtttagatgcaacttttaaagaattcatctactacatctgggttacgaggtcagtttaaaaagaatgaactggaggactttatctccttgggtagaggagtcatgagggactactgaatgagaaagtaattatagtcagtgacacttgtttaccagttttgcttggtgccaagaaacttgtctgagcacgaggctgtttcagaatgacatcaatatagggataacccctgggttttaaaggaagtctctgagattactttctatcatgagtaaaggagccccactgatggtcgtcttagttgtcacctagactgttctatgaaacagggcttatttggggtaagcattttgaggttttgattggctactgtccattttgatcttgtctcagcccactccttggtggataagcaggagagaaggtaatgccttatgacagatctgctgacaggaactgaaatacattaacactctgtcactcagatctttagagggctgcctttgcctgaaatatatttgactttacttgctaacaaaggcatcttcagatttatttcttttccttaaatgttagagaagaggaagagcgtcccattgaaagatactgggaagagaaaagcctggctcgacagcccaagcaaatgatagttagcattcttgggagcagcagaattgctgatcgtgcgagattactagtaggagccagatgagtgtagacagagaactgctgtacttaggaaatttttgaggttcttatcctaagcagtttttgccctatgtggatgttgcagctctggcttaggatgctccagtgagaaaatgaagagagagaaacaagactatctcagcttcaaagtttaatggccatttaagattaacatttcaagtaaagcagctgcttttcttcatgcttttcaaggatcctgccctactcaaaaacttgtgtgtacttaatcttagcatagacaatctcagatgggctggtgaaacctgatacatctcttataacaagagtgacatgacacagtgaaagaatttccaccattgaaattttaataaaatgaaatgattaatatttattcgacacctgctttgtgctattgctagacaaggtgatgtggggatacagaataaacttaaagcaagactycttcttctcaggaatttagtagggatcaattaattaggaaaccggaattcctcacacctacaaatccaagaacagtaaaggacactttataattgagtactgaatgtgatggtttagaagattttcactataagagctgaggagagagacacagaaggctggaggattcaagagagaccttaggcaagaagtgggccctgagtcactgtaggatgtgtagaaacgaagaaggcagaggagaaaagtgacctgaacaacagtcacaatgtaagcaaagacacaaaaggtaaaactgaccatcgcgtgttcttgagacagtgagagtctaaatgagtgaaggaatgaaaggagaatgagaaataaggttaacgggggcacaaaactctaccagggaggtctcaaactgaacacaccagtttacttttgaagtgaaaatgatacagaatggtgaaagtttttagagaaggtgcatgttcaaatggatgcacttttaaggagcactgggccttggcagttcagacaggattaggaggcagagagcctggggtcccagaggcagctaaggcagggatccactagttccgctctgaaggggagacagaaagttttatgtgtttctctccagaccaaagttttgggtgatgacatcatggctgcctgagattcagtgagccacaacggtgtgctgagcttagcatttgtcatcagtcttttgaattattgtcctagttgaccacactaccccaacagtctgactttctcggataaatattgcacttctgaatctctgtgagggtgttccctgctgagccctcaaaggcatgaccaaatggggttcatcctcacctctgtgtccacaggagcagccatcttggctttagcacactcacgtttgtttaaagatgaagctgtacatttctcattcattgcttttttagacacacaggagctctgtcagttaaagtcctgctttggggaaaaggcagcatgcagccagttcattaacaggttatctatgtcattatgtcctttttggattgtgcatattggaaatacagtcttttgaggaggaaaaaaaaagccatctaggcttctagtttccctttctttttcttcttcatttttatctccttttttcccctttatagttacagctattcccctgatggatggtcatatctgtagagtccagaataccctgagtattcacttgcaaatagctacaaagtcaaatacagataactacacttaaatgagagctattctctacctctcctcactgcacacacactacttctctttgccccatttcaaccacaggagcttaattgcttcttccttttttttccacaaacatttcggaatttgttgtccccttggtcatttcaaggtcaaggctgcctatcaggcactcgcagaagtgctccggtgaccttgcttgctgtgtttgcccatggcttctgacgctttaccagagtgagcagcctgcccgagcagagagtaggctggcctgccagttaatttcttgcctcgtgaagaggaggagtacacttttcttccagcctttcaaaatgttgctttagagccaaaagaaatcttcaacacatagtaggcacttacttgctaaatgaataaaatgaaaattgccaacagctatgttaaagtgtggcctctagcttacgtgtttaggggtagggtacgtaaaagcaaacctctgttgtttgccaaggaaaggagtatcaaatatttgtgtttgtaaaaaataaactgtttatttcagagaagttatagatttatcaaaattgcaaagacagtacaaagagttcccatatacccccactttccctattatattaatatcttacacctatattactgtggtgcatttgttacaattaatgagccaatattgacacattattattaactaaaacctataccttattcatactgccttattttgcgtatatgtgtgtgtgtattttttaaacttaatgccctcttgctgttcgggataccacaatacattttgttgktatggcttcttaggctctcttaaatgtgatagttttctcactttcctttcttctgatgaccttgacagtttttttgtttgtttgtttgttttgagacagagtctcgctctatcgcccaggctggagtgtggtggcgcgatctcggctcactgcaacctccgcctcccgggttcaagcaattctcctgcctcagcctcctgagtagctgggattacaggcacccgccaccacgcctagctaatttttgtatttttagtagagacggggtttcaccatgttggtcaggctggtctcgaacccctgacttcgtgatccacctgccttggcctcccaaagtgctgggattacaggtgtgagccaccacacctggccgaccttgacagttttgaggagtgctggttaggtatgtagtagaatgtagttatgctctacttccttaacgatggagtatcagtataaatgatttagaatgcttctacatgagagagctggctgttctccttcatttttgtaattatttggttatttatttgtcagtatagacttatagatttgtattttatacttggagttataatccactttattttgctgctgaaatcgttctagctttggacatcagtaacttctttgactggcttctgttatttcctaagtctccatctttgtgattttttttttttttaagcatctccttactttctggcactacaaggtgctcctggctcatcttgtatattgcctgccccagccctagaatcagccatttttctaggaatcctagttccttttattagagactagcattggaaaacaagatctggagttttagaatgtttcttgtaacttgagtatcattatttctaggcccactcagttgacactgaaaggaaacatatatgtgtatatactaacccttgaatatattcatatccgtatatatttctatatgtaaccatttacgtctgtattaagctaaaaacgagttcatactgatgtctccaacactaatctataactacatggagcattctagcctcctctcggttaggtgtgacctacctttccctcagtgagaaacctggctcccaccatctcccattaatttacttaactgtatacatggagtctagtatacatgtgtagcaataacacagtcattcaattacagtatatacgtatagcagtgtcagaatagttaacccatacccttgtgggaaacaactttatcagctagtatacagtgcttttatagtttattttgcctttagtcttatggactatactcatttctagtgttacttaggtcagtaccttttctccctacacccttcaaagacattgttttacacatttgtaatagttagacggttttgtcacattctgcactaaatcctaggattccatgatatcccaaatgatgtttttaatttgcatacattaatgttcattctttgtgctttaaagttctgtgagttttgacaatgcaaaatgttgtgtgtctaccatgatgatatcacacagaatggtttttactaccctaaaaaattcccatgcttcacctattcaacatttctctctttttaagactctggctgtcactgattttttaactgtctctatagttttaccttttccagaatttgtatcattggaatcatacaagmagtagctttttcagactggcttcttacactcagcaatatgcttaagattcattcatggcttttcacgacttgataactcatttcttcttatcattgaataatattccattgtattgataaaccactgtttctaaaatacattcacatattgaaggacatcttggttgcttccatttagagttattatgaataaagctgttataaacacttatgtttagttttgtgaggatataagctttcaaatcagttggtttttttatgtattgaaattgtaggggtcagtgggcttgtggtggtggtaggggcagatttacaagtaaacaagtatatcacaatggtaagtgctttcataaaactataaatataacatgtaaactgttgaatctacataagaaaaaggcaaaagtaaaaatacttaaatcattcttaggctctcctatagaaaatataatatttagcagttctttccaggaaaaacactcccttaacacacacatatgcacacacatgcacacacacatacacaccccaaaccaacctaacttgctgtagacacactgttaaagctctagcaaagaccacaaggcaggtggtagactctgcaaaacttaacacaatgatttttcttcttccaactcaaataataggagagaaatttcacgtaaaggtgaataatcagtccctgagaaggaaaaaaaaaaaaggcctagggatgtttaggtatctggaaacctggaattgattaataagacaaaagaacaaatatagttattttaccaagtcatttagagatagcaacaagtcatttttttctgggatttggggttcctcccagatatttcttatagagggagctaaacccgaaggagtgtaccaaatagtaaatgaaatcttcctttgtcaagagctaactaggagttgtttttgttaagcttctgggaagagatggctttgaccaggtggccttttagaggcctcttgcttccagcttgcacacttttgtttggttggttggttggtttttgaaacagggtctcactctgtcacccaggctggagagcagtagtacagtcatggctcactgcagccttgatcttctggactcagatgatcctcccaactcagcctcccaggtagctgggaccacaggcatgtgctaccacacccacctaatttttttgtattttttgtagagacagggttttgccatgttggccatgctggtctcaaactcctgggctcaagcgatcagcttgcctcggcctcccaacatgttggatttatagatgcaagtcaccgtacctggcccttgcacaactttcaatattaggtggctgattcagctgggccagttagaacctcacttatataccagttattggtgaagaaggtagaatagagaaagagaagtatgtttaccgcctagcagatggaacacacaggaaggggtaccaagcacaccccccttgaatgcacagtgacccctgcatattagtaagatataatataatctcagaggcttgactagattaaaaagctgtccttatttgaagcagaattgtgggatatgatgaggtttctcttcaaataatctgatcaatcttttattctttaattcataatactctccaccccttttccctttttctcctttttttcctttttgcctttgttagatacccaggcatgccacagtaccagacattatcagtactggctcacattccttaccttatttggaaagaggactaattttctagctcattacagacaccccttccccttcctctccacttccttttaagtgcccaccttatcttaaaaaaatcaaatgtttagccaaccgggattagtttagattgtacaaccttaccctggccaatgaggaaagggtatggggcaggacttgcatcaggaataaagactctcgtacccctttgttcaggtgtgctctcatggcaactggccaaggaggcacccctctgcgcagaagtaaaattgtttttctaagaatcctttgttccagtgttcaatttcgttaggattttgagcgttattcctaacaagaattaatagggtggaaggagtatgagcagaggcgccaaagtataagtgcagaaagaactttctccaacagccagcatgacaagaaatttgtaaacagcaagtgatagaagtgttttgatacatagaacataaataataggaaatttaagatttctctttaagtgaatgatatagtttggccgtgtccccacccaaatctcatcttgaattgtaactcccacaattcccacctgttgtggaaggaaaccagtgggaggtgattgaattatgggttgggggggtctttcctgcactgtactcatgatagtgaatgagtctcacgagatctgatggttttagaaatgggaatctccctgcacaagctctctttttttgcctgctgccatccatgtaagatgtgacttgcacctccttgccttctgccatgattgtgaggcctccccagccatgtggaactgtaaatccattaaacctctttcctgtatgaatttcccagtcttgggtatgcctttatcagcagtgtgaaaatgaactaatacagcgaaaaataaaaaagtcagagataagttataatttatgttatagtcatgaagcccaaatatctgagacaggtctcagtaaatctaggaagtttattttgccaaatttaagaatgtgtgcccatgacgcagcctcaggagattctgacaacatgtgcccaaggtggtcggggtgcagccttgttttatacattaaggacacatgcaacgtcaatacatgtaagatgtacattggtttggtccagaaaggtgggacagttcgaagtgggacggggctttgtgttcataggtagataagagacaaagggttgcattcttttgagtttctgattagcctttccaaaggaggcagtcagatatgcatctatctcagtgagcagagggatgactttgaatagaatgggaggcaggtttgccctgagcagtttccagcttcgctttctccctttagattagtgaattgggggtcccaagatttattttcctttcacatagtttagttggtgaatgtttttaattagtccctgggtaagtatatttttaaaaatcatgctatagttcatatatttgtctaaagtgcattagttaaatatttatgtgattatatatttatattgtcggctttttatggagtcattttatagaaatcatcataaatgaatggaatggaagctatctttactctttctcaaccagctttatctagggaaaaccaagctaactggctcatgaaactattgaccagattaacttcatgattactaacccaattatagaccttgtgcctgggtagaaataattaattgccttagtgctagcttagcaaatgcaaatacctcaattagtagcaaaaattctatgcttatttcaattctgtttccttatttctttcaggttctggacatgtaggcacaggctagtttacttacatgatggaaatataatatagcagacaggcaatgttttaaccaaactcatacacatgggataattattctaagtcataaatctttttaataaaagcctgattgtgtatagttagcctacattattaattttccccagctagcattggtattctctatcatataaaggctagacttcaatagaatgttaaggctggaaggtataccttggaaattaatttcttcgctggagtcaagttcaacacattaagtgctttgtctaagatgacatatctggtaaatagcagatccaatagtagaatctaggcccttctccttctggccaattctatttttgttctacctgttaacctttcatgtgctggatggtttatttatattggattttaacagcaccgacacttgtactgtaaaataaatattttgttctgctgaagttcccgaaaagtaacatcttaaaccacctcctacttagggtgactttgcctttccttttgctcctctctctaaaggcmgaacacgtttcactccaaaaccaaataacgcacatttctctcctaatttatggttttcaaaatttcagagtgtttttttttccccttgctgtccagaatgctgtctgaaaagtcacaatgatttaaataattgatggctactttatgaaatcgtcagcctggatccatcctcctgcctccctcaaccgcaagtccttgagcagctaatccttttatgttggatgctttatttttcccttcctggtttcatttagataattatattattcaccctggaatataattgccgttatactgtgggggatgtgggagtgaagtarggtgggagctgcctgctgctggcatctgcaggttgtaaaatgtctgttacactctagcctctaatttttttgccatcccaccttttaaagatttaattatacctgtgtaaaagcataatttgaaatctgacttattattcttttggaagataaaaaagattaatccattgttaaacatgaataagcatggtacaatggaaaaaactttggcctggaattcaattgaactaacaatttttgaatgcctactatgtgccagggacagtactaaaaattaggaagtgcgaaaatttaaagaaaaggactgtcctctaggagggttcatcctggtgatctcctactaacttgtgacatgtctttgcacagtacacttaatctgtctgggcctcaattttctcatctctaagcagagggtattggacctcttctgcattttctcctagctctaacatttggcagtgctccaaaaaagaccataaaatagcagccacattgcttctttgtcagatttaattggaagaatagggagtggtaaaaggtttaaattttctgtggcagaagtcattttgtcatctgtgatttcagctctttgacaaatgattcctttatcttgaatgcattttcttcctgctaagtcctccatgcccaaaacagggtgtctttggaggcagaaggtaacaatctctgagtaactgaaagttatcaaagcarcaaaactttctctttcagattattgcctgacatcttcttagctcgtgaagctgtttttccagtgaggattctaattctaacgtggttttcacaagcctaagtttcactgtttattggttagaagagagagtcacaaaaatgggttttgttcttctttgtatgttatggttttctctttggaggtgtctaagttggataaggtaaaacttcctaactcaaaaacttagaaaacttaaggatmttgaatgtaaatacagtagagcaggctttgcaactttaagaggaaatgctgttcatctctgtcagacccttacagcgctggataaagtaaaccccaaatgacagcatatagcctgttacaaatggaacacaaataacacatgataaaatagagatttagagtggattttataacatgtttattttcagggagcaaatcataacccatttgccttattggaaaaacaattttcctgttacacagggagaatggagtatttaaaaaggaaatgaatatgacaaccaaatggacttgattgaaatcagcaaatttgtttcttatttactcgttgtttttgtactagagagaatgatatggggcccagaccatctctcagcggtaatggttcttttatgaaagaaagaaaacaaaatacctagccatctgagttaaagtagttttcayatgtcctgtagtctctaggggtataaattgatgctgtttaatagaaatctctccccttcatctgcaatattaatgtgttccctaatttgtaatccacttccttttctctcatctttataaaaatctttgcaagcagccctcttctctgctgcctaataataaaatattgtgagtctagtaataatcycaccccctttttggtgagtttatttctctttataccagtgcttctaaagttttaatattcactttcatcaccaggcacatcttaaaatgcacattctgatccagtcagtctggttgcagcctcatgttttgcattttgaacaagcactcaggtaatagctatgctgcaagtccatggtactactttacagtagcaaggctgtagaccaggagtcagcaaagtttttctgaatagagccagaaagttaatattttcagccttgtggtttatatcgtctctgtttgattgtgccatcgtagtataagagcaatcatagataatatgtaaatgaatgagcatggctgcatttcagtacaattttatttacaaaacaatgtggcagctggatttggcttgcaggctgtagtttgccaacccctgcttaggcaatgtatttgaagtgatttgttgttatttttaatgtaaaggttgtcatccatatgtctacatgggattgttttataatggtgttaggcatacatacaatgagtagagtttcattcatggtatacctaggtattatgcaagaaaaattttaagtcaattaacaagataccttttttcctctagagaacttagaataaggtgagaggcataatggcttagctctattgtggcataatagtgccagcgttttgaaaaatcacttctttggcaaacagtcgtttatacttgtatattgctgtgtgcctgcctttccccgaactctgactttttcctgcatatgtgcatttcttttatcccatcccttgccatatcatttggctctgatcctatttggataatgagatagtttgttgtgcctgcaatgaagaaaatgattttaaatgttttttaataagttaacaggagcaagtcttgaaattactgtaatgagataatgacagtgtagcatattgctttgaagattgtgctctggtgaaaaatgtatgctcttaataaattcattttcactgtattttcctcaacaaagttgtttagcatttgcctatttgcctaccagtaatagggaaatggtcataggagttggtagtcaataaagaatgaagaccaaagttgatactcaagtaagaattcttttgagctttaaggtatcagccatggaggacttgtaccaagaccggaatcctgtagtgacaggtgctttataggaatattaaaatccagaacctcagaccactatgttagtttcatctttttaatttgttcattactgcagatcacatgtatttcctttctttgaagttctaagtattacacttgaaagtttctaacagttcatgcacttatttagccaacatgtatcatgtgtatatattcaatccatagcacagtctcagacactggggcaacagaggtgaaggagacctgagtcctgccctcaagtttattagagaagggcagatatactaataaatcaatgttatatctgccatgatctacacatgtatatgacacattgggagttcaggagacagtggtcagttctaccttgaaggtcattttaaaaagattccataaagaagatgatgcttaagctgaatctagaaaggtagatagattccaaataaaggaaaaagtattaacaaagatatagtggcataccttattgaggggaatagatacattttcatatatacctataatcgaatctgatacagcagtgagagtgaatggatgtactgcatgttatacatagcttgcatgaatctaacagtgttgaaagaagcaagacacaaaagaatatgtaaaatttgattctattcgtaacaggcaaaattaagctatatagtatagggatgcatatctaagtggtaaaatcataaaggatagcaacaacaacaaaaatctattacaaaggttacctcagataggaagggagaagattttgattgggcaggagagcacttgggataatggaaagttttatttattattttttattgtattttatttatttatttatttatttattttgagatggagtctcgctctgtcccccaggctggagtgcagtggcgcaatctcagctcactgcacgattctcctgcctcagcctcttgagtagctgggactacaggcacgctccaccacacctggctattttttgtatttttagtagagacggagtttcaccatgttggacaggatggtctccatctcctggcctcrcgatccacctgcctcagcctcccaaagtgctgggattacaggcgtgagccactacgcctggctggaaactttcatttccttaccaagtttgtggttccattgggtgttacctttatgattattaagatgtgcattattactataaactttgtcttaaatgtgttatgttgtatttcacaataaaagagattttttaaaagacagtgagggcctgaataaggcagtaggaaatggaagaatgggtattgtcataggccattcgggctgccgtaacaaaataccacaaaatgggtagctcataaacaacagaaacttaattctcactgttctggaggtggggaagtccaagatcaaagtgctggcagatttggtgtctgatgagggcctatattctcattcatagttggctgccttttctctggaacctcacagggcggaaggggtgagggatctctctgagggcactaatcccatttcatgagggcactaatcccattcacaagggctctgcttttataacctaatcacctcccaaagtccccacctcctcatactgtcaccttgggggttaggatttcaacatatgaatttgggaagtggttcataaacattcagtacactgaagatgtgaagggtggtaagcattagaatcacctggccactgataggagctgggaagccagagtctaccatggttcccaggttttttaatttgttgactaggaagatggcatgtgctgagatggagaatatagtatccacaatgggcaaggctttttctgctgcagcttttttttccttttaggtccattcttattctacaaagaggttatttttcctgcctccttcctcagataggtacaaatcagtaccatttccaccacagtcctgccaagaaamctactcagttccccatctttatgtatttatttccagaaagttctttttaaactgttattttaggttcaggggtacatgtgcaggtttgttatataggtaaattgcatgttgcaggggtttgatatacagattatttcatcacccacataataagcatagtacccaataggtagtttctcagtcctcaccctcttcccacccaccaccctcaagtaggtsccggtgtctgtttttcccttctttgtgttcatatgtgctccatgtttagctctcacttataagtgagaacatgcagttttgattttctgtttctgaatgaggttgcttaggatgatggcctctggctccatccatgttgctgcaaagaacgtgagttcattcttttttagtattccacggtgtatatgtaccacattttctttatccagtttaccattgatggacatttaggttgattccatgtctttgctattgtgaacagtgctgcaatgmacatatgtttgcatgtgtctttatgttagaatgatttatattcctttgggtatatactcagtaacgggactgctgggtcaaatggtaattctgttttaagttctttgagaaatcctcaaactgttttccataatggaagaactattttacattttcatcagcagtgtgtaagttttcccttttctccacaacctcaccagcatctgttattgactttttagtagtagccattctgactgatgtgaaatagtatctcactgtgattttgatttgcttttctttaatgatcagttgtgcttagcattttttcatatgcttcttggccacatgtatgtgtactttcaaaaagtatctgttcatgtcctttgcccacttcttaatggggttgattattgcttgtaaatttgtttcagttcctaatagatgctagatattagacctttgttgaatgcatagtttgaaaatatttttcccataatgtaggttgtctgtttactctgttgatagtttcttttgctatgcagaagctctttagtttaattaggttccatttattgatttttgttttcattgcaattgcttcgttatgaaatcttttccaggtcctatgtccagaatggtatttcctaggttattttccagggtttttatagttttaggttttatatttaagtctttaatccatcttgagttgatttttgtgtatggtataaataacgaaggggtccagtttcaatctaatgcacatggctagccagttatcccagcaccatttatcgaatagggagtccattcaataaatgaacaaatttcttcattgctcatttttgtggattttgtcagtcagatggttgtagatgtgcagcattatttctgctctctaatagggctctctattctgttccattgatctgtgtgtctgttttggtaccagtaccatgctgttttggttaccatagtcttgtagtatagtttgaagttgggtattgtgatgcctccagcttcgttctttttgcttaggattgccttgactatttgggctcttttttggtttcatatgaatttttaaatagtttttttttctaattctgtggaaaacgtcattggtagtttgataggaatagcactgaatctgtaaattgctttgggcagtatggccctttcaacaatattgttttttcctatccatgagcatggaatgtttttctatttgttatgtcatctctgatttctttgtgcagtgttttgtgactttcatcgtagagatcctttacctccctggttagctgtattcctagtattgtattctttttgtggctattgtgaatggaattgcattcttgatttggctgtcaccttggatgttgttggtgtataggaatactactgatttttgtacattgattttgtatcctgaaactttgccaaagttgcttatcagatcaaggagcttttgggcagagactggaattttctaggaatagaatcataacatctgaaaacaggaatagtttgacttcctctcttcctatttggatgccttttctttttttttgtctgattgctgtgtccaggacttccagtaatatgttgaattggagtggtgagagaaggcgttcttttcttgctccagttttcaaggggaaggcttccagctttgctcattcagtatgatgttggctgtgggtttgtcatagatggttcatattattttgagttatgttccttcagtgcctactttcttgagggtttttaacctgaagagatgttgaattttatggacagccttttctgcatccattgagctaatcatgtggtttttgtttttagttctgtttatgtgatgaactcacatttatttatttgtgtatgttgaaccaatcttgcatcccagggataaagcctgcttgatcatggtggagtagctttttgatgtgctgctggattcagtttgctagtattttgttgaggaccttggcatctatattttattaaggatattggccttaagtttttttgttgttgtgtctctgccaggttttggtatcagaatgattctggcctcacagaatgagttagggaggagtccctccttctcaattttttggaatagagtggtacyggctcttctttatacatctggtagaattcagctctgtcaatttctgtcaattgcctgtgttgaaatccaatgactacctcaaactatttctaatctcttttacatttttacccaaccaatttaatttcttggattcccacatattccttttttttttttttttttttttttttttttgagatggagtcttgctctgtcgccagactggagtacagtggcgcgatcttggctcacagaaacctctgcttcccaggttcaagggattctcctgcctcagcctcccaagtagctgggactacaggcatgcaccaccacacccagctaatttttgtatgtttagtagagacgtggtttcaccgtgttggccaggatggtctcgatctcttgatcttgtgatctgcctgcctcggcctcacaaagctctgggattacaagccacacattctattcttaccagcttgacaaatggagtacctactgctcattgttcttctcattggccatacctccctaccatgcttctataggtagaacaacatcaaagtatcatatgcctcaaactcaactcaggtgtttgtaaccaagcttagaatccccttcactggcccatttctgactaaaaaggaggtcatttcaggcactctctgaaacatgacctaaaaaaacccatgtccacattaaaaccacactagattttctactttatagcaaatttcattgtatcaaatatgaattttatttgaaagggcctttgattaactcgagcctgaaaatccaaagttgtatcttaacattgaaatttgtatgtataagtagactctacatcctgggaactttgggttgtattgcttatgtgttttctctttgtatgaaatagagtgaataaactattgcctatttagaaagatgatatggaggcctactctgactaggtagacatgtgctttatgttgcttttctagtgcaagagctgcagtttcatgatgcatgcacatcctgttgcctgttttgttttactacaaatggcccactgggaatattcccttcagttaagatgtactgagcacccagcatgggccaactagcatgataggcaggttagtaktgtgtgtgtgtgtgtgtgtgtgtgtgtgtgtgtaaaatacaatattatatataatatacatattatactatattttatatatatcttatatatactagatatataagatatatataaaagaaatacaacgtttgcccattatactaactgaagatacttgtgagttaggctcatcccaaactgtccagtatttgcttctcttagaaagtccaaaagcttttcatgtaacttggtgggctttctccctgacagaagcatttcacatatgcctactctctagcatgtcattcctgccacatatctcagccatgggcatctcactctcagctagtgcagcctatcttgatacctgctcagaacttggtataaacaaaactctatatacttcatgttgcatgcagtgagctaaaggaagctttgcttactttcacagattacaggtttattttataatcatgccatgaacacaagtcagagtaatctgattctttgctgcagtggcattagagcactgatagcacactctcctttttcagggagaatgttgtgtgtctggttgactggataaactcttcagtcttataggatttgaaagaacataaaaggcaggcatttatttactataataaaacaatagacttkgcaatgaattctgtaataactgccttttaatcctcacagtcccccmcacacacacacgagaactttataccccccaaaaaaaagttaaacgtcacacttactttattttatatctctgaagttggtcttcaatcaagcaaaaaaataagggataaagtgaaaggaaatttgagaaaagatcctgcaagaagcaagctgagactagaatttcataaaatccatttctagccctgtcagctgcctgcctcattaccttagactttcatataatcttttaagtctttagttcaatctttctactcagttatttttcttcagtttcttgtaaccttcaaaaatgctaacaatagaaatcacaggccaacctgaagttaatccagtaccttgtaaccacagccttttaccacccttaactgasctgtgtgtgggtggcttgcatcccacggttggtactctgggcttagagagtccttgcatgctatgtgggtggcgttcatcctgtagtgttcctacgggtttagggagtccctttccagtacccaatcagatatacattgttctttatatgctgggctgaaagattccatacttttgtttctaggaattcaggaccattcaactaagataatacggtataatgcagggaccaacaatctttttctttttgggctatgctgtctgtgttgcagctatgcggctcygcctttgtggtggggaagtagccatagacaacatatatataagtgaatgcatgtggctgtgttccagtaaactgtatttacaaaagtgggtggcaggccacatttggccctcaggccgtactttgctgactcctggtatctggacaagattgctgggtttcgagctgaggtttcacrtggggcttgagacccatataatcacagagtggtctcaaatgggtctcatacttttgtatgtatttgtaaagttcacggtaatagcacttgccatgccttccttagaaagttacatgggataatttaatttttaatttttgttaacattctatagacttaaaaaaatttttatttaacacattatacatattgatggagtgcaatttgatacttaggtacatgtgtttgctacataatgattaaggtagttagcatacccatcacctcacatatttatcacttctctgtggtgagaatattcaaaagcttctcttctggctattttgccatatataataccttactgttaaccatagtcaccctactgtgcaatagaataaagagcataatttagataaataagatgtgttcactatgatatactatgtaaacatagcctttttccctaataagtattattagcagcagcaagggcaatttttctagagggggagaggattaggattcacttcttttatttttttaattttttttttttttgagactgagtctcgctctgcccccaaactggagtgcagtggcgcggtctctgctgactgcaacttccacctcctgggttcaagcgattgtcctgcctctcaagtagctgagattacaggcctgtgccactacaccagctatttttttttttttttttttgkatttttagtaaagatggagtttcaccatgttagccaggctggtctcaaactcctgacctcaggttatcagcccacctcgggctcccaaagtgttgggattacaggtgtgagtcactgtgcccggcccggttaggattctttctttatttgtggtggggagagggtgggggacggagtctcgctcttgtcgcccaggttgaagtgcaatggcatgatctcggctcactgcaaccttctcctcccaggttcaagcaattctcctgcctcagcctcctgagtagctgggattacaggcacctgccaccatgcccagctaattttttttttttttttttttttttttgtatttttagtagagacacagtttcaccatgttggccaggctggtctcaaactcctgacctcaggtgatctacccgcctcggcctctcaaagtgctgggattacaggcatgagccaccgcgcctggcccaggagtcacttctaattcctcacagctatcccaraatgtctttgaacacaggatttagtgacagaaccacaacaagccatatgagagccccacactgggcggtacactgcacctggaaatgtgcgtgtgaatgtgattctaatctgaaaccccagcaacagatcacctagcaaagggaacaaatgtgaaaggagcctttttgcctgcgtgtacagcttcaggaagaatgcagaggagaagaggaggatgcccccagggtctgtgatatttttatatcaactccggcagtcaatgaggtgatgggtattataggtattatagctggtttccctcccatctaagtgttcccatgtgaaaatgttcaacttgccaagatttgatacactcaagggacatcatattatgactttcccagcctctgaatctttaacactaatgaagctagcaggcaaacatgtctaaaaggacaactgtggaaggtaattgtatcttagatagaatggtatattctgtataacacagaccttctcattggtctagttattgtccctgaatgcacacatggcattttcttgaccccttattattccacgactttccccctctacctgaaatatctttcatactttccttcagctgtcagatcttatccataaatacacctcatcccttctctgggatctaaaatgttctcattttctaaattttaatatcagtttgtctggaccatcatttaaaagttacagtttactcattttattattgtcttttcacatcttctcaatgagattcgaaatttgggagcatcaggacatttctagttcagttctgcagctctctcagaacctcgcatgtggtaggtcgttcagtacatatttattgagtaaaaatatgtttaagtaaaagtaaatacagttttgttataggagagcccttcttaatcaaaaataccggaatacaaaaatcttgtttgatagcttttacatgttaatggaggcctcatctgttttaacctgaagccttgagactctggaagaaatgtacagtagcacaccattatacagaattttcatcatacggatataacagatgcaaataaccccaagagcatagagaccaggtgcagtgagtcacctctgtaatcccagtgcaatgggaggtggtaggattgcttgagggcaggagtttgagaccagcctgggcagcatagcaagacctccatttctacaaagaaattcaattagctgggcatggtggcacatgcctatagtctgagctacttgggaggttgaggtgggaggattgtttgagcccaggagtttgagattacagtgagctgtgattgtgccattgtgctccagcctggtgatagatcaagatcctgtctcttaaattaaaaaataaaaaaagagcttaaggagtagtaaaatatataataagataactgggaagtgaaacattttgagtattaccattgtttttaataaattttatttaattgtacgtttacataggttttaatgatggctgtgtttaataactgactcgtgaaagtcctaaaaatttaagtccacgcttatgagccaaaagagccagctccagcacatcactattcttatcacaatttattatagtggctgatttcattttctctctctttccctaaataatgaacttcctgaaagaagcgataacgtctgtttgctcaccattgtatctctaatgcctaacacgtagtaggtactcaagtattagatgactgaatgaatcaatccaatcttctgcattcttaccaaattaatacaacttaaaacaaaggaaaaaggtctcttgtctaaaagtcacatttcattttctttcttttggtcagctttaacaatatgctataaacattcatcactaagcacttcagcatatgaaatattactgttttcaatatcatccaagtaagtgtatctgagttattcatggccataatgttcacagaaacaactctcaatgtaaatatgttcaggaactatttttcagtagaatgtcaatttctttgagctgcgtgtgttcttctaaaccaacaaaacactgccaattcctgtgatatgtagattatttgtctttataaaattgcagaaaattgaaaatttttctctgggtactgtatcttttccacatttttagcctagagctttggcactgaccagaatgtagaattaggaattctagtatttttgcattttagggcattctaaggagaaaagaattctctccctctagtataggctaccatttcccaaaatatattccttgggatccagctctgtgggatgttaataggtgctgtatgaaaactgattcatttccaagtaggtttggaaaaaattggttcagtattaaataagtttgttttttgttttttctttttttttagtggtagcacatcaccaaacaggatatagtatatagtatttcccaaatgattttttttccacgagaatgtcacagggacctaatattccatttctctttgggaaatgccgtatttatgtatgaacagtcttatagaatcatacgttcagacatgagagggcttaaaggttatctaggttacccccccmcacacacacacacccatgtcaaaatccattttatatcactccaacagatggtcatccggcctctgctgaatacagaccttagcaggaaacttcccattccaaaagtcattccactccatgactggcctcctttccttttttaacaaagattttccttataattgaaccaaaaatctgtttccctgtaatttactcattccttctagttttgccatctggaatattggcaaaacaagtttgctttcttttctgcaagatgactatcatgtttcctgttcaccttctcttctttagattgactcttcctagcttattcaaytcttcctcatatgaggaagtttctagaattctcaacatcctggttactttcccctggaaaatgtccagtgtccctctcaaaataagataactagaattaaacacagtcagctgtgatctgtcaagcacacatgtttaactttttattcaacaaatacttctggagccactgttctcctttgggcactattctggaggctggggatacagcagacaagaaggcaggcaaagtcggatatttcatggagcttctagtcttgtagtggaaaaatcaagtaaaccaggaaacacataaataagcaagatggtctctagtagtcaaaaatgttacaaagaaaataagatcagataatatgatagaaaatatttgcagagaggtggtatgttttttattttgtttataaatagagacagggccttgctatgttaccccagctggtctcgaactcctgagctcaacccgtcttcctgtcttggcctcccaaagtgctgggactacaggtgtgagccactggccctgccagggtggcatgttttgatcagtgatggggaaagcatctcagaaggtgccatttgagctgttcctgaataatacagaggagccagggagtgaatgaagatctgtgggcagcacattmcagccagagggagtggtgcatggcaggctctatggtgaacatgagtcttgtcaaaagaaagagaggtcatgtggaaagtagagcaagagaagaggagagtcacttcagcaatatcagagaggaaggcagcagccagcgtatttaaggcatcatagctgtgttaccatggctcaggtaagtatagtttgtaagcatagtaggtggccattggaagattttaagcaggagagtgtcacaaacttcaacagttcattccagttgatttgatcttcccacgagtcatcatactacattatactgctgttagtccagcccaggatttttggttgtcgccattgtttttctaagaacctagtcaaacttctcatacaaacttatttttggcaaattaaaatacccagatcttttaaaattttcttataatcttgacaaaaccagtaatttggaatctcagtgaaaaacatttgttgctcttaaattttataattttgttctcaagccttattagaataatgttgaatcctgactttgtcgttagtaatactaaagcagtctcagcttttgggttttaagtttaataaataaattttttattcaaagttggcaataaagtcattgtatagagcatttttttttttttttgagacggagtcttgctctgtcacccaggctggaatgcagtggtgcaatctctgctcacctcaacctctgcctcccgggttcaagccattctcctgcctcagcctcccgagtagctgggattacatatataggtcatttctaaggactatagtctgttacaartatccctttagttgaaagaatccattaagcgaccttttctcaggatagcttttcaaccacctgctaatatttgactacatgaattttcatttcctcatatttttactgcaaggatagcccatgagataattcaacacatataggtctcttagtctgctaatcctgtaggaaaagaaaagaaaattagcataatatctaggtgaatgtataatggctcttagttaacatttctttgtctaaatattcataacccaagggatgattgaagtttaatcaatagtttctaaaatcctttcccccgcttttaaaaaaataagcatagcattttcctgactcctgtccttggggtggagattggggaacaagtaaaagcttatagagtcttgtttgataaaaaacatttttttctaagggaaaggaatagcaacatttgctgccacttaaaatccatccttaaaattcacacaaagcacatttattgcktactttcacaatgatctagggaccaaagagtaacaaaaaacaaaacaataaataaatgcacaatcgggcatctctgctgtcaagtattccttgaaggcctggcagaatctgacatggagtaagttactggaagccggatttagtcaattacctgtctttttgctcctaatgttcagaatccagtaaatggctgtagcctaaggtagagaagtaccagttaagtgcattttgactgtggtttaagcaatcgaggtcgtctccagcttctttggaacaatgccattctttagcatgacatggagggtaactatgtgcttattcactagatggaatacctgcttcatgtagttggctgggctctgttaccatctgtttctttctttgtttctttctgtttgtctgtccctcgccctctctttctctctccctctctttctgtctctctctctctctctctttaacacacacacacacacacacacacacacacacacacacacacacacacacaactttttagagtcatggagagagggtctcattatgttgcccaggctggtcttgaacttgtaggctcaagcaatcctcccacctcaacttcttgagtagctgagactacaggcatgcaccactgcacctggtttcaatattcgtattgtcagtatctcatcagtttttgactatcgccacctctatctattttatagggaaagaaaatctttctttgccctaatatctaagtagcttaggcacacctgagaactgggaaaccattcccaaccattgccagtggggagacgtcctgcttcagtgtgatacagttagccagtgtttattgagcccttccccatgctcatgtttgtattcatctctgaggaatgtctctatagtgatcctattctagagacatttcccccctcttctggacagattaaacccgagaagaacttgctggttcctgtaagccgagcagcctgtttgtgctgtgccctcattctaggtgcattctttggctggcatatttgtgggcacagagtattcacgaacaaggtttcagcagtttatagtccctagggggcggggtgagtcaaaaacattgactgtttccatttgccctctggaggcagtgtttaacctccaagtggatgtggtgcccagaggaaacaacctcaaccaggaactggcaggcacctgcctcatcagggcatcagtgtgcacagggagagagggagtgtgtcaaaaggtccagcccatttggctgtggggagaggccttataataacacatcagtagcatcactttacacrtgcctctgcagacacgagctgtccagctccctgttcctcagggtgaggctggggtagagctgggaatgacggactctggggactgatggagggccataccttcgagaccaaggatggtgttctcttgcacatgcttgccacctcttattggtcctccgattcctagggaattttctttagcattcttctcaactgggctcagttgttgaaagagcacacacacacacacacacacacacacacacacacacacacatacattttaatcctgtgcttcacatgctgtgaagctaaagaagagtgcaagaggaaggcagcttacatcagatctgacagtcttactgatcgttgctgataaaaactggcaaagggaaaagtaatcggagcctcgggaattcaattcactcctttaatccactcagcagatattttatttttaaaacacaagcacagccatcagcaaaattgagaggctgtgtgggaccccaaggcactttaaacttttgagccctcctaactcccactccagccctaccttcaaatagtccctcttagccatttcatctgcttgggtgtatcctcctcaccatcccttttccttattccctagaagccaataaaaaaaaaaacttgcctgttggcattaattaaaaaaaggaagacactttatgatctagatcatcagctagagacttgtgcagtatatcatccctactttttatgattctcatattgtcttcatgtctttctcatttgcagcaagtagatgacacagtgctgccctctagctgattattggattataatggcttctctattcctaaggctatatmtatatctaaatatatatatatctaaatatatctaaatatatctaaatatatmtaaatatrtataaawatatmtataaatatatataaatatatatatataaatatatatatatataaatatatatataaatatatatattttttttatcagcaaagagaagtggacagttgtttttcatgtacggcttaccccagacaatcagtagagcacctctgctgctttatactctctcagtcctcctgaaccaaccttcctggaataatctactaatctaaaccagaaaacgaacttagttccacagcagatttcaactgtacctctatattacagcaggtaccctgtcagatttcttctatcgagaaatgaaaagatgtacacacgcccatgtctgtatgtcttccatttatcaggcagggagaattgattatctcaattctaaagatatcagcacatttggagatatgtggcttttattctaggaccctgggattcacattttagcctataaccttcaaatctccacattcatttttctccaccctaagtgcctgtgtagtgatgtaatagcactgttaaccataatagaatgatcaatgattttgaaaaacatagtgtgtacctttctctttgggaggagggtaaaagcaactactgataagaaagtaagccttagccagctccccacgatccatctgccagtcaaagcagttaatcttatataccccttcccactcaagaaagttagtgaacagttattacatggctgcaataattatctgtaagcgttatatctacagatgtagactgcatctgtctacagagaaggcgctgattttaagcctgctttggcacctagttttaagcctttggctttatcaaccatgtacgtaggttgtcacccatataaataggtcctatccctcaccatcctgagccttgattttcttacctgtcatttgagatagttacctcacagaattgccaggaaggttaaaagatctggaacacgtaaaagtactttatcaaaccctacatgcttattaattgtaagaaactgccctgtgtcattaaaagagcatgggctttggaatgagacacaggaacagattccagacctgcttctcactagctatgtggcctttcacaggaagcctaacttcctcgagccttagctataaaacggaagtaataccaatctacagcacctatatgggaattcaatcagtaatgtgtttaaaagaaggtcagtgctacatagatttaggttattggtgccattgtaagtgggaaaataatatgtgtgatgctttagtgagttgtgagagagcatccaaatgcctaagcacctggagcacactgcctgggcctgatccctgacactgccatttactaacattgtggtgtcacattttttgtaattgcctgtttacttctcycactcacaagtctgaattccttgagtatggagagattgtcttctcactgtgtgtgcagctcctagtggagtatccaacatgtagtagagagagaaaatgtgttgaatgaataaatgtgtgatttttatcatcttccatacattttatactatggtacctcttagatatcatttacatttataataataactatgaattggaatgggtagggcagtggccaattaatgtagctcataggagatccagatgcttcattctgcatctctaggcttcttgatgcctcttgggccctacttgataggttcttatctaaagccataaatgcaatagagaaacagaacactttaaaaaatattacctccactaaaggccgggtgtgttagctcagcactttgggaggccaaggcaggcggatcacgaggtcaggagatcgagaccatcctggctaacacggtgaaaccccgtctctactaaaaatacaaaaaaattaggcctggtggcacatgcctgtagtcccagctacttgggagtctgaggcaggagaatcgctcgaaccygggaggcagaggttgcagtgagccgagatcacgccactgcactccagcctgggcaacagagagagactccgtctttatatatatatatatgtgtatatatatatgtatatatatatacacatacacgtatatatatatatatayatatwtatatatatatatatatatatatatatatattttacctctacttaacctccctggatgattgtcttagtgtcacayatatatatatatatatatatatatatacacgtatatatatatatatatatacacgtatatatatatatatatatacacgtatatatatatatatatatatatatatatatatatatatattttacctctacttaacctccctggatgaktgtcttagtgtcacaggatccttcgggtgtcacttcaccagccagaaccctctgtggctggcggcgcctctgcttgagtttcactcatgcccgttgggcttgttctgtccccttgggctgccaggctgtgctgctcggctcatgctacagacccagacccatgcccactgagggcaagccaggcatggagcagcgaggggtgtgtgcgccactaagcatggggtccagccagtgcacacagccagacaccccagctgctgcggcagggcaggcagctccaggctccgtgcaagcctacagctggactaggcataccacaagcagcttctcttgtgggtgccagcatctggatgaggggaatgtggtgacatctgaaaactcggagatgccagcaaccacagagccccaaggggtgggtgtggaggcgctctgcagctctctcatttccaccacccacagctcggcggatcgggcgtggggggaggcatgtctttgcctcattcagtcccaccgcctcactctggcgtacagctcccaggctgccctggccccattgctgcttcccgtcacatggggtagccgcccaacaccagcggagggcaggagggctatagtgctacagctctggcttggggaatcctgaggtctgggcccacagaagcgtcaccagtgttcactgccacagtctgatgaacaggagcatgtcatcgtccgcagctcaaggagctggccaggaaagtgttacagcccttttcgcacccaccattcggtgtgttctgaattcttgtccagcatccaggaagaatgagtttccacaaacaactggagggtaagcaaggcagggaagagttttattgagccacagaacagctctcagcagagaggagacccaaagtgggtagctactacctgcagacgggcagtcgtaccatgtggttgagtctgggggtttttatggactcaaaaatggaggaagtgtgtgctgattggttcatggttgggaggaagtgtgtgctgattggtccatgggtggacctggaaaaagcaccacttgactgacccaaaggcattaaggaagttctcactgtgggtagtggattctcccggagactgacagcctggttttcaggcttcctgctgtatttggcttgaaggtcaggtatcaccagggacctgcctcttcttgcctaggaatttgcctcctgctgctatcattaataacctacgactaaacagacataattttattggaaacttcttgaggatggagacctggtatgcgcaggtgctcatcaaatgttgattcggaaatgggatggtgttctgttcagttcacaaacatcagagtcttcctgtacttttaccccatggcggttaatccaaaacctatagaattaaattattttcaaattagtcaaatcaatgttacagtcttaggtacctctatgcttcatctgttctgaacagcaagtggcatcttgttgcagcttgctatccagtcccaagatgcatttcaaattccaggcgcctgttctgtgacagccttccaccctggcaggtctctttgttgccatcttttgtagcatcctctgggtatttgactcttctcccctgcctcaaaactttgcagaaccccacccagtggcaccaatttgttcttcaaaaaccttattctacttgtctcgttgtttctcttttcggttgagttaaatctacaaccactgcttgtgcatcttcatttttccaagcagccattagaggcaaatggcaccacagctcctgctacatttcaagcttatgtcccagaggtggcaagacagaacatcaatcttcagtgccacctggctctctgataagcttttgtttcatgtgtggctatgttgtcaggagcttcacgccctctcttcccactacctcacccagagagcttttctgaatatgacaaccatctaaagacgaattatctccttgcaaagttaatttctgtttctcagcagggagccactggttcccgctgggcttgaaagtactgctgtttgttaatggatgagtgtctcttggatcctggtacccacactggaactgctgcagcgcctggctttccatttgctttaatttcctacttgcagctggtgttaggagacctaaatgggtttattcacggaatagtggtttacagtcattagcactgggaggaaatcatattgaagacaaggactagagagctgctttcatgccatccttgaacacttaggacagtttggttggttggttgattggttttggcttttttagagagcaaattcacaaaatccttctagagatagaacaaaaggcctaacataaaaggtttatttctgacttttaagagttagaaaaaaacagtatttttttaatgtcttcaatgtacagaatggtgaagataaaataagatgctggttgaaaattgctctgagcacttttaagtgtaatagtcgatgttgctattgtttggtatgccmaagctctttaaagtgcaggaaatttcgttacaaagatttgtgctgtcttctataaagcagagccagctgtagactagaaaactccaacccgtagaacatctggaatgtttgtttctattcattatgaaattgccacttttgtaggtcaaacaaggtcaaatgttggcaatttcctactattcaacctatgcagttttgtttttagatagaattctgaaggccaagagagcaccataggtatgtttcctgcctctgaaaaaaatccaaagcctgtaggccaatgcctgtttgtccttgagaggagcccaattctaagctgttaactgtgtgaatctgaaatgtgcctcagaattgctatgctaggagaacatctggtcacacagactggctaatgtcggacagctcgctctccctttctccgcctcgttttccacagcatttctacatattacactgtcaagctaacagagcatgagagaacatcaaactaaaagttctgagcaagaaagtacaagtgcaagcaattcctcatgcctaaaaagtgccactgacaatgaaaaactttactactggtgactccagagatggcagtgtgtgaaagtgaagaaaggactatggaaaagaaaaagaaatctttccccccttacagctgctttgtgactttgggcaaatattttcatatctactagtttttatttattttagagaaatgttgttgaattgaagagaatcaaatagctaaatatcccgtatagagccaacacacacaaaactgcttaatagatgttacttctttttcctctttactttgttttcaaacatgggatttaaatgctttaatttaaacctatgaactaataataatattaccctttgcaaagccctctaaaactttaaaagcaattccacatacatgcatgatgtcatgatctacctaaatccattaatatgtatgatctcaacatgtatgtgtttatttctctatgtatgactagaaataatccaagcacttaagccaaacacagctgcttcctttcccctcacattctgagagaattcttgcttttactttgttacccttcacttttctttattaagaatgcccttggacccatccaaagatatccaaatactactgactcagctgccacctccttaacaaaacaacctcatcagctgaaagtaactaarcagtcctcaagtcaaaaagggaagagaggcatgtgaagagaagattccttcaatgctgacctgtgctttcacagtcagcactaagtcatagaagagaaccccaaagggttttcaggaaatgagaagctacaataggcccagaaacaatggttcttaaatttgggtgcatgagaattgcctgtggaccttgtttaaaaatggaaaaactacctattaggtactatgctagttacctgggtggcaaaataatctgtacaccaaacccctgtgacatgcaatttatctacatgacaaacctgcacatgtgcccctgaacctagaataaacgtttaagaaataaatacaatttaaaaacagaaacaaaaacggaaactcctgggcaccaccccacagattctgattctctgcatctggagaggggatcaggaatccactgtttttttgttttgttttgttttgtttttttgtgacagagtctccctctttcatccaggctggagtgcagtggcgtgatctcggctcactgcaacctctgccttctgggttaagtgattctcctgcctcagcctcccaagtagctggggttacaggagcccgccaccatgcctggctaatttttgtatttttagtagagatggggtttcaccatgctggccaggctggtctcgaactcctgaactcaagtgattcacctgtctgggcctcccagaatgctgggattataggcgtgagccacctcgtctggcaaggaatccccaattttaacaagcacccagggtgattctgttgaaggtgtttcctggacctgctttgagaaacactggtttagaggacaggtacctttcatatcaaggtaaggcatgatacagaaggtaaagttgggaatgtcaaagggatgctttcagtttcatgtgagatcaagctgatttttctctgatgattacacataaaagtcatgagacaacctacttggtcagcagttgctgtgtacctagctttggragcattcccataaagccgtaagatttatatcagcactggctcatatggttcatgtctttagttttctttctttttttttttttttaattttatgtgcttcattaaaaagagctttattctaggtcgggcgtggtggttcacgcctgtaattctagcactttgggaggctgaggcaggtggatcacaccaggagttcaagactagcctggccaacatggtgaaatcccatctctactaaaaatacaaaaaaattagccaaggtggtggcgcatgcctcccagctactcagaaggctgaggcaggagaatcgcttgaacccaggaggcagaggttgcagtgagctgagatcacaccgttgcactccagcctcagctacagagcaagacttcgtctcagggggcggggaaaaaaaaagagcctcattcccagaggcttcattaattaaggcatttattttggggtttgattgattgattgactgactaaagtactagttacaacagaaaggatggcctttagttaaacaaaatcattgctttcctgctatgaaactgatggctgttgctaaggtttttaggatgtctacaagaagtcaaatttgctctttaagctatagatacatatatactatatacatatacatgcatacatacatatttctttttaaaaactgaggtagttattatgtagggaaagcatttttctaaaatttttttgttatgtttacatttggcaatgtgacagatttatgtcaacagtgagaaattataccagagcaaatatatgtgagtaaaactatttgaaaattaacatctaaagtatagttatcagtgtgagaatctctgagttgtcacacagatccattaatcagaattattagggttcatatgtaagtgtactatttgttttcatgggtaaaagctataatgataactataaaataataataaacattgctgaagttataatatctttgggtaattaaatatattctttatcaatgaatattgaacatacaggtgccatcatggggagatctgcacaatttttttctttaaaaagaaatcagtggagcataatagaaaatcaaaaccagaccaacctctggctatcaacactgccattgcagggctatgggggaagggtagtccttccatactrgtgctggatcacctagatatccaaatgaattttaaaaatttggaaagataaaataggagaatatctttatgacttgcaattaggcaaagatacaatggaatattataacaatgaaaaataatacactctgactaaatgccacaatgtggaaaaatctcctagatgtaataataaaccaaaaaacatcgagacacagtaaccatatactgtggtatttcattatataaagttcaaaaacaggtcaaaggaatcacagggatagaagtcagagcagggattacctttggacagggatagtgactggcagagtccagcaagagaggcttctggagtgctggcagtgttctctatcttgatttaggtggtggttatatgggtgatttcactttgtaaaagtttattgtgctctgtacttacaatttatgcactttgcacttttctgtttatatattttctttcacttaaacatattgccaagaaaatcaaggctgtattagaggatgctatctagtttggaatggctttcttgcttagaaaaacttcctgctttgcagctctgcactggtgactgacagttgtgacattcagcagttctattacaatctactgaccaaatagagctttgagcaaacagatttcacaaaaggcagtgggtggccattgagttgtttgttttctgcttgtatctgcttagggtggtattagcagcagtaataggtatatcttctgatgttgattctggaatttgttatttgttgacttattctcatcatcatcatcagttcttcttttgttgattgctgaccatgtctctgctgtaatctctgatggctaatttgcataaataaccgtgctaaaataaaatagtacagagctttgtgtgtccactgtagtttttgtctacaggttctgaaacttgatttgactaggcccacttgtttgtatgtggaaattgatgttaatgaatgtctggatagcattttacttaatgcctttgtgtgtatcatgtgtacaacaactctgtgagataggttatttcttctatttggtagagaggaaaattatatgacttagttaatatagcacagctagcaagtggtagcccaggatctaatatccagatcttgactaactctgattttgtgttcttctcactctactacacctcctcttttggatcaggaaggctttcagggagtctcattaatttacaaaaagctggtagaaattattagatgttttcactagccctcaaacttttcctatatctgttagtatttaataacttacaaattatcattccatggcatattggtaagcagtaaattgccaaatcctttccttctgacttttacgacatttacattcaaattagggaaagcagggagatttggtgactatagataattatggaacaagagttagatcttctgtcactaaaactttggattttgtgagtatatgtgccagaaagggaaacaagcattgtcatgtgcggttcatctggatttagcagtctttaatggtaagaagtgaaaaaatgcagtagtgaggccagatatcagattcctcagagcaggagtctgagggctgaaactccaggcatggacacctttgtccccatgagccctgataacacttgataaatttcatgggatagggatgttatcttaactaattttatttgcccaatcagatttaaggtggtttctaagatttttagttttactgattttcttacttactaaactacctgttaggaattgggattttatttaggaaatccttgtctgaaaaatgaaaagtgaaggattattatacatgtaatttaaaagatatttactgttttatattacttttttctttttcttatataaatttcatgggacagggatgttatctttctctaattttatcagatttaaggtggattctaagatttttattttactgattttcatttccttaaaaaaaaccactgtgtatcagtagaaatgaagaataagaaattcattggcagtgcattgaaacaaacagatgaatacataaatatagtttgtttataatgaaaacctccagggtcctctcaagtattttacctagaaatgacatataaattcagcgtatgccaacagttcttttaaatcatggtaatattctgaacatacaattatactacattattttcccatctctagaatttttgtggttatttttatttattcctccgtagaaacacttgtatcttagttgctcttttaagatatctctactaatgatcagttgtgttagtctgttctcacactgctataaaggactacctaagtctagataatttgtgaagaaatgaggtttaattgactcacagttccataggctgtacaggaagcatgtctgggaggcctcaggaaacttacaaccatgacagaaggcgaaggggaagcaggcacatcttaccattgcagagcaggagagagagarcaaagagggaagtgctaccacttttaaacaaccagatcttgtgagaactcactaactatcacgagaacatcaagggggaaatccacctgcatgatccaatcacctctcaccaagcccctcttccaacactgaagatcgtaattcaatatgaaatttgagtagggacacagagccaaatcatatcatcaatcattgtgaacttggagacatctgttttgctatgcatattttcttaataaagattatagtcatttatcaatattttctcagagaaattaccttctttcaactaatatttatgaagggggacatataataactctgggactgacagctaacatttatgatgggaaactattaataactaacaattactaatagtaggcacattactattgagtaacatgcttttcatatatatataatctcatttaatctttgcaacaatactatactacaaatactttaaatatgagattaagggaaatcgagcgacttctcaagtcacagaatgagtcactgacaggtggaggtgcatcccagctcttctgtccctactacacactgcatggctcagctacttggcttactcggtaccagacattgactagatgctcaggatgccctgggccttgtgtgtctcaaggcctagttggtatgagatgtttgggggcagggaactaaggaataggggcacaggtgtgctcttcactacagctgtggaatatgggggaggtagcaagagataatgtagctagagaggctctactggtgaggctgctgtcctgttttggataaggggtagctagtcattgtaggctgggcaatgggattggttaatttgaggcattgccactttcttcttccactaaatctcagctctaacaagtaccttttaatttatttatctactttccttcttccaaagtaaactcattttgattcatcgctggatccaagagcctatgtgctctaaagctttgagttttgaaaaaaagtgccagctttactgagataataaaaataaaaattacttatatataaggtgtacaatgtgccaacttgatctatgcatccattgtgaagtgatgctgacaatcaagctaactaacacatcccatttaaaaccttatttggagagctttataagagttgtgcagctttctctcctgaagagagaaatgcgcatgccctctctcctgaaatggattctgtccatcgtcgtctttgctgagaggatcacttgcaagtcccttcaggagatttgaaaacttttggctctgctgtgccctgtgatctctccactcatgccagtcaaactcaaccactggagcctgtatggaaactagtgctcctcagtccaggcattcccaggccaaggatctactatgagtaaatgagccagtgggctctgcagccagattgtcagggttcaagccctggccctcccattcactagctgtatggcattaggcacattatttatcttccctgtgcctcagttttctcttttgcaaaatggcagtaatagtaccttcttcacaggattgttgcaaggattaaataaattagtatgtaaatttgtaacttgcatattactatgaacacttttaaacacagtagtcagtactcagtaaatgttcaagtttgttctcattaccattatggcatcaatccttacgaagtgtataaaacctcttaccccttcccattgagggcagtctcagcttcctctctcaaacacctggctggtggatttttaggggggcatttcttggagcaaaggaagctgttaatcctttcctggggaaccattcttttcaagtgagggcagagaaggagaaaaatacctttggggtgtttctctccccacccccaaccccgtccagtttcctgcagcagttagaacagaaattagtctctcagaagattatcctgccacattgacttaaatgtgatgcatagtatgacctgtaggataacagtggaaaaccctaatcagttacttaaacctgccacagactaatttttagaagtctcagaggtgggtgtgcatattaaaagagaccaggtcctttctgtagaaccctgagcaaatgtgtattgattaacttaattaaaggaagattatgacttgtgcactgcactgtgtgttrtcttactgtatggtttaagggatctttaaagcatatgtgctaatggccttctcttttaaaccagcgtgaatctgaggttatttcattaatgtggtaagcaaatgattgccaagaacacagaaggtaaaaagcattttcttctgtaaataaattataatactttaagctgttttttagtaatagttttatatggagtttggttcaaagagatcctttttatttttcaaatattaacgaaaggagttctttaccttttatttattcttctcatcttacctcttggcttgagctagggtcatagaaccatgaagatttggctgggccatttatttgcaaaacctccaatgtcagtatgtttaggtcttttgtcttagaccagactccacagagaatgattctctaatctgccttctggagattgaaggtctggctgtcaatatgcaggaaaccaaatgagaagagggtagaagagaggtgggaatttttggcatccagtatatgtgaattcacttaatatttctgttttcttccacccttgatcgttcatgcaatctgccagtccagagaccctctattttattccttccagaaaataagccttcaggtttttgctagggtgaagagacagttgtccagtgagggcctgagggatctagagatctgactacttcttaaatagactttcaagtaattcttttatgaaccactccctcccttttgcccccacgtccagatgtacctggggctgtcgggaattcaaaatagagattaggttgtttctcagccttccctcctattcacacaggattccattttcttgagtctattagaggaactgacctctctaatctgacttccagcttccaaaattacattgcttttgttttctcccttctgttctccttacccttgtaggttgatgtcttgggaaaaaataatctctttatcatcatttcaatggggtttcaagagggagggagaataaatgtgtattttgtatctgctttctttacctagaagtaaattctcccctygataacatctctccttcctgctccctgtgccctgacttaaaagaccctgccctgcctctcccagcaggcacctggaggaatatggaacacccgcccccgcccttcttttcttcatatgcatgcactgcacgtccagcctttctagttaccctccctgaaggcccaactgagagtgtaacttgtctagaaagccattctagagcactcagggtcatgatgaacggcactcatatatacctcctgtgggcagctgaattcctgtgtatgcatcttttctgtcctcttcaagaagactcaaactagrtcaaccagattgcatttgctctcatgccaatgccttgcctgataattcttgaaatacattgcaacgtggtataatagaaagagcaggccttggggtaggaccagcctgggggcagctctgggctcctccacttactagttgtgttctcttgggcaaagaacttagcctttctgtagctccctgtcttcatctgtaaaatgaggcatgtgaggactaaatgagatgaagtcttgtccctgcttagcataatccctggcatggaggaggtatttaataaaaattagtctcctgccctttctatccacacatctccatagcatagtgcattccttgtagtaggtgctcaagaaatattcactaaatgattgttctggaaaaagaatttggtagaagttcttcattagacttactctatttgtatccagctgtaccacatcaactatggcaggaaagtagaatcccttctctaawctggaatcatgtggcaggaagttcttatcacttaaggggcacgagggaayagaaacacagtgttcaataaaactgaaagggcctcagtctcagtgttggcttcaccaaagccaacctgaggctttcagctgtgccttctctttccaattataagtgagtactgtgttagctaactcccagttcaatccacagcttgccacttgggatctggaagctagctgattttttgatccaaggtgctctgctaggtagggttgccagttgtaattatatgttcaaatgtcaattagcagaacakcctattatttggcagtttggagtaatgagatggatcttgcgctaatctttcaattcagcaagtgtttgataagtactttataagtaaaattctatactgtgctatatctagtgaaggttgcaggaagagctggaggtaaaagattgttaagtgtgcatccctttatgagctcatgaattttcaaatatcttaagcaataaaraaaaaggcagcaggttttccattaaaaacatttttttctcacacacatctccctacctccatttgtactcaagtgacaaaaatttttaaaatagttacctcatggaacagatatcatggaaatccatttagtggaaaattcttcctgagtatgattttactagactccgtgcttgattctggggaaaacttgagtgagacagatggttgccctccaaagatttctagttgcctttgatatttgactttttcttctctaccagagctgtctgtgcaaatttttctcagtgctacatccagctttttgcataattggttttcattaaactcttgagttgtattttctttttacacagttgattattgtggctcatctaaagagggtcattttatgaaatgtctgtactccttcttgacctctgtttcctgtgagtacaaatctcagtagaacagagaaagaagacacaagacctcgcttagagagttgagggtaggtggcaaggttgttttgtttaccactcatggcctatagcctggtagagaacacagactcagcccttctctagacttgccttctcaaactctttcacacttgacctctttcgccattcttcaagwtagagtgggtattcrgtttttcataagctctgtcatttttgttttccctctttctgcatttatttcctagccatggtaaatttgggatgttgtsaagatcaagtctcagttcactctccatccacttacttgagaatagaggtactcggtagtcgtactcacattcgctgtgctccagggagctagttgtcaaattttctgaaattttgtgagctggttgttaaatacagccattattaaaaagcaaattctgtaatatgacaaaggtaataaataccaagactcatcacttcttaattattttttaacatttcaggattatctatgttcttcagggtatctgcatgcatctattgttgctgatagcagagttattataccttattactgtttgtgttgcttttcatctcttcccaactctgagttcagcaacatttttaagttcagtgacatctcggtggtagcttgaaaccagccacacaaccaaaaaaatcaccacaaaaaccaccaaacaccacaaaccaggacccctccatttccctggagagctgcttgtcaaaacatttaccagcacaccgctagtcatgctcttcttctgttcctgccagtcatgagtgattgtgagccacaccaattaccattcatcttaaagatggcaaaagtcttcctccaaggtggttacaccaaccttacacgttttccccccacagccttatgaacacccagcccagatttttactctggatccatggttactcctaggctgcctctccctccatctttctcatccccaatgattcagtcattaatttctctctttctccctctgtttccacttcccatcctcttctccttcctcctgcttcacattcttcctctaccagtggttaagagcaagggctctggagacagactgactggctttgaatctgggcttcatgatctactggttatgttaccttggggttgttactgaactttttgtgcctcagttttattatctgtaaagtggagataataacagtatccacctagcatagttatgaggaccaaatgagttaataattttaaaagcacctacaataatgggtggcttatagtaagcaatatgtacatatttacttaataaaataaacacttatatttgtcatccagcccttccttatgtgctaatgttcaaggccagaaggagaacagcaacagaacacatgagaataaaagaagaggcaaaatggcctggggttgtatcacagcaatggtgtgacagttctcgggaactaggaaaagagtcaatgaaaggaactggaggaaaggtggggatcaggaagggagacaaataagaagaaaattacatttcaaaataatctgcaaagattaaaatatatataatattagcttttagtattttatttcaaatataaaccccaggaaaataaagggatattttttataaatgcatagaaagttcccattttgatgttagcagttaattcaattttggtcttcatccaaggcagaaatgtggtagccacatatttaaggtacttaggctaaatcaactgtgtattgaacaagagccatggggacagagtgagagatgtgtgtccatatctatcaaaaacgcaagccgggagctgaagtactcatttgtctgaccatctggaaatctctagtggtctaggcacttaattttaccctcattgctagaacaaaagggaaacaataaaagaagaaaatgggcagcagggacattttacttttcatttaaaaaaaatcttagtgataaaaggagcagagagtttaaaagaaaaaaatgagaaaccattaaaatgatttgaatgctctgtctatattttgcggtgagctctattgttttcagttacatgggaactgtggtaattttatgaatcattagaatgtgtttccaaattataactgcatgttcttaaaatccctcctaagtaacccacagtaagaggctgttgaacaatttcatttaacacttttggatctcatattaattttatattttaagaaatgcatacttaatagcctaaagataaaatcatgataaccgagtctttgtatgttttctttcctctgctttttaaaacatatgaccctatctctgttctcctccgcagtctagtgacagacttgagaaaatagaaagcctggtttggtagaatgacttttcagttaaaagcaaaagctcagttgggcacagtggctcacgcctatgatcccagcattttggagggcccaggtatgaggattatttgaggcaggagtttgagatcagcctgggcaacatagtgagaccccatctctacaaaaaaatttagccagttgtggtggtgtgcacctgattgtactactgcactctggcctaggtggcagagtcagaccctgtctctaaaagtaaataaatacaaataaaagcaaaagttcctctgcctcaccccaagttgaaaacaatcacaacggtcaaacgttgtttttcggcatatgtctcatcaggcatagtcatctgtgaaatgtgtactctgttaatgatacctcacacctccctcctagaggatggttcacaaaagcctgttcacttacctggggcagccagtccagcatgtgatcctcagaaaatggggaaagtgacgtcaaagtagtgggtagtgtggatgtgtgtgaggcagggtaagtgtgaagatgttaagtttattttcttagaagaggctgtcctttttgctgatgttattttcctcctgtttttggtgttaaaacgtcgccattattttatgaaaacagtggtaatatagataatctccctttgctttgttttgttttaaacattctaacttgataaaatgaaaaattggagctatattcgtccatatttttttcctggttggtgaaatctgaaagtttgaaaactatcgtacattctaagtgttggttgtctccttcccagggtgtaggtgtttcctgtgtgaagagattgtctcaaagggaaacttagcaaagctttgatattctgatttttaaccactaactgttcttggacttgggagaaaagctgcttccctgggcagtacatgggtggtactgttactgttcctttcatataaacttgggcaggatgccactgagtttagttaatcagaatgcattctagtgatttccagtatcatattggcctatctcttgacaaattatgtgctttgataactaaaatctaggaaatatgactcatctcctaaactcagggagacagttatgttaaagcctaaggttactttatggtgggaaggctggagatatcaccatggttcataaagaatatcataacccttgcaaatgaagaaaaggagagcaacttgttcaatatctcaaagtcaatgttaaaattatgtttggagcccaggtctcctgttggctagctatttgatttttgcccagtggtgcattttgttttgctctgcatggaaaagtcatataaagcagttaaatttatttttggaatgagctagaatgctgggttcgcaacaaccagttttgttaaaaacaagaactgctttgaaagttcattagttcttctcaagtgttattgtccctcccagtaggaggcatatccaagttgaatctccactcctgaacaaattttcccttgtgtgtgtacactggcacacttgcttgcacactctctccctcaaacagttccatatgttctattttactggaagccaagctccctgccattctcccccttagagggctccagatctcacctctgaggtgcacgcgtaactgaggctgaaacaatttgtagggaaacttgtcagcaaaattgattattatgtggtgtgaaccaccaaagacaggtgagcctgcacatagcggaacaaatgtatatgtagtatgcatctcccactgcatctaaccagacttcctcctctgacatgttgattgatacatttgtatctctttcctaatgaatcatgccccattgtgggttattggagcctcctgctgaatagacctcacctttgctagcaaaaggaatagtaaaggttctcctctgtgaattttgggggctgtttattggctctaaaggagtggctgaggacatgtaatctttaaaaggacaaaataatcacataaaatgtctaaataacattgctacatcaagaggagcttctgtaactacagatgctttgcgacatgacaaactagttggtgtggaatgcgaatctgagatacatgaagaaatgaaagcatttcagaccacctctggtggcagcttgatattctggagttctttgaaaacttttttctagtgttatacttgttccttgaaatggctttaagtgtgagacttgtgataaaatagggatgataatgactgctctagtttctcacagtctgtttgggtattgattgagatatttgcaagtactctgagttctgaggaagaagggtgttaggaaatgctatggtgttgtttttagcaggcgtggaaacctatgctaaaataatttcagaaagataagtttgaagacaggttggattattggcctgtacctgtatgacaatcgtatgtccttctggtctatccttttgtcttaggtatcagttctgagtgaatttagagggcagggtttgaggaatgttgaaagagagaagagatctcgctggcctaaaactgcccacgaactgtctcttggctgctggcattggagtggcctgtgcttcccgaggctggtcacatagaatggtctactgatgatcaggagggtccagtcttcacttcctgtcctgacaccatcctatccacttgctgagttacttcacacctttttttcactgaagaatgtctccaatgacagtctttcttcctgtaccacacactaccttcacagcttcctgtaaacctagctttggcctcactagtcccaccattgaaactgtcatctgaggaaggtcacaataaccttcttccacaagcagtcttcattcatgtctaccatgatacacctggcatcatggactacctgaaaagattgaagttactgctttttgtttttactggaaacaacaaaaaatagtggttaagatacgggctctggattcagtctgcctgagtttcagtcataacagtataaactgttttgctgttgtattcgagagcatagcatagtagcagtgcctggcacatagtaggtgatcaataaatattggatggattcacagataggtaggtaggcatatctgtttgctataagctcatctatatttgtggcttttcatgtcttttaacttttatatggcttcttgctattaatatttttcctttagtaagttacatttaaaaaattaactcatattgcttaggytaaggaaaagaatgaagaggtgtgtgtgtgtgtgtgtgtgtgtgtgtgtgtgtagactgtagagcagggaatcatattgggccctttgagcaggaaaataatatttggaaatatacaactgggaaataaaatttcaggggacatcattacctcgagtgagtcttcccaggttgttctttcttcattggaggatgtgagtaggtggtttctttcttaaaggccaaatgtccatacatgatccaaggaactcttatgtttcttagcttagcttttatcacgcttactcatcgtcttcttcttcttccttcatttttcttcttctttctttttttgatctatgttctacttctttttttctctgttggatcttcttttttctcatggtaccacagtgcaagccaccctagactactgccagggctttagtcagatgccttactgtgaactcttacttctccaggccaccccagtgtgtctgccaagtcttcatcgagtaccattttcccrgggagggggcacagtatagggtggtaaagagaaaatcaaattgggactcaaaaggcctagattcttctttttcctttcaaatctcatttctttctttcttttttgttttgttttgttttgtttttctggctgtttttaagatttttctacttatcgatgattttcagcaattcgattatttgtgactttctatagtttttgttatcttccatttgagatttattgagctgcttgaatctgtgggcttatacttcaaatcaaatttggaaaatttccagccactatatctttttatattttctctgcaccccccacccccagttgtgtgtatattaagctgcctgatattgtttcgcagttcgctgactctcctattttttttttaatcattttttctgtctgtgttttatttggaatagtttctattgctgtgtcttccattcctgtttctgccgtgtttatattttccattctgtttttagacataggaccctattcctaatagctgttttaacctccttgtctattatctgtgtcatccctgggtctgtttctcttaactgattttacttctcctcatatattttccaacttatttccatatgcctggtaatgtttttattggatgctagacatgcgaggttttttttacattgttaagtgctggatgttgttatagttctttaaatattgttgaactttgggaacacatttaagctatttagaattattttcatcatgtcaaccttgcttctaggctttatcagacaggtccagagtagcttttactctaaggctaatttggccccgctactgagacaatattgttttgaacactacctgacaccctatctattaggaggttcttccactgtagctagtgggaacatggaccattcattgccctgtgtgaactctgggattattctgcctgctccattgaggtagtcctctctggcctcagtagtgtccttcacacagaacagtacttggccgaaggttctacacggaagatctacacagatcttgtgctcacacatgctcccgtttgcacacatgtgctctctttctctccccaccctcctctctctttgcgaagctccccactcttcagtattttgccacagtagactgtagctgccttggtcttccaaaactccaaattctgtctcctcaacctaagaagactgccaggctctgtccaggtcccttcttcctgcatcatggcccagaaactcttcagctggggcactcagagggctcacgtcatttgtttttcatctctggtgtctgaaactactgtttcctatattttgtctggttttctaattgcttaaggcacgatttcaagctattttatactgaaatactttaattttacttccctgcagagcaagagcattttcttcattatcattaatgcattatcaagatagcattatcactatcacaattagaaaaagtttctaatatctccatatttctaatatgtagtcaattttgcattttcccagatgcattgtcccagaaatgtccttttcagctggtttgttcaaactaggattccatctaggaccataattgttatgtggcttaagtctctttaatccctaacagtcacatttttcatgacagtgatacagtgaacggaaccagccagccatgctgtggcatgttccatcttctgtatttgtctgattgcttcctctatttcctgttactagaagttaggtctgaaagcttgattagattgaagttaaatgtttttagtgagaatatatcatagatggtgttatattcatattctatctcatccatagacctgtaagagctggcttccttacattaattaggccaagctcgacccctggatgaggcttgtgaccttctaatccctccattgtgtagtttgatttttgttgtggggaagtaattgatgttctataacattgaccctatgtggatgttcatttctgcaatttcctggtcaactttcattttgttttttttrtgtttgtttgtttgtttttgagacgragtcttgctgtgttgcccaatctggagtgcagtggcgcgatcttggctcactgcagcctccacctcccaggttcaagtgattctcctgcgtcagtctcctgagtagctggggactacaggtgtgctccaccatgcctggctaatttttgtatttttagtagagatggggtttcatcatgttggccaggctggtctcaaactcctgacctcaggtcatccacctgccttggcctcccaaagtgctcggattacaggggtgagccactgcgcctggcctcarttttcattttgtcttagtaccaatggataacctttacttgaatcagttgttttattaggggccacaaaatggttattttttatttatttttttgagacrgagtgtcgctctgtcgccaggcttgagtattggtgcaatcatagcttacctgggacacctggactcaagcgattctcccacatcagcctccagagtagcaggggttacaggtacacacraccacatccagctaatttttctgttttttgtagagacagggtcttgccatgttgcctaggctggtctcaaactcctgggctcaagcaactctccgtgtcggcctccctaagtgctgggattatgggtatgagccaccacatcctgccttattttgtaattatgttattttttctacatttattagctggtattcttccttaaaataggactttttgaatttggtaatgctgaaatataattcctacttgaaagatagcacaaatgcataattttttatttaccaaatttcaaagacaattttgttttaatagccaccttaaatggtgacaaatgagttttgtctgactttctctcttcattgatttttcatatttttcattacgtgtaattacctgtaataatttattctttctgatgtgctaatcatcagctttggccagagggactcacagagctggattctagattttgaagtatcatagactatctatatatttaatatctttgacacgccctttaatatttgttatggttcttttttaagccagagaattagactagataataaggtttgttttcagctctagaattaggatcctgagctctgctaccaaatacactgccctgcttctgtccagctgcagaaaaccctcagcctgtctgtctttcaggccttccacaagctggcacccccatccattcaaccctttctcgattccttgacagaaattcccttctccagccacacttgtctcctaactgctacacatgaccagctcatccttcatccccagccttcacttacaccttttcccttgcctgaataccttgcctctgcctctctaagtatccaaacytccccgtcctccagatcccagttcaggctcccccacctttttattcctgttcccttaccttgtcttttatactcacttccctcttctcttggactatcactgtttcctgttctaattgatgttttcccaagtagattaccatcacccctgaaaagaaaagcccatgctttttaccaagaacattgctaggccagtatctgctaatgtcattgttatrtttctatatcttctctaacatgtagcaycttctatttagctgaataacagccttaaggtgcttttgaagtgtgcatgggtatgtgttgggaaaggagggtgttggggatatttcttataaatgctaatgctttcctattcattgatctatttctacccatatgtaatgagttccattacatatcaagaggtattgacaacttagccgtagagttgcattgattcaaaatacgtaagtcaacaattactaccttattatgtaatattagctagggaaagaaagatggcccctgggatcatatggtctaattaagcacaactgttgtagactttttctccctttcctgctgttatgttttgttttgttttgttttgttgtggatatgaaatcacaaacccccaaataagcctcataaagagacagctgtgcttataagattatgttcgtcacagattttattcaacgataatttatttctacccaaaatgttaaaaatatatattattgataatttacatcatatacattttccatgtttttattggcaaataagtttaacagtagcttatgtgaattctaaaggcatatagtttttttgattgtctaaaatttgacctcatattttttctttaagcctgtttgtaaattctgcctaactctttagcctgacaaacagagcttcagagtttgtttgttatataagtatattsatcttttctgaacagtgaaactttttgaaattatcttctgtacttgaagtggatcatctagtgattagtgacatcaggttgaattaattatttatattttcttgctggaaatgagtgatattccaaatgttcaagtactctgtgtgtgtatgtatgtatgtcataaaaggacattcatgacttggcttctgactgcctcactgagccctcccacctgatcacgcatacatacccccccaaccccactcccccacatacccccttcaccccagccatgaacaaccactctcagttccctgaatcccatgctgtttcatgttcataatgctgcatctacttgaagtgctctttttccatctttgttctttctacaaattgcaattatttatcttgcaggactcaattcagttatacattcttccttctcacctctgtctctctgcctttcaccccagtccaattaactctttcttcttctgtgcctctactgtacaatatgcagatgcccatcatagcacctaggacattttattgtccttattcgtgaacttattttcttatcttgctagtatctaagattgttggagggcaagaatcttatctggctttgtatctcctgaagttagtctagtgtttggyatagagaaggtacttacttatttatmtatttaatcaattagctgagttccctgctgtttccccaaacaacttcctatcctctccagaacagttttcatctggtagtcagtagtagtattgccaacaatactgctatgtcttcacattttaaaaatatatcacaagtaaaaaccattgtattagaatagcaatacatctaaggattgtattcttaaaggttttcaaagaggtgcctatttgtaacaatggttggaaataaattgtttaaaattgaggcttaacctgcattcatgtaaccaccaaccagatgcctttcccagtcaatatcctccccacactgctctaaaaaaaaaataaccactattctgatttgtctcaccgtgtattagctgtgcctgatcttgaccttcacataagtgagaccaaacagtatatatctttctgtgactggctactttcattcggcattatgtctgtgatatttttccatgtgaattcttgtgttaactgctagtttgctctttttcattgctctgtagtatctcattgtatgaatatgtcacagttttatttatctgctctactgttgatggacatttgggttatttctagacttggccttgaacataaagttttgtttgagaaccaaactacagagcatagcattagacctgctttttgtcctttctctgccttctgataggtgatgaattgatcttaatataggatgtacttaactttactcactcagttaagaaatatttattgagtacctgttatgttccaggtcctgagtaattgtccctcccttctggaatctcacagaccactggggaaggcagaccctaaacaagcaattataagtatgctaaatgttgtaacaaagaaatagaagatgttctaggtgtttataacaggaagacctaatctggtacgagggttagggagaatcttcccacagaaaggatatgctagctaagacccgaaagagaaacaaaagtactgttgggaaggaagacaaggaacaccattgcaggaaggtacaaggtcctgaaatggtaatgaagattgaaagaagccccaggtagctgaatcatagagagggaagtagaaaatggtaggagatggggctggaagggtagacagaagccatgtcattaagggccttatgagttatctgagcaatgtgagtcctcatccattaaagagttctaatcccacgaacggacataactttaaatttttttcttttgatgttaaccttacaaattctgaagtgcgtaaatcttaagcacaaagaatttttccatacatttttactaacacaacagctattccatcagtaaaattccagcacctagaatgtcctctccttcccagtcaataccctctctaagggtagccactattctgacttctatcaccagaggttacttttccctgattttgaactacaataataacaaaattatccagttgtgcacctttgggtcagactactttgactcagcctaagagctgcacagttcatccacgtgttgcatgtagcagtagcttgtcttttttattattctgcagtcttccattgtatgagtataccacaatttctttgcccactttgcccactttattgattgacatgagaattgcttttttttttttttttggctcttgtaaataaaatgattaggccaggcacagtggctcatgtctgtaataccagcattttgggaggctggggtgggaggatcatttgaggccaggagttttaagcaggctgggcaacatagcaagactccatctctaccaaaaaaaaaaaaaaaatagcctggtatggtggcctctgcctgtagtctcagctactggagagtctgaggtgggaggattgcctgagcccaggagtttgagattgcaatgagctatgatcacactactgcactccagtctgaccccatctcagggggaaaaaaaaaattaagctagagctgcaataaataaataaaactgttgtgaagatttgtgttcatgtcttttgattgacatgaacactcatttctgtgggaggtagaattttcaaaaagattactctgcgttcagggtggaggctgatttggaagagagcagaggtggcagttcctcaggcaccagctcttggatgtatagccttttgcaagtcatcttagtaaaaacaggacacattcataacagtttaaacatcacacaaatcaaagcgtagattaaaaaatggaaagcatatttccttttggcttctatcattactgtcgttttcatagttattatcattgtttacagccagctacagcttagagctgatagtaactggagagacaatatgatatgacaagttttactgacttgtcattgaatatgccccaataaacaaaaccattattgtcatgaaacatttgtgaagccccgttttcacgattgcttcttgttgtgccaaacccttgttaacctcaataggaaaggcaccaggttcaagaggtcaaagaagagacccagagccagcagataagacatgacgttttattatgggcttacatacaggggagagagtccagtgggggcgggctgggcaggaaaaccgcaaccacctacaaacatcatgcagtttatagagcatttccacttaccaccctcrcaccaacgacctccacctggcaaccttaatgtaacccaaaactcggggcctcaatcccccatatggctggtgttccatgaaatcggccaagggcctcagatgtttatcctagataaggaaggaatctccaggttagccactcccaaattacctagctcagaacacacattcaggtgcatcagccacacaggatcattctaaggagatgcttaaattattgctctcaggtgtgcttgccctatgctckgtgtgtgtgtgtgtgtgtgtgtgtgtgtgtgtgtgtgygcgcgcgtgtgtgatggtgctggagatgtgtgtctgaagtcatagacatatttctctgaccatatagaaccttagattcttagcagcatctctgaactgycctctcaggagctaaaacagtacagatacagagcattcggcaaactaaagttgttttgcttttggttttgtttctgaattgtgaatttatttatgtcttaaaactttaaaatcagcacattttgaattgagaatttatgtcttaaaacgttaaaatgagcatattcagttatatatacatatataatgaattgccattatagaaaataatacaatcaggtgaagttaagagtactattgtagaaatacccaagactttcagccacaataaatgttcagtccttagaaccatgggaattaagatacagcatagtggccaggcgcagtggctcacgcctataatcccagcactttgggaggccgagacaggcggatcatgaggtcaggagatcgagaccagcctgactaacatggtgaaaccccgtctctactaaaaatacaaaaattagccaggtgtggtggcacgcgcctgtagtcccagctactcgggaggctgaggcaggagaatcacttgaacccgggagacggaggttgcagtgagccaagatcgcgctgctgcactccagcctggtgacagagtgagaccccgtctcaaaaaaaaaaaaaaaagatacagtgtagtaataaggagttagtggtctgatttcaccttaccagatcaggctcttatccactactccaattatactctccctcttttcaccctattctgaatgtgctgtgcatgtgcattaaattaacaaatatttattgagcacctgcaatatgccagataccttgcaaggtgttagagataggaaggcacagtcactgatcaacaggaattagcagcctagtggaagagatagccaattgaaccagtgattaccacactccagtgagagtgtgggccaaaatgccagggtcctctggtggcacagaagggacatttaaatcagagcaggtaacccttgagctgattcttcaaagatgagagtcatgagctaggaatagtattccagacactaagatgaggaggcacaaaggcacagaggcagaaattagcctggtgcaggcaaggagtcactcgtaatttagtgtggttggagcaagagatgggcatgttcagaggaactggagagaagcatagaggaaaataacaataataataattttaatagagaaaaaaacttttaaaaagagagagagaagcctagagaggggtaggcaggaggcagaactgaagaggcttggtgctcaggaaggggctaagwaggaaggatcgagaagtaagaggcctgttcaagctcaccctgttcacagtggtactcctcatgtgtccttaagcatgtcattgggcctcgttagtataaccagagaactagggaaagttcccaaaccatgaarcactgtccagtagatgtgaaaagatgggctatgaacaatggtttcattactttgatagttaagggaagactgaatactgcattggcctctttaagactcatcaagactccagcatattaaaggtttctgaagtcctccagtaaaaacaccacttcggttttctttgattcagtattttccaaattatgtggaccgggagccaattttctgtaacagaatattagtatcatgaggcagagccccattctggcaaacagtggactagttctcaaaggtacaatcatccttattcattcactgattaaatttttttaagtgcagaaccaaacaactggttcactttatactttagattaacagcgtatccctgtaataaactttaggtatttattttccacagcaatgtttttttttattacatcaactgtcctgggatttattttttcttttctcatttttcatgtcatgcacagactttattacctggtaataagttgcaagaaatgtgaattgagttgtttctaagcaaatatcaatcatttatgatttgtttaatagaaattataatgaagaaaatcagggttttgcttattataaagtcattatagtcaacattagcaaatctcaaaattaataatgtgtcagtaaattatttgcattgctaaagagatcaaataaataaaaacaggattgaccttgttagaaatttgatattttcaacatttatctgtcagagccactgatttggaaattgttataaattcttgaaaaatggaaacttttttccctgtaaaaatacccatcatttggcaaactacagtgtcatttttcttgaagagaatgtagtgattgattatccagagtgctaccatgacaaggtaaaccaactgaatagctggaaaattgtgtgtaatcatatagcatcacagaggctctgcrctgagcacaaccattagaattaaaccatggcattctaatcattccctgctggtacttcctgttcatccccaaaaccttgacctccagtgggtatgcagaggtgttcgcagtcatcccttcccctccaaatgctatcagcacaattctcgtcagctgaaagctctgcaataaatacaaaccaaacccaaaccacccaaggagatttcaaaatgcaaggtgtctgtgtctaaaatccctcatatatatgacattctgagatttattctgtgtattaacattaatctagtttcttttattaatcgtattgtcctgagaatcctgagagattataaacaactgagggaagggaaggatgggagatggacaaaaagaaaagaggaatgctgatccctcttgagaggctgataatctattcagaaagacgaaatacacctgagatgacttgagagcagttacacagtattcgcccagtgtgaaagtaccagtacacaaatttaatgcatgagtcatgggggccaacagagtaaaggagcaatccaattatccttgtttattagagaactaaattgagtcataagaaaggaaggggctacccaaacctaccccagagatrgttatcaatagcatacttgggaccagaacaaggccctttctcccaataatcagaggcatctcctcatgctcatcttccctgcaatgttttagattttaaacaggctttgttaggatggctgaactccagtctcctttattaattgctgcccacatgttgtaggatatcctgtgttctgaatcaggatgaggattttaaattcttcttagcgtagggacgtgtagccaggcagaatcaattcctgtcactcacacacaaatacagaggaatgggattatggatcagggtgaagctgcagtgctttaatctcaaaatcaatacagaaaaggaagttgaacttctggggattctatagagactgtaatttggcttcctatgaggtttgccttatagaatatagctgctccttccttttcaccttctgattattttactggggtgggaaaaatgaggggaaggggaaagatgacaagaaacttctaccaccaaatcttcttgaataagcatgcaagtgtaactcgtaattcaagctaatccattgtgttgagaagagctatacacctttgtttattcttttagaaaataattagccaaaaccctgtaccccataatctgtatttaagcataayaaaaatgcctttgatttattcatagttcactgtcaagactggaaaagtattttttaagcatacttttatggctaagcttaccatagcctatgtaattttatataaatacaaaatcaacaaaccagttattgaccgaaggattccaagctgctcagcctgtgattaatatttaccccagtgtawttctgcttcttttgaaagaggcatgaactaatggtttaaacaactcagtcttttcttaataaaaaatttagaatttgttgactatgcrtctttttcagatataacactgatttgctgcacagtgctgtcggcatctagctttaagatgggcttatttttcctttcagatagtttttttaattcagttttaaaatatgtctgagtgtgtttggaccctgcgcctacagtggtgacagcaatatgaaacactgtaatctcgtgagaaaatgcactgtgggcagcagaactccggtctggctctgaggcagaatggtatasttagaggagcaaagcctggagctccttctttatttatttcatctttctaagcttgtttcctcatctttaaactggggatgattataggatacacctgataggggtgttgagaggattaaacaaaataaaatatccaaagtgcttatcattgtactttgcacttgtaagaaccctttaaatgttcatgattatcatgattattatgtgagtctcaagtgagataacatatgctgtgtatgtgaaaacattctacaagctgtaaaacacaatacaaatgttagttgttattctgaatagattgatggttttgaaacttttaaaataaatcatggaaggttttttctttgtgctgcctgtcataggtccctaatctcaaaaagccttggagtgataaatcaggctccaactgaatatgcattttctgtcttaaaagccagagttatcttgtgagtgtcaagaattccatgatagcgacttgaaaatccctattctgtgtccttccagagaaaamacttgctcaggtcttgggaagaccagcgctgtgtaagatacttatttggttgttgttttgagttcatatttcttttttttttttcagagtccacagagctattttattattattactattattattattttttttaattatactttaagttttagggtacatgtgcacattgtgcaggttagttacatatgtatacatgtgccatgctggtgcgctgcacccactaactcgtcatctagcattaggtatatctccgaatgctatccctcccccctcccccctccccaccacagtccccagagtgtgatattccccttcctgtgtccatgtgatctcattgttcarttcccacctatgagygagaatatgcggtgtttggttttttgttcttgcgatagtttactgagaatsatggtttccaatttcatccatgtccctacaaaggacatgaactcatcattttttatggctgcatagtattccatggtgtatatgtgccacattttcttaatccagtctatcattgwkggacatttgggttggttccaagtctttgctattgtgaataatgccgcaataaacatacgtgtgcatgtgtctttatagcagcatgatttatagtcatttgggtatatacccagtaatgggatggctgggtcaaatggtatttctagttctagatccctgaggaatcgccacactgacttccacaatggttgaactagtttacagtcccaccaacagtgtaaaagtgttcctatttctccacatcctctccagcacgtgttgtttcctgactttttaatgattgccattctaactggtgtgagatgatatctcatagtggttttgatttgcatttctctgatggccagtgatgatgagcattttttcatgtgttttttggctgcataaatgtcttcttttgagaagtgtctgttcatgtccctcgcccactttttgatagggttgtttgtttttttcttgtaaatttgtttgagttcattgtagattctggatattagccctttgtcagatgagtaggttgcgaaaattttctcccatgttgtaggttgcctgttcactctgatggtagtttcttttgctgtgcagaagctcttgagtttaattagatcccatttgtcaattttggctttggttgccattgcttttggtgttttggacatgaagtccttgcccacgcctatgtcctgaatggtaatttctaggttttcttctagggtttttatggttttaggtctaacgtttaaatctttaatccatcttgaattgatttttgtataaggtgtaaggaagggatccagtttcagctttctacatatggctagccagttttcccagcaccatttattaaatagggaatcctttccccattgcttgtttttctcaggtttgtcaaagatcagatagttgtaggtatgcggcgttatttctgagggctctgttctgttccattgatctatatctctgttttggtaccagtaccatgctgttttggttactgtagccttgtagtatagtttgaagtcaggtagtgtgatgcctccagctttgttcttttggcttaggattgacttggtgatgcgggctcttttttggttccatatgaactttaaagtagttttttccaattctgtgaagaaagtcattggtagcttgatggggatggcattgaatctgtaaattgccttgggcagtatggccattttcacgatattgattcttcctacccatgagcatggaatgttcttccatttgtttgtatcctcttttatttccttgagcagtggtttgtagttctccttgaagaggtccttcacatcccttgtaagttggattcctaggtattttattctctttgaagcaatagtgaatgggagttcactcatgatttggctctctgtttgtctgttgttggtgtataggaatgcttgtgatttttgtacattgattttgtatcctgagactttgctgaagttgcttatcagcttaaggagattttgggctgagacgatggggttttctagataaacaatcatgtcgtctgcaaacagggacaatttgacttcctcttttcctaattgaataccctttatttccttctcctgcctgattgccctggccagaacttccaacactatgttgaataggagcggtgagagagggcatccctgtcttgtgccagttttcaaagggaatgcttccagtttttgcccattcagtatgatattggctgtgggtttgtcataaatagctcttattattttgaaatacgtcccatcaatacctaatttattgagagtttttagcatgaagggttgttgaattttgtcaaaggctttttctgcatgtattgagataatcatgtggtttttgtctttggctctgtttatatgctggattacatttattgatttgcgtatattgaaccagccttgcatcccagggatgaagcccacttgatcatggtggataagctttttgatgtgctactggattcgttttgccagtattttattgaggatttttgcatcaatgttcatcaaggatattggtctaaaattctcttttttggttgtgtctctgcccggctttggtatcagaatgatgctggcctcataaaatgagttagggaggattacctctttttctattgattggaatagtttcagaaggaatggtaccagttcctccttgtacctctggtagaattcggctgtgaatccatctggtcctggactctttttggttggtaaactattgattattgccacaatttcagctcctgttattggtctattcagagattcaacttcttcctggtttagtcttgggagagtgtatgtgtcaaggaatgtatccatttcttctagattttctagtttatttgcgtagaggtgtttgtagtattctctgatggtagtttgtatttctgtgggatcggtggtgatatcccctttatcattttttattgtgtctatttgattcttctctctttttttctttattagtcttgctagcggtctatcaattttgttgatcctttcaaaaaaccagctcctggattcattgattttttgaagggttttttgtgtctctgtttccttcagttctgctctgattttagttatttcttgccttctgctagcttttgaatgtgtttgctcttgcttttctagttcttttaattgtgatgttagggtgtcaattttggatctttcctgctttctcttgtgggcatttagtgctataaatttccctctacacactgctttgaatgcatcccagagattctggtatgttgtgtctttgttctcgttggtttcaaagaacatctttatttctgccttcatttcgttatgtacccagtagtcattcaggagcaggttgttcagtttccatgtagttgagcggctttgagtgagagtcttaatcctgagttctagtttgattgcactgtggtctgagagatagtttgttataatttgtgttcttttacatttgctgaggagagctttacttccaactatgtggtcaattttggaataggtgtggtgtggtaatgaaaaaaatgtatattctgttgatttggggtggagagttctgtagatgtctattaggtctgcttggtgcagagctgagttcaattcctgggtatccttgttgactttctgtctcattgatctgtctaatgttgacagtggggtgttaaagtctcccattattaatgtgtgggagtctaagtctctttgtaggtcactcaggacttgctttatgaatctgggtgctcctgtattgggtgcatgtatatttaggatagttagctcctcttgttgaattgatccctttaccattatgtaatggccttctttgtctcttttgatctttgttggtttaaagtctgctttatcagagactaggattgcaacccctgcctttttttgttttccatttgcttggtagatcttcctccatccttttattttgagcctatgtgtgtctctgcacgtaagatgggtttcctgaatatagcacactgatgggtcttgactctttatcgaacttgccagtctgtgtcttttaattggagaatttagtccatttacatttaaagttaatattgttatgtgtgaatttgatcctgtcattatgatgttagctggtgattttgctcgttagttgatgcagtttcttcctagtctcgatggtctttacattttggcatgattttgcagcggctggtaccggttgttcctttccatgtttagtgcttccttcaggagctcttttagggcaggcctggtagtgacaaaatctctcagcatttgcttgtctgtaaagtattttatttctccttcacttatgaagcttagtttggctggatatgaaattctgggttgaaaattcttttctttaagaatgttgaatattggcccccactctcttctggcttgtagggtttctgccgagagatccactgttagtctgatgggcttccctttgagggtaacccgacctttctctctggctgcccttaacattttttccttcatttcaactttggtgaatctgataattatgtgtcttggagttgctcttctcgaggagtatctttgtggcgttctctgtatttcctgaatctgaacgttggcctgccttgctagattggggaagttctcctggataatatatcctgcagagtgttttccaacttggttccattctccgcatcactttcaggtacaccaatcagacgtagatttggtcttttcacatagtcccatatttcttggaggctttgctyatttctttttattcttttttctctaaccttcccttctcgcttcattycattcatttcatcttccattgctgataccctttcttccagttgatcgcatyggctcctgaggcttctgcattcttcacgtagytctcgagccttggttttcagctccatcagctcctttaagcacttctctgtattggttattctagttatacattcttctaaatttttttcaaagttttcaacttctttgcctttggtttgaatgtcctcccgtagctcagagtaatttgatggtctgaagccttcctctctcagctcgtcaaaatcattctccatccagctttgttccgttgctggtgaggaactgcgttcctttggaggaggagaggcgctctgcgttttagagtttccagtttttctgttctgktttttccccatctttgtggttttatctacttttggtctttsatgatggtgatgtacagatgggtttttggtgtggatgtcctttctgtttgttagttttccttctaacagacaggaccctcagctgcaggtctgttggaataccctgccgtgtgaggtgtcagtgtgcccctgctggggggtgactcccagttaggctgctcgggggtcaggggtcagggacccacttgaggaggcagtctgcccgttctcagatctccagctgcgtgctgggagaaccactgctctcttcaaagctgtcagacagggacatttaagtctgcagagtttactgctgtctttttgtttgtctgtgccctgcccccagaggtggagcctacagaggcaggtaggcctccttgagctgtggtgggctccacccagtttgagcttcccggctgctttgtttacctaagcaagcctgggcaatggcgggcgcccctcccccagcctcgctgccgccttgcagtttgatctcagactgctgtgctagcaatcagcgagattccgtgggtgtaggaccctccgagccaggtgtgggatatagtctcgtggtgcgccgttttttaagccggtctgaaaagcgcaatattcgggtgggagtgacccgattttccaggtgcgtccgtcacccctttctttgactcggaragggaactccctgaccccttgagcttcccaggtgaggcaatgcctcgccctgcttcggctcgcgcacggtgcgcgcacccactggcctgcgcccactgtctggcactccctagtgagatgaacccagtacctcagatggaaatgcagaaatcacccgtcttctgcgtcgctcacgctgggagctgtagaccagagctgttcctattcggccatcttggctcctccccctgttttgagttcatatttcaaaatgtcacattcttgcaggagagctcaggtaccttaaattatgacatacttggagttgtccttccttgtccaacacattgactacagaaatctcatatcctctctttgttgttcatttccagagcacaatcattgtggagaagacagttcaagacctcctgaacctgatgcatgacttgagtgcatattcagatcaattcctcaacatggtgtgygtraagctccaggagtacaaggacacctgcactgcagcttacaggtagagcttctgttaggggctaagcaaagtaacgtttgagcctgatggtggttccarttggtgaaattgcttcmatagcctratttccaaaaggatcatctctgagtttgtcaagagatgagaacatgcatcatggaaatagcctcctagacstttgtgtagtcagaccaacagagagaatgaaagtgatgaagggacgcagccactaggactaccaatgcrtggctcagattatgtgtcarccttgatgttcatgaaaacctagaatgataagatcatgttcctcaaggaaattccagatcttggttagtctatcttgtggttaaaaagatccttaaagtagagcaatttgaaactcttaataatctttaatagtgtttccttttaattaaaaatayattcttcctgatatttaatttgtagcattcctactgtcacaaaagaacagttacccctgttttcagcatcagtagcaatgaaaaaccattgttatgaacttgaaaaccattagttatccctctgatttccttccttaggttcaaaaaaatctctctgggcttgtggaaaagatcatagcaattctctaagaaagctaataatgggarcaaattatratctggttcacaagacatgaaacaattagggaagaaaagaatgtataataaaatactaaattatatgtgatatataatgaaggatagataggtaaagtgcagtacataatcaggtgctacttgtacagtatagactgtgagggcagaaggaacaaaaaacaagaaagagaaagggttgtagtcgggaatggttttgcaggtgaggtatgtgctggactcatgaaatttacggaggtggagagaaacataaaggcaggggtggaggaagcaataagacagttgccccctattttattttatttattttatttatttatttattcatttattttttgagaaggagtctcgctctgttgccaggctggagtgcaatggcrcaatcttggctcactgcaacctccgcctcccaggttcaagcgattctcctgcctcatccccctgagtagctgggactacaggygcgcgccaccatgtctggctatttttgtatttttagtagagatggggtttcaccatgttggccaggctggtcgcgaattcctaacctcatgatccgcccacctcggtctcccaaagtgctgggattacaggcrtgagccaccacacccggcccagttgcccactatttaaaggggacaatgaggagatagtttgactggaacagagttcctattagaatctagtaggagataatgttgaataggaagattaagaccaactaaaaaggggtcataaaaaaataacattctgaaaatgtagatgttggatarcagatatggaatcattataagtgagcaaggaagcagtgtttacggaagatgaatttggcagaggaatacaacatagattaatgcttatccttcctcattccagcaagaagaatgatccacagttacatggacaaattaaacaacaaccatctcattgagatgcagtcccaataaccttttatgttcaataattatttatcaaaacttatatttaggttaaaatcatacatatacttaacaattatgtcaattggttgtgtactaaataataattataatggcaattcaaacaaaagaaagttaaaatttagccttgtggtaacagaaaatttaaagtttttggattttaatttatacagatagtcttttgtaaaaagctacaatggaataataaaataatttcaagcataaaaatatatttcattaggataaattccagtgaggaaatgaaatagaaataataattcaaagagaaaaaggaaaagcaaaamatatccagctgttaaagaagagcttgttcatatgtattttaaatgtataatggagggtatcaaatccctatggcattgagattctattggatgcttttttaaaatttttaattgacaaataataattatataatgagcacaattggatgttctgatatatgaatacattatgaaatgattacattcaatctgattcacatatccattacctctcatacttctctttgtgtgtctttgtgctgcagacatttaaaatctactctcagcattttgaaatatatattacattattgttaattatagtgaccatgatgttcaatcagtctcaaaatggcattccttctaactgaaactttgtatggtttgagcaacatctccccacctcaccccacacccaccccaatcccccagcccccagcctccagcaaccgctgttctaccctctacttctataagttcaactcttttagagtccccatataagtraaatcatgcaatatttgtctttctgtgcctggccattggatacatttaaaatagtgatttttaacagtgtcagtctttagggtatgccaaaatttatatctkttgcatctatttaaatgcakgctaaaaaaattaaatgtcaacttaaaaagggaaggagaatatagtttttcaaaattattttaaaggatacaccaataacaattgtaaaagccactattctaggttaattgcctgagattggaatttctgggccattagagtcttggattttcagttttacaaaaccagaytccaaagtggtagtaccaacgtctcatctaccaaaagagaatggaataaaatattttaactattaaaacttaggcccgatgcagtggctcacgcctgtaatctcagcactttgagaggccgaggcaggcggatcaygaggtcaggagatcgagaccatcctggaccatcctggttaacacggtgaaaccccgtctctactaaaaatacaaaaaaaattagccgggcgtggtggcagcgcctgtagtcccagctactcgggaggctgaggcaggagaatggcatgaacccgggaggcggagcttgcagtgagcagagatcgcgccactgcactccagcctgggcgacagagcaagactctgtctcaaaaaaaaaaaaaaaaaaaaaaaagagttcgagaccagcctggccaacatggtgaaagcccatctctaccaaaagtacaaaaattagccaggtgtggtggtgtaygcctataatcccagctactcgggaggctgaggcaggagaatcgcttgaacctgggaggtggaggttgcagtgagttgagattgcacccctgcactccagactggatgacagagtgagactccatctcaaaaaataaaaaataaaaataaaacttaaatattaaaaagtttaaaatttttaaaataattgcattttaataatattatattttaaatttatgttgaacctccattaaatwtaaagctttttttttttaagtagggcatgccctctttttctagtaagttgtctgattrtgggcacccaataactttcttacaaataataatgttgataaatagtaattatagtggagatgttgcgtaacctgaccatgataaggtcaagttgtctctagaatgtaaatcccactgatagccgtttatattgtattattgatgttgttgtcttgaaagacatgttttaagttcttgcagcttggcaccatattcatcatgggtgattttttttccaatcatttatgttcctgcctctcaagatgtcaagtggctggaagccactgcatctgcaaagcagactgatcattgttgaatagttttcatctggaagttttctctttgtttgaagtgatactctcctgtccattggacatagttcttttctctgartgataacaaatcagtttaatccttttatgaatgcccttgaaatatatgaagatagctatcatagtccatttagtcttgctttccctccttaaactgaacattcccagtttctggtatgccctggtctatgaactatctcagtcatctttctccattacccattagcttggcagtgtccatcttaaaaaggagtgccccagagtatacccagtgttccagatgtactctttttttttttttttttttttttgagacagagtcttttgccagagctggagtgcagtggcgcaatcttggctcactgcagcctctgcctcccgggttcaagtgattctcttgcctcagcctcctgagtagctgggactacaggcacaagccaccatgcccaactgtctatttatttatttagtagagatggagtttcaccatgttggccaggctggtctcgatcgaattcctggcctcaagcgattctcccaccgcctcggcctcaccaagtgcccagatgcactctgggtgttgagcagcaccatcactttccttgttcaggacccagtgctggacacaatgcttcttagtgtgtcctatcattgcatttgtcaggtatttactgagcatttaccaagatgctgtgagggtgtgtggggataaagaaattaatcagtcaagattctacctttcatgtgctcatattcttggtgaagaatagaaagggaaatatgggacaaagaaatagaaagcatgtatccacagcattaattcatgacagaaaatatggcaagataggtaaaaatgccttgctgtgggaggaagaaattacgaaggaggacagggaaggcttagtgaagtatatgaactaggctttgtgaagagtgaagaggaattagacataggtttgaagaagagcacgaacaagtgataaatgtctaggatgtggaaaggaaagcttgggtcagactggaggatcgcgaatgtcagactcaaggaactttgcctttttaaattaggtagcgaggagccactgagtgggtgttaagcatggagtgccacgtgcacacctgtgctttagggaaatttttctgagttttgtgtaagatggatttgaaaagcaagrgtatagagatagaggggagagagacattaagtgcctgaatcasgggacagggaaggaaaatggagaggaaggaacagattaagagatagtaaagaggtaaacttgataagactttggccactgattggctatagaagaagaaatacagattgaaattagtattatcttttctatgctgtatttrtggtgatttttgtaaaacacaaattcaggatctcacatttayccattaaatttaatgttatttatttatttagagagattctcactctsttgcccaggctggagtgcrgtggcacgatctcagctcactgcagcctccgcctcccagattcacatgattctcctgcctcagcctcccaaatrgctgggattacaggtgcccaccaacacacctggctaattttkgtagttttagtagagatggggtttcaccatgttggccaggctggtctcaaactcctgacctcaggtgatccacccacctcggcctcccaaagtcctgggattacaggcatgagccaccatgcctggccaaatttaatgttatttttaagtcaccatttcagcctattgagatatttttgaatcttcattctgtcrtcaaaaaatcttagctattcctgtaagttccttgtcttccttgattacataagcaatcttttttttatgcatgtcattgaaaaaatgtccaacagcatargactaagttgagaattggggagctatacctcctgacacttccttgtatgttgacatctgtatattacttagtgcctcaggagttcatatgtttttctaactaggaacctgggctttagctcaagagcaggccctacagcttaagtttaaatgccagcttttctacctactatttatatgacactgaaaagctcctcagcctctctgccttgatttcctcatctgcaaaaaggtaataatagtcctttcctcaaagcgttrtttcaaaaattgtcaatcttttataactggttttagcgaagtgatatgctcccccaaaaatgatttgctgctattttgataatgataataatggtaatgacagtgattgcctttaccagttcccatgacactattccacatatttcataatctgccctataaaagattgatcaggtttcttgctggtgtcttcccagcctgattcttttaatgyagccaacccttcctcatgttggcatgcaggcctgttatggacaatactagatatttgttcaagaatcctcccatccctttactgttaggacccacttctcccaactgaagcattccttaagaactctcttcttgggcagctttcaaattacctttggaaacaagatcaagataaccaagagccaaatttaccaccgccccagtcagttaggaaaggatcatgtgacctattcttcgtgagatcctcctagcttctagtgagtaccactttctaattattcatgaactatgttttaattatctgttcagaattttgcctacaattccaaattcacctcatttctgtaatttacgttgcttttcttttatgaacatcagggatttgctcccaggcattttctcctgtgtgtcaggataccttcaaaaatgatcagcagtggttctgtgattccatgctttgaattatttcggcatcacaagatccttccctaaatttgttaaacctttcaggaatttttttgatctcaataaccattaacaaacacagtggatcactgcatctttaaaacaatttattcacttggtttctagaattccatttattcaacaaatatttattgagtgctagtacaagagtttgtagatataacagtgaactaagcagattaaatatctgctttcatggggtttatgttctgttgtgaatgggagaggggagatagacaataaatgaatgtaatacataaacataaagaattttagggcygggcgcagtggctcacacctgtagttccagcactttgggaggccgagggcaggcagatcaccaggtcaacagattgagaccatcatggccaacatggtgaaaccccgtctctactaaaaacgccaaaaaattagccaggtgtgttggcaggtgcccgtagtcccaactactcaggaggctgaggcaggagaatcgcttgaacccgggaggcagaggttgcagtgagccgagattgcgccactgcactccagcctggcgacagaatgagactctgtctcaaaaaaacaaaacaaaaaaaaaaaagaattttcgaagatagtaagtactgtggagaaaagaaatggagtaaagtagatagactyaggagtgtgagaggagcaggttgtagttttaaataggatgccccagggaggctctgttgagttgagcttagaggaaaggctccaaggagttgaaagagtttgaccagccatctgggtagagtgcactggcacagggcaaaggccaggaggcaggacgctccgggacacttttaaggaacagcaaggaggccagcatggttggagtaaagtgagcgagaggaggaagggtattgaaggatcaccaagagggaatggaggtcttggtaagccactctagggatgctgagtactactctgagtgaaatgagaagccattacaaggattgtgcgtaggagcagcatgatcttacatatattttaaattttaagtattgaaaataggctttaggtagtcaaggatggaagcagtgagaccacctaaaggccasagtggtaacccaggtgagaaatgaagactctttgcactgttggtagcagcagagatggagggaactgggtgaactctgaatgtatttgaaggaccagccagctgaattccctgccagattgaagatagggtgtgagagaaagaaaggtgtcaaaaataactctcaggattttatatttgagcagtgaaaagatggatggagttgccagctattgtgacggaggatgctgcaggtctaggcaagcagatcagtgcttaaatttrgagtgtctcttagccatgtgggggagggagttrgacatatgcatcaaaacaagagaggtctggcctggagatagatatttggcagccatcaacatataaatagtatagctaaatggaatttaaaactatgggactagatgaaatcttcacaggagggagtatactcatggcaaagaagaggaccrtggacttttatgaagtttgcaagatgacgagaaaccatcaaaggacattgacaagcagcagccagtgaaggaggaggaaaatctagaaaatacagtgttgtagtgttgccagcattagaactcagcacggactgagtgataaatgtagcacggactgagtgataaatgtaaayrtttttgtggagtagtagggatgaaaactggatgggtgtggccttaaaaaagagactgggagtagaggaagggtaaatagaggcaaaacttttgcactgagttttgcagcaaaggcgaacagagaaatggcatagtggctggagaaatgaggtcacaggaaggtttttttgttttatgtgttttttaartcgaagaaataagtacatatttgtatttgaagaaaaggacttgggaagaatgaaaatttggtgatgtaagaaagaaaggggaaaatccctgaaattatgtttttggccagggaagtagcggtggaggaggggtgtgcaactggagtgattggtttaggcgggaacatggatagttttgcctgcgctgtctgtccgttctataggaattgtgttatttytctgtcattcatattttaccgctttgtccaaacagcaaactctatctctcttggactactactctggaacatggccattgctttggtttttgacatattctggtcatcaggagcattttgattccttcccgtaagaaactctactgctgtggcatctctgctagccacagtctctgaaatggtgtccacctgttggtgcccactgtcacatctcaggggattatctgggagggatctaccatagttgctgaatgatggacctgggttaaatttttctcaggattgggaaaagtattctttgaggctttgaaagggaataaatagaaaatcatctttctggttgttatacaacaatgcacactcaaaggcacaacacatgcccccacggtgctgttgctgctggttaatcagcgtattcaggtttctggagaaagtgttktcttattgtatgactctgaagatkcaaagtgtccttacttcctctcttcccatttattgccctcccccagattggcacctgctgaggactaattagggcagtcctaatttggacggccaaatcctgattacagtgaggggaaaaacaggaaatgttctagttttgctgccagcaaatgactgacttaaatagaaagccatatacaattcaartgatccaaaatggtataacactggggaaggaggaagggagcaggaagacrttgcactctgattttctcccatgtgatcctcagcagatatccttcagagaaatcatcaaatctagaaactcacaatgccctctgctgagggttggcttgttttccaagcttcccatgaaaacctgggcagctcctgggagcttagagatctgaggaaaggtgaaaaacatatcacctttctatgagtacctcactctagagacagactgtgcctcaggtaatgtcaggttacatgctttggataaagaggggtttcctaaacagggaaatgagggctagaagtcttttccctaattatccacaccccttggggcttaaagggaaactcagctgtgaattctgtactgctcctcattaggaatcaggcacttggcccatgagttgcctacttccaagcagagtgcttccctccccttgcctgtcctctgtcctgagatccawccagcagctcatgtgtcccaaaataataatttaaagattggaaatcgcagttttcggaagtttctctctgttccaatttactatcagttcattaatcaatttttttttcttggaggtgggggataaggaggctctctgccttgtgttgggcctggcagagaatacaaataaaacctcttccctagtgttagaggctcagttggtttgagttgatttaagacataagcatgttacctttagcacacccctttcacaacttcagagaggagctagaactcatgctggacatgaagaaagagtgagaggaggagaagcctgcactcgctgatggcagacatcagagctggcacggggctaggcagcttgttgaccctcggtatgctcattgaggaaatttctaccagactgaacaggacgagcaagcagtggagcagcatggacgaccatggtgcgtgggagaaaggttgagaaatcacagtgactagagtggacagtgtggttgggtagaaatgggcaggaaaggagaaatttcttgtattaggtaaaagagtgctttcataggtcttggtaagaaggagtacrtgatcraagtggtgttttatgatctcactggccccactgtgctaaatagcacagactagacactaggractctggtggcttctgaagcccttcaggtttcctgtgtagccagaggccagggtcctataggaatgagactctccttgagctggccttggagcttttgccaacctaacttaactttgaacctcagagtgagagrcaggactagctggatttcttggccaactaagaatccctaagccttgctgggaaggtgactgcatccacctttaaacacgggggcttgcaacttagctcacacccgaccaatcaggtagtaaagagagctcactaaaatgctaattaggcaaaaacaggaggtaaagaaatagccaatcatctattgcctgagagcacagcaggagggacaatgatcaggatataaacccaggcattcgagccggcaacggctaccctctttgggtcccctccctttgtatgggagctctgttttcactctattaaatcttgcaactgcattcttctgctctgtgtttactacggctcgagctgagctttcgctygctgtccactaccgctgtttgctgccatcgcagacccrccgctgacttccatccctccagatccggcagggtgtccactgtgctcctgatccaccaaggsgccyattgccgcccccgatcgggctaaaggcttgccattgctcctgcacagataagtgtccgggttcgtcctaatcaagctgaacactagtcactgggttccacggttctcttctgtgacccatggcttctaatagaactrttacactcaccgcacagcccaagattccattccttggaatctgtgaggccaagaaccccaggtcagagaacacgaggcttgccaccatcttggaagcggccagccaccatcttgggagctctgggagcaaggaccccctggtaacaagaacggccaagggtgtataccagggaaaccctctgcaagctccagcttgtgatctgtctcttgaagctatgttatctcctaacactgatatatattcatttctattaaacattaaataagtaccaaaaacattataaaatatacacaatatctgtttcatagagggcattcagcaagtgagcttttattgtgtgctcctataatttattatgtgtaactttatgctggtatttattccattgtattgtaatttagacttttaaaatatattatttcattagttattggtttaactgtctttctttaaaaaaaaatattgtttttcaattgtagcttcacatcaaggttatttggggaaacttcaaaacatacatcctgggttttccatactaggtccactgagagttgggcccgggcaagtttagtttaaaaatatcctcaaagtgattgtcatgtgttactggttagaaatcactgatctgggccaggcaggcagggtggctcacacctgtaatctcagcactttgggtggcctaggtgggtggatcaccttgaggtcaggatttcgagaccagcctggccaacatggtaaaaccccrtctctactaaatatacaaawattarctgggcatggtggcaggttcctgtaatcccwtctactcaggaggctgaggcaggagaatcgcttgaacctgggaggcagaggttgcagtgaggactcrgtctggaaagaaagagagagaagaaggaggrrgaggaggaagaggaggaggaagaggaggagaaggagagagaaagaaggaggggaaggagggagggagggagaaatcactgctctgaactcttagcttccasaagttattatgtcattttccacacacctgtctgcagtatcttgcatggtgtctctgtataggccttgcactcttgttttttgatcaagtgaatcccttcactcatcctttccagtacatatcagttgcccttctggccaaatacagatgctgcccacctaaccagttgtcctacaaattctgtagcaagcagccagtcctcatttctcctacccaactcactctaccataatcagataggagtctgttgcagtgaccttgacacaaagtaacaaggacctagactggaaagaaaatactcagtaaagtattaatacatagtctctgtgcaagggactttatggtcacagctcatctagtcagtcrcaacarttctgttgaattagattctctgcctttcagatgaagaaacagaggttcaggaaagttaataacgtggcaaaggccacagagcataaagtrgtagtgcacatgtgaaaagcactagctctgtctcagtcttcagcccaaagragaggcaatggaattaaagaggaaataggaaacctgaaaaatgcttcacatgctttagagagacagtgtaatgactaggaaaatagactgcagaacagcgggtctgggttcatttcaggttctaccttgctagttggctgaccaccatcyagttcccagccttctgtgcctctgtatttcgcctatcaaatggaagtaataatagtacctaccacgcagggtggttgtgaggattaaaagtttatatatgccaaatgctcagaagaatgcatagctcatggaaaaggttaaattgtcagccaatacaattatttattgttgctgcaattggtgttttgtattattgacttttaaattaattcattgatgatattattgatattcaataagaagacagtacaagaaagtttttttaatttttttattatcatactttaagtgctgggctacatgtgcagaacatgcaggtttattacatcagtatacacgggccgtggtggtgtgctgcacccatcatcctgtcatctacattaggtatttctcctaacgctctccctcccctagccccctaactcccgacaggccccagtgtgtcatgttcccctccatgtgtccatgtgttctcattgttcaactcccacttatgagtgagaacatgcggtgtgtggtccagaaagatatttttatgtcgtttgttattttcctggcrttttgtgcttcagttatgtcattcattccttcaatctgttactcattcaaaaatcatttattaagcacttctaggagccagcgttattctagggctaaaggtgaagaagtgaattgactaggtaaggtccttgctttcgtggattttacaccttaatggagggagctagataataatcaagtggaaataaacaataaatttctcattaataaggatgatgtgattaaacaaaacaacaggttcaagtgaggagagtaggttcagggaagacgccgcagaggacgtggcatttgagctcagttctaaaggatgagaaggagccatgtggaaatgtgggaaagagcactccaggtggagaaaggagcaagtccgaagatgggaactagcttgaattcaggttaatgagcaaagagaatgaatactgagtgacattagacaggtagaggggtcggatcatttgggtcatttctggctgcacatgagaatcacatgggagcttaaaacatagccagactgagccccacttcagactgtgaaactgatgtatttttaaaatgcttcccaggtgttttcatgtgcagtcaggattaagaaccattgataaaggatcttgaggctagagaatttgaattttattctcagttcagtgggaagacatgcaaggtttaaatagggagtcatctgatctgagatctacttataaagatcttaatgatattcaaacacagactatatttaaatttgctttattataagaaaaatctgaacattgacggttgagacagattttttttttttttttttttttttgaggagttttgctcttgttgcccaggctggaatgcaatggcgtgaccttggctctctgcaacctctgcctcccaggttcaagcaattctcctgcctcaacctcccaagtaactgggatcacaggcatgtgccaccacactcagctaatttgtatttttagtagagacagggtttcgccatgttggccaggctggtctcaaactcctgacctcaggtgatccacccatctcggcctcccaaagtgctgggattacaggcgtcaaccactgcgtccagctgagacagattttatatgaattcttggtccacttcctgtgttacagtataatttttttcttcttgatcttttaagtgtcaaacagttatgatccttcatatgagaacttgtctatttaaaggttgttactaaattatccccaagagttaccttctgtaaactgtcattgcaaagcctttttcccttggtcctcttggatggtttctgttttccatgggccttctccagagttatcagaagttgtcattctcaggtagacrtatacactatcataaagctctctgaccagcattgagtatggtgtcaaagatgttctgatgtttctttcctcttttcctatgtrtgttgctccatcttaactgactttttggttttgtttttgtgtttgttttgttttatttggcagcataatactattatctttgcatccctaattgtcattatcacttgtgttgctggacatttcactgcggtttcgtctgctgcaggtccagtcattcacagtmtaaattggacgacggcactttamtttggaccagtcttgtccaaggttcatttgttgagcttggctcctagtttttgaagtatcttgaaagattcagtctgggaaagtacacatcatgccctgkctgtcaccaaacaattgaatccaattagccccacctgcacctggttgtttacctaatgaaagactcagcaccccagctgtgtccagggaccatgcacacycgcacttcccaactgttccagagaggaagcggtacacatcagagccaggcgacaccagcagatgttttctgaatgaaattcactcagctgtatctcgagggtggacctttctcttggcagcctcatcacctgtaccaaaaggtacacctattttcctcttcctcttggraacagatacaaatagttacacagttggctctgtctgtggctcattgagctgtgaattaatgagtacattatggttctggtagggatgattaaccttgcttctcctatggaataatttttggacatgtagctctccttttttgaggctatttggatatgtcctggaattctgtaacccacatgatctggtttaccagaaaatcaaaaacaaataaatgcaattagtcagggtggacttgccacttgagtaaaaaattttctttagggtaattgtttattgctgatcaatgccagtatttcaaattagaatatttggaattacttttgggattggtgttcattccaaatgtactaacrtatttattgttgagggcagtatgttagtagccttttcattcatttggatgactattttttaataaaatgggatcgatgcatattagagataatgtaatcttgaattactgaattaatccagtcctttaaaaatatgtaagtaaataatgtgggtacctttaatgtcatccaacctaacctaatttttttatttcagctaatgctaaaatggaaaattctagcccttcaaaatgtacggtaccatctcacacctacagatccaactatttcctgaacctgagggcagatatgggccagcatggatgcgctcaaagacgtagatgctgacaaaatgagttgggcttgggcttctcrctctgtggaacagaatttgacctatagtgtgggtctaagaggaattgaaccacacagccaagattctttctagatatgagtggtgaaatstcccacagccaagattctttctagatatgaatggtgaaatctcccacagccaagattctttctagatatgaatggtgaaattgaaattttgtataatttccacatgtcacaaaatattgttcttttagttttttaaaaaccattttaaaatgtcaacaccattgttagcttacaggacatacaaagacagctgatgggtaggtttggcccacaggtcatggtttgcccaccccattgtattagacagagtgctaattgggaagttatggataagtgcaaaaggaggggttttgtttgttttgtttccaaagggagagatcattgtaggctgacatagtcaacaaattcttcacagagaaagtgagtttttgaggagactttccaataataggccacctaggaataagtagcgtagaagggaaaggcttgtcaataatcgctctttggttcatttgttttatgagtcaggactattttacrttggggtttttcaaagagggacacacctgtattcmttacctgatttgtattgaatccagagaggcatggtgaagggcatggcacagagtgatctttgatttggttaaataccaaatgacttgacagctcatcaaagttgtttagagcagagaataaaacggaaaccattaagatgcttttagtgtaataagttatctagacttttgaaattgaagagggcttctttttatctctacttcagttcttatatgccttctaaataccaggtattgtggtaggcactagggacasaaaaactaagaagaaatcgactctgtcctcatagaactcatcatccartatgggattccagcttgcaaaaaagtgtagtaggaccagttaaaatagacgttggcaaacgcaaaggttgtggcccttgagtgcacatttaaatcacatgggaaactccaaaaatttctgttgcttgggtcccgcagcccagagattgtgatttacttggtcttgggtatggcttgggcatctggtttttaaaatagcttscccaagtgattctaatctttagtcaaggttgaaaacctctggtataggggtgatgaggcacaaaaaaagaggactcagatgtaccaagggaggagctggggcaatgcttgacaagtagaggcaaacaaggaggatgagaaaaaggctttctaggctgagatgacacacagaarcaggaaataatagatcccatttggaaaactttggaatactcatcatgggtagtgtgttcaaccagcatgggcaagagattggctaggaatcgtgaacagacacaaaggagaaaaggaatagcaggagataaagctgaaaagatagatgttcatgccttgctaagtctagccttggtcttacctggaattagaagtcactgaagacttgtaggaagggttataacatgattggatgtgtagtttagaaaaatgactcatctgactgatgtggtgagttcaactgatggtcttgtagctgcaggcgagaagcccagttacaaggttattgccaagtccaggtgaaaaaagatgagggtttaaatataggttaatagcagtgaacctggacaggaaatgacagatttattaagatattaaggagatrgaattggcaggatgtggtgactgggtaattaggatgactctgcattcctgagttgaataacaggatggcttgaatagggaacattagatgctcagtggtagagagagagagagagaagtagttagtaaattgagttcctcttgactcattttaacttgaaatgcagatggaactttcaagtagagttctacagtaagcctttggatatgcagactggaaacttagaagagagggctgccctagagataataatttcagagtcatcagaatatagatggttcaagctgtgcaagaagatgagactgcccaagtcagcaatgcagaattctgtggaacacagcatttaaagtatggatggagaaaaagagccatcagtttggctaagaaaggttaggatggtaggtaaagaacgtgatgcggaaagcaaaagaatagtatttcaagaagagagtaatcaaaagtgttggatgctttagaatagtcaaagagtgcgaagaataaaataaaaagtgctcttgggttggtggagcaatttcagtggagtaatggttctagaaccctgactgcagttgatttaagactggattttgatttcctgtcagaagtttggtgcgaatagatttaaaaagcccttttcttgtttctaacttgtagaaattctggataaaaaaattataactttaaaartattttaaatatgtaaccaaactcaaaaggatgaaagagaattctccagatgccatgaatgaaagaggaattaaaagccagaaacagacaaatgtggaagttgagtgggctacagaggtttcaggaccacatatagaggtcaaatagaggctagcatcttgacatcttccaggcagggagggagctttatctgtgcagaagttatgcaaagaactgtttcattcatatttcttagttcattcatgaatggaaccaagaaaacttgggacttaagaaggagctacccaacctggagtagaaaagtagcccctaaaagaaatcagaatcccacacctcatgtgatatgtgcaagtaagaactcaatttgtactacctgcgtagggagaaaaagccttaagccaaaaataaaaaataaaaaaggaaaaaaaattacaaacctatttggaaccagtgwaactcataggacccagaagaggcaaatgcagactacgtaacagtgatatcttgaaaattctgggcaaatgcaagattcctacagaggataagtyccattgaagtagagcttccagaacaaagtagcagaccacatgaggaaatacaccatcatgagaaaagaaggcaaatgcaacaaacaggacacttgacatctacaagaactaccaaagaatataaagccacttcatagraggaacttaaaaattgtggatttctaaaacattcaaggagataaagaaaagaacagattccatgatacaagagcaggacagtttggaagggaaaagccagtagatttgtaaaagaggcaaatagaaaatctagaaatgaaaaatataataactgcaaatttttcaaaaagcagtagatgggttaaatcgtaaagtagaccttggagagagatttcatgaatgagaggtgagacagtgaagtcaattagtgcaggctgctcctttgatgattgcctttgaaggagagggagcagctttgttagagaggaatgcagggaagagattcattcattcattcattcattcattcatttttaaaataacagaggattagggaatatatagtggaaagagtaaaaatacaggaaaaaggggagataggtcggggagaaaagatccccaagagcctaactagaggaattactggaaattaatgaggatgaagcagatttgaacatatttctgttgggggtaggaggtcaaatatttgaaagtatgtaattagatcccttccttctctgtcagataagaaggatatgggcggtaagcaatgaggagatacagaaagrgcaaatgtttttttaaagaaatagctactaagataaatggggagatgaacctgatcagagacaggtataaagaatgtcagagaacattgaggggtacacctgcaacagtctcttatctgaggtggtaccatgctataagattgcacctagcaatgcaagtataagattgtaaaagttagattgttggawtagtccataaatattacagaaaagatgcaaggaaataacaaaagagggaatagaaaatagtagtaagaaagtaatatgagagattggagggaagaagtttctgtaatccaatttttgtgtctctgaccatggttactatgagaaaacatttgcttatagtgaattagaagaattctagaatctgttttcctcctgcctcacctcatttcccatgcaagwgtgccttgagctcaaaactttagaagaataagagagcaaataaatagctctcttatttattctagtttattttaaaagaaccagggtaatattgttccctacaacagtggtccccaacctttttggcaccagggactggggtgatgttttgggtgagaaaaaggggatgggatggtttcaggatgtaactgttccacctcagatcataagacattagttagtttctcgtaaggagcatgtgatctagatccctcgcatgcgcggttcacaatagaatttgcgctcctgtgagactctaatgctaccgctgatctggcaggaggtagagctcaggtagtaacgctcactggcccgctgctcacctcctgctgtgccgcccagttcctaacaggccatggaccaggaccagtccgtggcccaggggttggggacccctgccctacaacatgaaactatgttaccttaagtcagtctgtcatgaatcaaggtttgtaggcttcaactttttgtttttgttttgtagagaaggtcaatctgtgttgccgaggccagtcttgaactcctggcctcaagcaaatcctcctgcctcagtctgccaaagtgctgcagtcatagatgtgaaccactgcatctggcctaggctccatcttcttttgtctacaaacattaattgtctgttgggtcaaggaggtatcatacatacatgccatatatattgtttatttgcaagtgcataatgccccccagagtgacccctgtactaaaagagattcctgcctatgatggggcaatctcctggagtcttggtcagccccagaggagaagcagctaattggcactcctttcataaataaatgtcatttctgtcacctagtattgctgacgaggatatttagatcgttgaaattagttacagtgacacatgttgaaccgaaagaaaagctttttaattaagttgaaattgaacatttaagatgaatttacaggtaacattctggtaagagcagtgttaatagctaacccatgggccctatgaaaagacttgaagcctgtcagctctaggtcactagtcagagcccactggagatggcagtaatcaaaggctttttctgcctgacaactggggctgagggtttcttaatgatggtatattggctgtgaagagaggggtgtccatrattcaagcaataccctcaactagaactaattgatagtttaaaccaaggagtccagagtacaaccttttgtaacacttccgtcacctttcaggtactagttatgttgtcacttaatagcattcttttacatggttatcccactttttattcaacattttcttaaaaggtcccccccaaaacataccatatgcttttatttatcctaagggatcaaatatggtaagaggagctaattagttttttcaactgtcacgattactcaacaactaagaaactaagaatgaaatctagaaatgttgtttcccagtaatgtgacctattaatgggtatcatggactccaacttagataatggattatgttcaaaggagagatgagtgtgatttcttttttcctgcagcaaaggtagatgaaaatgctaactgaataccaggcatcatgctacagtgtctcttttctattggctgtgtttaggggtattgtccagtcagaagaaaaacttgtcatcagtgcatcctgggcaaaagatgatgatatcagcagactcttgaaatctctaccaaactggatgaatatggctcaacccaaacagctgaggccaaaaagagaggaggaagaagatttcataaggtaaaaggtccattttctaagttgtcctaaacatagggaggaagcayatctgtttagctaatatttttttacatgaaatttaggcaaattctaaaaatcaagcagcaattacttgaacttagtaaaatatgttttcctcctgtctcacctcatttcccatgcaagtgtgccttgagctcaaaactttagaaggaaaaaaattaatgtgagtcaaatttggaacattgctaaattggattaaaatatctttttttttttttttgagacagagtctcactctgtctcccaggctggagtacagtggcgcaatctcggctcactgcaaactccacctcctgggttcacgccattctcctgcctcagcctcccaagtagctgggactaccggtgcccaccaccacgcccggctaatttttttwtttttagtagagacggggtttcacmgtgttagccaggatggtctcgatatcctgacctaatgatccacctgcctcggcctcccaaagtgctgggattacaggcatgagccaccacacccggcctaaaatatcttttaatttataggttcttctttcctcttagaggaaaaatagaattcagtgattcattcactcagcaaagttgtttgtagcccccatatgggccataccctttcaaacatgagagtaagataaatttctgtccatacagaatatgtttctgtccatacagaatatgttatgattgttcttaacatgttctccagtccatagaastgtcagttggactttctggaaaatacaaatgtgcttcctgtgtgtgtgttcacatacattgtattatccgtgattgttttctatgtttcaacaaaagtagagtctttcttttaactttatcactcaacatttgcctttgttcaatttaaattatttacttagccatgaaagtgtggcctaatttgatgaagctactcatttccatatggctggcttgccacagtgaaacattttcacctctgtcacttatagagctgtgtaaagtagaaaaacaatggtggtaatactttgtcacatcaaagttrggattaatattatcttcttttgcctaagtgaatgaataagtggtaaaaataaaataaaagcattttaaagaaacaaagactagaagaggaataaaaggaataagggcccatgttttcattcatcacagaactgtgttcttatctctctcaaattgtgcaactgtagacaaatctttactgctcacaaagttaacctataatcatacactacagtgccatatttttatgaactttttattatgaaaattttctgtagcatcatgttaaactttctcaaaaccatgattyttgaaagtgcatgtgtaatttaacctaaattcttcctgtttatgtttttcttccttattattcacagtatctgaaagaaacttgttagctagttaattatataagaaaactgtctctctccccacctttattttttgaaggagcaattttaggtttacagaaaaacttgaacaaaaagtacagagttgccatagatccccttacacctcccccaaccatttcctctgtttttaacatcttgcattcatgtggtgtatttgttataattgatgagctaatactgatacaatattaatgactaaagtctgtagtttacattaaggatcactcttcatattctaaatatatcggttttgacacatgtataaggaatacatccaccattatagtattatgcagaataataattttgctgccctaaaaacttcctgtgttcctcctattcatccctccctccctcaacagcctgaacccctggcaaccactgatctttttattgtctccatagtttcgtcttttgcagaatgttatatasttgaaatcatacagtatgtttcctcttgagaatgacttattttgcttagcaatgtgcatttargtttcctccatggtttttttattttgtggtattattgctcatttcttttttatctctgaattatgttccatttcataggtgtaccactctattcactcatctattgaaggatatcttagttgctttcaagttttggcagttatgaacaaaggtgctgtaaataatttgtgtgctggtttttatgtggatgcaggtttttaactcatttgagtaaataccaaagaatgtgattgctggatcataagggcaaaatatgtttagttgtataagaaactgccaaaatgtattccaaagtggttgtatcatttcacattcctaccagcaaggaacaagagctcctgtttctccacattcttgccaacatttgatgctgtcagtgttttggattttagccattcttatgaatgtgtagagatatctcattgtattaatttgcaatttcctaatgacatgtgatgttgaacatcttttcatatgctatttgctgtctctatatctttggtgaagtgtttattcaaatcttttgcctacattttaattgggttatgggtgttcttgttcagttttaagagttatatgtatattttgggtagcagtccttcatctgataagtattttgcaaagattttctcccagcctgtagtttgccctttcattctcttcacgatgtcttttgcagagaagttttaattaagtccaacatatttttgtgcttttctgtcttctcttgttttaattattttgtatggttccattttttcttgtcttttaccatattagttatacttcttttttttacaccttgcattcatcgtatacatttataactaatccaagtctgctttcaatgacactgtaccactacacaggcagtgtaagtaccttataacagagtattcccaattcttcctccctatcctttgtaacattgctgtcattgatttcatttatccataagctagaatcattgactacaatgttattgttattattttgaacaaactgttggatcaagtaagaattagaaaaggtttatttttacctttgtttattccttccctaatgctcttcctttctcaatgtagatccacgtttctgatctgtatcatttttcttctctctgaagaacttcttttgacacatcttgcaagacagatctactggcagcaaattccttcagttcttatttgtctgagaaagtgtttattttttcttcacttaaaggataatttcactaggtacagaaatctagactgatgtattagtcaaggttttgcagagaaacagacctaataggatggagggagggatagacagatagattaattgactgattataggaattggctcattaaattatgaggccaagaacatccaccatccaccatttgccagctgcagaacaaggaaagtcagtggtgtaatttattccaagtccaaagccctgagaacagggttagagggtggggctagtgtaagtcatggagtctgaaggcctgagaaccaggagcttcagtgtctgaggacaagagaaaatggatgtcctgctctagcatacagagaatgaattcacccatctccacctttctgttctattcaggccctcaatggattggatgatacccatccatgttggtgagggaggatcttctttactaagtctactgattaaaatgctaatctcttctagaaacaccctcacagacacaccagaaatgttawaccagttatctgagcatctcttagcccagtcaagctgacatataaaattaaacatcacaactgaggattgttttttttytcttttaacaactaaatattttactccactctcttcttgtctgcatgatttctgaagagaagtctgatataattcttatccttgttcctctataggattttttttcctctggtttctttaaagattttttttgtctttgattttgtatactttgaatatgatatgcctaggtgtagaatttatggtgtgtatcctgcttggtgttttctgagcctcccagatctgtartgtagtgagrtatctctaattgatttggagtaattttcagttactattgcttcaaatatttattctgttgctttttctctttcttctccttctgatattcccattatgcatatgttataccttcttaaactgtcttatagttcttggattgtatgttttttaactrtctcagagttcttagatattctgttgttttattcttcttttctctttctggttcagttttgaaagtttctrttgacatttcttcagtgtctccagttctttccttggccatatccagtctattgctgagcccatcagaggcattcttcatttttgttacagtgttttttatttctaacatttgctcttgattctttcttagagttttcatctcttcttacattacctgtagtttgctttttattggatatctatttattatatatacatacttttaatgaagcataataaatatatgagaatgtgcacatatcaaagtcacaactgtgccaatttttacactgttcacttttgtaaacaatactcagatcaagaaacagaacwttagcaataagaacatagcaacaaagtgccttctcgtcctccttctttctagttactgcctgcctcttcaaaagttacccttgctgacttgtaactactagactagtttaatctatttttggaccttatataaatggaatcatgcaattatatatatatatttatttttatgactggcttcttattttccacattatgtgagcaagattcatccatattgctgtatataggttctcactacttcataatctatattgtatttcattatgtcactacaacaaggtttttaaaaaatttatacatggccgggcgcggtggctcatgcctgtaatcccagcactttgggagaactgagacgggtggatcacgaggtcaggagatcgagaccatcttgcctaacacggtgaaaccccgtctctactaaaaatacaaaaaaattagccgggtgtggtggcaggtgcctgtagtccccagctactcaggaggctgaggcaggagaatggtgtgaacccaagaggcgrggcttgcagtgagccragatygcaccactgcactcaagcctgggcgacagagcgagactccgtctcaaaaaaaaaaaaaaatttatacatgtgtgtttctatgtgtgtgtgtgtatgtgtgtacatgtaattgtgtattcatacattcatcattctgctgggctcttggaactatttcacatagtgctattgtgaatatcctgggttttttttttgataaccatatatgtgcattttggttgggtatatcctaggagtagaatttctgggtaatacagtatgcatatgttgagtgttagtatacactgccaaataattttccaaagtggtggtaagagtttacactttttttttttttttttttgagacagagtttcscccttcgcccaggctgtagcgtagtggtgcaatctcagcccactgcaactgccrccttctggtttcaagarattctcctgcctcagcctcccaagtagctgggattacaggcacccaccacaacgcctggctgatttttgtatttttagtagagacagggtttcaccatattggccaggctagtctcgaaccttgtgatccgcccacctcggcctcccttatagtgttgtatgaragttctagttgccccatatctcaccagcacttatttttttattttagccagcccagtaggtttgtaagggtatctctttatcatttaatatgcatttatctcttgaacaatgaacttgaacacttttttatgcacacgtatttattggccatttgaatatcctcttttgtaacatatttgttcaaatctattgcccattttaattagcttgtctgtctgtagcgatttttaagagttctttgcatatctggatgtaacatctttgagatagacagatagaccaacagatcttctcccactgtacaggccaccttttttactgtcttaatggtgtcttttactaaacagactttttaaagttttaataaatttaatttgttattatttatggacaagacattttgaatcctatttaagaaatctatgatttaccaaagtcacagagatgttttcttctaaaacctttattgtgctgaatatattttccccctgcatctgatataaatgataagcttttacatttttatttcctctacctgttctcttcccttcatttgcatcatgttgtcatgactatagtgtagagagtaacttgagggttttttttttctatcaagacaggtaaagaatgattgagagatcgattggttagagccctgagtagaaataattaaactgaccttaggataaaggtcaggccacaaggctccactctttcacagtattaccataatattttcccactgccagattttgaagatgsctgggtgaacatgtccccactcgttctccgtaagcatactcatctaactacagctgtcaaccttaatagttgcgctacaagcagtttctggaagaaaaattattttttcccaactttacagattattttaaatgactaaatatctttttcttcttgttcctcagcttatttttgtgtaactccttaattgtattttatgcttgacaatgggattttccatcagtcttataggtatcttcaatagcttaaattgaagggaatgctttctagcctcattccagaaaagagaatactgatccaaagaaatgaatttttacccttcatgcttctgatttaaaaaagctagaatcaaggtcctggctttctttattcttattttgctcactgagttgtatcactttctatcttaaatttgaaggcaaaacaaattaaatgtatatttcttaatacatgaagcaaagtgtaatcttaagtgtataactaaatgtaatgttatatctcattatataccatcccagatcaaaatatacaatttttctagtatcccaaaaagtcctgctctcaaagtaaccactattctcactttcatcccatagtttagatttacttgtctttgaattttatataaatttaatcatagcatccaatttattttgttcaacattatgcctaaaggatttatccatgtttttgcatgtagagatggcttgaaaaacaaactatatttgccttaacaaaagaaaagtaacttttaggtctatttggtatatgattgactctttccttttaacctgtcacattctctatcccaattagaagtcgaaagcaaagttaagtagaagaggacactsttcattgatattccaatgtggtagacttgacagagtgccttgatttagcactttagagtaccatagaatatggcatgagccaaaaagactgaaaagtcacaatctccccctataattagtttttaaagctcagagggctgcttggcacatagatgaatatagaatccattgccctttgcattgaataaaggttacgttcccttcattactaaatgaggctcttttctattcttgttttttaactaaaaaataaaatgtattatttccaggcttaactttgaatggagagaggaaaaataggtcacgcaagggctttcatagaaaaaagaaaaatagcaaatatccttttattcccaaagaagctgaaagcaggctttctagcccattgtctttgcacctgccatatatatgtatatatttatccttttgagatcaatgattatctgctgataaaaggcattcctgctttctggagatgtaattaacagaagggataaggtgttggggaagcaaagaggacagggaaggagctagggaggccatgtgtattagaaaaacagcccccaccccaaatggttaccctcatttcattcataccctgaatgaaagaagaagaatcagttctctrgagcctggtttgaaaattcttaagtggataggtgtgattggtaggacctggagcagaattttcaggtgataaaggtcaagcaatatataaaacctacagattagtcttgaaagatgcacaataaagaattaagattgtgcctgtaatcccagcactttgggaagccgaggcgagtggatcacaaggtcaggagttcgagaccagcctgaccaaaatggtgaaaccccgtctctactaaaatagaaaaaaaaattagctgggcatggttatacgtgcctgtaatcccagctactcaggaggctgaggcaggagaattgcttgaacccaggaggcggaagttgcagtgagccgagattgcgccactgactgcacacctgcctaggcaacagagcaagactccgtctcaaaaaaaaaaaaaaaaaaagaagaaaagaactaagatcatgcagtttattccagcagtcacagcaataagagtggtcagtgcctggcacagtatagcagcagtacgaattttcaggaattattattcctactcaacatatgaggaaactgaggtgcagaggaagtaaatgacttccccaagttcacacagccactaagtgacagggctagaatttgactctaggtaattgactctgacttccagagccaccacactatgctgaccagcctaaaaatggatcaggaatttgtggattttgacatttgaattattcctttattttcattgatcatcataatcttgactgatatttgagtcattttatgctaatgtcacagacatttatcatataagcattttgactctagattttgttatcattggtattcattatattatacctgatgtattatattgttayaggttctctcctttccaataacaggttgttaaacagaatatccagctatacttggaggaaaaataatctattgaatataggtgctttaaaactgcttgtcttattttcctctgatttatatgtttgactaatcaatgcaaagaaaaaataataatcgttgttgaagatgggggaatgaaacataaaaatgatataaaataaattacatagattttgggtagagggtgatgcagtcctgaatcaggaagagagactaaaggacattttgtagctatttttacttattgagttatttagaaaataacttctttattttatctggagaatcaaatgagtggtatgtttactatgactaccttttgtggttttatgaaattaggaagtcaacatgattaacagcaaaatattcatttccagcaagcaagatggttgatcttaagttattatttggcacgagtcatatattaaatgttcagtgaaaaaggaataaaagcagaaagcaggtttgcacttttacttttcttctgtggaatcctcttagtatgctaagaggtcctcgtaccataggtcctcagtaaacgttgaatgaatgagaaggatcagcccctcctcaaatgaaagaaataaaatgtaaaaaaaaaaaaaaatggggaggcctcagccttcagtgaactctctgaaagttacatgcatagtaagaaattccctttggaaagccactggcctacattctggtcctcagcaccatcattaactagtttgttttgtttttgtccttagtaggtctttatacctcttcaattttttcatccaattcagattaaacaattctaagagatgcagaaatctagcagagycaggaatgtgtttagatgtggaaattagatgaataaagtagagcataaatgattttcagaaaagttcctgttggraatttgaaaggttctcaacgtaatataagcaacagctgttaaaagtttccagctaactatagctattgaagaatcttcagataagtttgaaggagtaaatgaaaggggcgaagcaggaaaaaaagactttagctatcttgaacaaagtgttcatatttatgttcataaattggagacatttatttcattatctctggatgcttaatataacttttaaaatataattataaaaggaaagataaatcagaaaacatgaatatattaaataagtgcaagagtaaaaaatgctttactaaaatattttctttgctgcagttaaatgagatgaaggtcatagatggatatagaacgctgccaggcaagtctggatgagaagctgacttaaatctcaaaactaaacagaaaagacaggtcattaactggagactcagctgcaaacatatcaattaatgttcaagatgattgaattaggcattttgttattatatgaaaatgataccattcttgttagcataagagtggcagtaaatggaagaaaacaaaatttaaaatctcccctacacatcacattaatgctagtgtatttggacaattatttgagaattataattatctgttagtatcattaaagtgtcactaatttgttttctaaatttcatttttatttaattttagatataattatttaatttttttccattaaggtggacatttaataccattcctctttcatttgaggcttaatgaaagaaaaaaatgcaattcttccaaggtagtcccacttagcccttgagaaagtcaggctggcagtggtcacctgtgccattgtggtggtgggcaggatgcctgtgatcaagcctgggtaggttgcaggcagaagtgttcctgagacaagggcaagcggtgagacgctctagtagcactgcsgaaagcccgtgcctgctgtaatcttggccccactctgtctctgctgatgcctgttctctgctgcaagctgaaattccctgccagcgggtgaaggaccatttgcctcctcacatctgtctttctctccctgttgaattgtttccacttcctagtccaccatcctctttcatactcacctttgccatcaagattcagcttaggtatcaactcctccagcatctcctcccagaaaccctcctcccgctccacgctgcaccctcctcccctcactcacagtctgtgggtgagtcaaaccagtaagcagacccttaatagtgtggtgagtgctactgctggagggaaaaatatggataaacctacacagaagaggccagagaactaaaaagcattagaaagaggaaggggatggagttggagctcagaggagggggtcctcacccatccatcaagcaagaggtcagaagacagtgtctaaaattaacatcaacaagtagccgtttcaacagattctttagagagatggtgaaaaactactggaagaatttagaaacagtagkaccttttttttttttttttttttttttttgagacggagtctccatctgtcgcccaggctggagtgcagtggcaccatctcggctcactgcaacctccgcctcccgggttcaagcgattcttctgcctcagtctcccaagtagctgggactacaggcacgcaccgccacacccggctattttttgtatttttagtagagatggggtttcaccgtattggccaggctggtcttgaactcctgacttcgtgatctattcgccttggcctcccaacgtgctggtattataggcatgagccaccacgcccggttacagtagtacctttttagacagttatatatggttgtttctggggcacaagactgagactggggagtggtaggacagtggggtcactactgattagtgtaggttatttaaccatgggtaattattcctttggtttagaattgttaatttgttttaaaaacaattctccacacatcctcaaaccctgtgactgctctgatagttacctactgctcccaaatacactgtcattctaacacttctatcccagaaaaaaaaatggatcatcttaagccattttcacttttttgccaattttacacaaagcatttactcttctttatagtatctctgtttttttactttccagcttttattttagattcaggggtgtgtatgcaggtttgttacatgggtaaattgcatgtcatggggatttagcctacagaatattttgtcamccagttaagaaacatagtacccgatgggtagtattttgattctaaccctcctcctacccttcaccctcaagtagtcccatgtctactgctcccttctttgcgtcaatgtgtatctcattttgcccctgccaaggttcacatctctctcttccttcctcctaaaaccccctcccctgctcaytcctcatcccttctcttctctattccaagagaagagaaaccttacctgacacctccttgcttttgcctgaggtcaattgtttaatgtctctgctctgaacagatttcrattcttcaagaggaaatcatatggcaatttgagaaataaccaggataatcaataagctggtatactcaggggaaggagttcaatgctatataaagtatggcttttaaacctatactcagtagtggaaaaatcagagtataatgtgttcaacttataataagtgattattggttattttactcctatcacctggtaatctattttgaagttcaggaattctttttggaaagttactgttayaattatgcactgtatcatgcatgttatacagtgactcctggcagaaaaactgcatacctrcagaagtcctagcrcctaaagaaaaaacatgaacctaattgtttatacctagtgttgcttgacaatatctatgaagcaaagttagtggccaagcttatttgagtgtcttagctaaagaaagatgcattctttttccaaactcatagagcatttccatgcaattgtgttccaagtctacatatcataactctgagctggtgctgtcagcatcaaagtaacatgctgctttgcagttagctttttgcttagtttctagtatcagttttcatggaattttttcattgtctttacccactgatacatcagtgtactcttctgcttggtaccaaaaacggggatacaaaacgtggagaaaccctgggactgagccttgggttcctgccctctgtgccactaactccccgtgtatcccctcctcctctgcacctccagctcttcctctgtaaacgacaacctgtgagtctccaacttattggctatttttttcttaagtgatgtttgtgtgtgtgtgtatgtgtttatgtgtatttatttgttttaactagcctrttaggtcttatttaacatccagtaaagctctgtttttaagccagatatttatgcttcagagtaggttggaaccccttgtgtaatcacctagtatatttctacccattttgtggaactttgaatataattgtactatttttagttactacttcaggttctagtttacatttatggcattttttttttcaagcattcgtcatttatttgatgtctcagaaacacaaccttcaattgtaaagctgttttaaaagaaaatttggtcaattatttgataattaactattttccagtgaggtttccagaaaaacattgtcatacaaccaaaagctgcctgtaattgcttttgaaaggatcaagttcttagataaactcaggattcaacactgatatcaaaggcataaggttaatgaccagggtgcctagccggttttattgttctagaatttaagtgtttaatgacagacatcatatgagtcacccaatagtggctcaatacttgttgaatgaatgtatgtctgtattcatgtgctacttgatatataagtaatggattcaaataagagaaaggatagtgtaggaggaatctcagaatatggagtacaaagacttaattgtttgcccaaattctgagctgcagttttatattggcaattgaaaattactcagaaataaaaaagttaactatttaaaatatagaatatattgttaataatataggcaaaagaacaaaagttatgctgctaggaaagaaaaactgtaacttaaactaaaagtataatgatagagaaattttaaagaatttcttctcatacacgttatatagagctgagtcaaataggaacaggtgttttcaaaacataataaatctctcatactaatgcatttgaacttatcacacaccttgacctgtgattaacatcttggcctctaattggagaagctgttcgaatcctggtgttctgctaccaacccagcctccataagggtgatgtgtttgtgtctttcttttagaccaggagcctgcatggtggcaaagctgccttagcagaatggtgtctgcaatttactctctagacctttgcctctgccatagccttggtaactctaaccttgcttcttctagaagaggctaaattatgcataatagtttttctgtgctcagccttaagaacacakcacataaaccactccaaaatacttacacaaggacagaaagatagactgacagaagaaactatgcatttatgcgttcctggattgaacatgtcaaaacgtaactgactgtcattctaaattttctctctccagttctgaaattaaaatggcagagacagtttgcggggattctgattgctttcgtaatattgcttaagtttgtaattggtgcattaacttcttatcrtacatgttatattttgtgtaaaaccttcatttccagaaacagcacgctgggaagaaacttaaagagcactgtcaaggggtctatgtggaagtgattcccaggagctcaccatcttaggaactattttggacaggagtaggagagatactgattttgaaaaacccaacaaaaaattctttttctcacttcttatttgttccctgagcttaattaactctttgttgttattttagaaatttgaaaaatagtaaacccacagaaaagttaacagtgcagtgaatgcatatgtaccatatactgactgagatttcctgaccactgacatcttgctatactcactctatactatctccaaatatatacacacatttccttgccaaaccattcaaaagtaggccacagacataatggcctctattcttaaactctttagcatgcatttcccaagaagaaagacattctcttatgtacccatatcattaccatatgtattagttttatgttgyggccttgtaaccaatwaccactgttgtcaatagtcttggccatttgagtctgtcctgacctttcccctgctctgttctttattacaggggaactgactttgcaggcagcatttcctaggctcttagggcagttatctcaggtctgggctcagcaataggaagtggtgatgaaagatttggggaataggaccaggagagagagagagagagagagagggagagaaaataaataaaatgtgatcagatacagcacaggtctgcagaccaatccctgaaaccttttgtaatgtttcgttcataattgcatcaggtctgctgaaagcgcagatttttttttttttcttttttgctttcctttcagtagctaacagaattctttaaagactaaatggagacaattttgagcatctttggcaaaatttccttaaatgaattcttgtcagatagacctttttaaagattgtaattgtgtggtaaaattaagttaaataggtttaacactcctggcaaaattaccttaaatgaattcttgtcagatagagctctttaaagattatcaataattatgtggtaaaaattaggcttaacaggtttaacattcttctttagtttcataggcttctatgtgagcctgttggccaactgatttggaaggcaagtcctcagatgggatccagtacccaaaacattcatgttttgagttctgatttctgctcctggctgtgtcagatcatctttgagcaattgctgagtgcctgttacctctgagtttctgttacttcaccttctgaagacaatgttaatttgctgcctgtttcactcaaaaatacatagtgtcttcattaaataatgtgttatcataataagcagaagatgaagggtacataaaaattcaggcctagaaagtggaaataatactgtccagttgccaggcagcagccattctggctgcgaggtcttctgcaggggacaagtgactgtgtcttccgcaagcctggagccaccagtccagaccagcttcaggccagtgcgcccattgcctcccaccttggcacaagtaactaatacccaatgtcctccagttttatgtgctgggattcctggcgtgcccatttgaaagttctctcatatgtggtgagacgttccgtttttctcttcactaaaacgtgaagttgttttttggagaacatatggacagtatagaaaagcacaaagcatgatacatttctgcagttgacattttggcatatagatatccaaccttttttctgctcatatatttatttattttcttaatatcatacagtacctatagttgtataagtttattttacacaactgcatatcataatgaaaaataagctacaccaaacatttttctrtgttaccaagttttttatatacataattcctaatgacttcatggttttccatagtatagatagatcataatttaataaatcagagggattggaaaaaaatctgtagtcaaacagctaaagccatccctttaargttattctaacacataaaaaccttccaccaagctctttgacacacacaaatcctcgaaggaatgattttttgtgtgaaatggttatagctgtcaatcacttattctctgtgtcatggtttctgtgctcttttcargttgttagggggtgattatggattcctgtcaaatgagatgtctgctgtgtattcaacatgaagcagtttgtatttttctcagtctattgctctcctgtctgaggaggttaagcaaatcccagtgagccagagggaaacgggataggcatcaagcgctggcagcacacggcagacatgcccagggcccaagatccccactcaagcagattagacttcttacataaatacatttgtcttaattgtcgcattccacctagggctacacctaatatgcataaaaatggctccaagcctggttttcaaagccatttgccccccgctgttgctttttcaccacccagctcagaggcattttttgtgttatatctatcacagatgattaaggggctcgaagagttgatatataagggcagattaagaaaactaaatatttacaacctgactgagtgacagccaagggaaatactgtaaatgtcttctgggctcaaatcacggaggagacattgttttgcttttcctagtaagtggattttagagctatccaaattcagagaaagttttcttgggatgacatctcgtatgctaattagataaatgagtcagctagaaattgcatttagcagctactaacagaaacttgaaatagcagtggcttaaagaagtagggtttcatttttctctgctatgacatgaagctcaaaagcattttkattgtctgggactgcactattgctccatgatggcatcagtgcaccattgccccaccatctttgggctccattatgctcagcactggcttccatactcaaggtcacccgatgtttgagaagagctactgcagccccagttgccrtggcttcattccatgaagagagaaggcaaaagagtctctgccaactaagattgcttaagagagcttccttgatgcccatctactgatttcagtttacatctcactggccaccacatctgcaagaagggcaggaaaacttggtggggttttttgttttgtttcatcttaagttgggcacattgctgaccccaacaacatcagggtacttttaccaagaacgcatgggataatggatactgggtaggcagctaatggtttctgtcacaataattaacatcttgaaaattctgatgaaagtctgggctgtaagacgctgtggttggtatttgtaaaactagcccttgatatgtaacatacttcctcctgctcactcttacctaaattcattcatcatcccactaaataaactagccatctcaacagacctaagaataataacaacaatagtttttaccaagtaaaaactgtttgcactgtgttatgcacttaaaagcatcccctgaatgatttgccttaaaatattctaaagtggtgatggggaggcataaataaggataaatggaataagacttccatgagttgctaatagttgaagctggaagacagttacatgggggtttgttatactcttctttctactttcataattattgaaattttcccaatgaaaagctttaaaaatcacacttaatccttacattacttcatatcaggtcagttcttttacctccagataataatgcttggagttargcagtgtcacacaacaagcaagtggcagattcagtattcaaacctgggtttatctcactttgaagtctgtgtcccacccttgccactcaaggaaaacacttttcagacaagcagcctgggcatcacctggaaatcagttagaaatgcagaattcagggccccaccccaagaccttttccaagcccctcagatcagattggtgcacacccacattccatgcgctcggttcactgctcttcattgcctcaacatcarctgtgacgtttcctttaaaaaagataaccctcggctaaaataaggaggctagtcgtgactcattacttggtaggataaacattttagataacgatttgattcacagcagttgtttctttcaacattgggcatctgctgtagtgctgggcactaaacacctatgtgtcaattaagcatctttctatgtgtcaacaatttttattaatcactgcatgctcgaaacttaatttggcttgttctagttaaattaagcccttgcttcttctcaggtaaggtgtgtgagattttaaaagccttgggtcttacagaaaactctccaggtgcctatttcaacctcctccagcatcagctctgcttacccacctgtgtgtaactttcttgatttttttcccctaacattctcagtcatcttttttgttttgttttgtttttgttttgtttttttggagacagagtctcatgctctgttgcccaggctagagtgcagtggcacgatctcggctcactgcaacctccgcctcccgggttcaagcgattctcctgcctcagcctccctagtagctgtggctgtaggtgcatgcyggcacgcctggctaattttttgtattttagtagagacggggtttcactgttgttgcccaggctggtctcgaactcctgagctcaggcaatccacctgcctcagcctcccaaagtgctaagattacaggcttgagccactgcgcccggccttcagtcatcttttctaattttagccctcttcctttttaaaaggaaagagagctgtggaaattaggaagcctgagtcctagctttgccactcatgtgtcatgtaggcagaacagttaactgttggagcctccagttcttcatctctgcagtggctgagctatatgatctcaggtcccttccagcttcatcctttgtaaccccctgtaacttgatttttcaaccccgccctgccccctgcaaaacattttgaagatattgggctctgcgtgaaacccactagattatatttttccagtcagtaaaaggatcccagcattgattttttttaattggtttctttttccaaatgctaaatgccttaatacttatactttatgtgtgttggatcctttttagaacaactaagtaaatgaataaatgaagcctgtcatccatctcagttgtaacctcctcttttaaagaggctggatcgtctttgcttttgaacattattcaatattttctaggtgccagattaacttggttattttattttcactacaataaactttaaaccatgtacatatttaacamcctaagctgtttatcaacttctatagcataagaagaggcaaggaaaacacctacaggagagcagtatagacgccatccccaggaaccgtcactgtataaatcaggcccatactggtccctgttgaaggcacaatcattggagtcacttatttcttcttccaagaactttttcccttatcagaatcatgttaagcaggcatgtgatagttgtctcacaaagttaaacctaggaaaaagagcacgctgtaaaatagtgctcatgtcagtccttgtgctaggtgtgcctaaaacagtgttgcccggtcctaccttttccatgctgtatatatgaagtgtgtttctgatttgcttttcagggcagcttttggcaaggagtctgaagttcttattgggaacctgggtgataaattaatccctccacaagacatccttcgtgacgtcagtgacctcaaagccttggccaacatgcatgaaagcstggaatggttggcaagtcgaacaaagtcagctttctccaatctttctacatcccagagtaagtatctagtaggaagctgttgtggggacagttgaggaactagactgaatgcattcattgaaagatgagagtgtacactggtcaccgtatgggggcgtgtcccaagctgtcagaagatcctggttagaattctgcttgtgttgcacctcttgtactttgtgattctgggaaaggaactaatcttggtttccctgtgtggaatgtgggaatccaggaaaggcccatgttaatgtggcttgatattaacatggccttagaaacataaattcatctaggattgagccattaagtctcaagaacagaaagcaataccttttttcctccttacaacaacttctcaagggcagaaactgtctcggagctcagggctgtatgcacagctgacattctcattttacttgacataaagctaatctttttattagtcatagaagtgattaaggtgctagaaaatagagtcaatgaagacaacaattattctggaaaaaagatggctaagagatagcaattacagatttcaaagaaattaaggaacagaacatgaaattagggggaacctctttttctatgaaggaccagtgacttagagaaaaataatttgaaaactttagggcacataaactttaataactataaaattatatttaaagcattacttcaggagtatgtataacacagttaaaatagagacaaagaaaacatgatatgaagaaggcataaaggaaaaggcagatttattctttatttgttgagacagtctcactctgttgcccaggctggagtgcagtggcacaatctcagctcacagcaacctctgcctcctgggttaaagcgattctcatgcttcagcctcccgagtagctgggattacaagtgtgcaccaccacacctggtctcaaactcctgggctcaagcgatccacctgcctcggcctcccaaagtgctgggattacaggcgtgagcarscacgtccagaccaaaagacagatttagatgtgtgaatggagagatagaaacaggatagaaaaagcaaaagaaacagcaggaaggataaggaagcaaaatcacctctgaatttaatattagggctattagacagttattagaaagaaaacacattatttggactgtacatgtcagagtgagctttttttaatcaccgtcatttgagaaggtattattacttgattaaccatgtttccagcctagagatggaaaggtgtggattaaattcacagagtaaattattcgcttatcctctaagagtctaaggaaccccttgagtgctcactacttgcatggcctcatgctgattctctgcctatcccaagggccaatgcagggtgggaagaagggactgaagcagtgggcttcagagggagatcatagaatctgcaccagaaatctccttaaaatattactgcatatttatacttttattcttaygtcttttattgaaaatactacttatttttgagacagtcttgctgtattacccaggctagtcttgaacttctggctttaggtggtcctcccatttcagcctcccaagtagctgggactacaagcatgcaccaccatgcccaactctaaaagactgctttttatctgatgatgaaattatacaagtttattctcagaaatctataagaatagaaaatgtgtctaccaattaaggatagtttgggcacagtattacttttgagcagattttacataaggaggtatccgtaaaggcccctttaactttataatcccataatatcaggcagttctattacaagcagcagtttaaattatccattttgtctcccaaacccactctgctcccttctcccctctagaaaaagtcagaaagaactaattttttctttgctaattgcaaaatgagcagctctaaaaaaggggccacttgcctcttttcctagttttctttgacttgcaaatgcagagctgcttaggtagtttatttagtaatgtttggaaggggtgctctcatttagtatgtcattagcatctaatatttaatgctacaatctcttatttctaatgacataccattctagatttctattctgcccattctaaaagggcttcacaaagcaagatagtacataacctgtgtagcaagccactgagtgatttacacaggctaacctggcatcaactgttttcaaaaggagaaagatgcattctgagttatgcttaactttgtaattgcacgatttagctgttgtgttcatgtcactgaaagtacccagtaaagttgatgtctaattcatgcctataatcatctctgttattctgacaaagatctcatctaccacgcctgttaatcctttgcctcatgtgctcagttccattttataatataagttgtaccctctcagttccttgcagggtgattattccacccagtgagtgatttaagtaactgtcagcattttgaggatcagtgcaaaacccaagtgaactgtaatcactacttatggtgtctgctaaaacaaagcatcaagcaagcctggtttatcctactaacagcaagcctggctcacccccacttatgtgctctttgaattcccaggagagatgcccattgatgtttataatttgaacaaagcaggggattctctgataatggcttactttgattgccctatgtcaatgtgactctagaaagggaacaaggggacagctttttattatttttttttttttgaaaagtgaaccaaatgattactgcaacaaaagtgtttccaagtctggagactagagaacatgaggaaaatgctcagcaggatgggaagaactcaagaagatcttcagtttatttcttgttccacattctgttaactatttggtatggtaaaggccatgttttattaagcttaagaagctattgctgtgatagggtggaaaaagtttgcagaaaattattttctttctttttttcttttttttttttgagatggattcatgcagtggcgcgatctcggctcactgcarcctctgcttcccaggttcaagcgattctcctgcctcagcctccctagtaactaggattacaggtgcccaccaccacgcctggctaatttttagtatttttagtagaggcagggtttcactacattgcccaggctggtctcgaactcctgatctcgtgatccgcccgcctcggcctcccaaagtgctgggattacaggcatgagccactgcgcctggccgaaaattattttcatagtagaatatctcttcagataggacagtaggagtctcatccacctgaacatttcatgtcaggtattacatttagaagaaagtagagaaaaaagttctacattttagttgcagagcatggctggctatacattgttcaggaggttaaaactaattatttttttcctaaggtaattttttcatctcttttagtgtttgcctaaatgtttctctatctcctttacacataaaagggtctcctggttgtatctagctcctgaccacaccaaagktaccactcttgcatttcccctaccacacagtacacagttccctgttccttctcctctggtattctcccctcagtctttctgacactgtttctgcttaagattctttcagttgaaagtcacagacttaattgaaggaaaaagaatgcattgactcatacagcagataaatcaaaggacttcaagagtggctggatccagaggttcccaaaatatcgtcaggtcccaggcatgcttacagattctctctctctctctctctctctctctctcggatctaagtttctacatgttttcctgcattcatcacaatttcaaccttgtaataaargcacaaataatgctggctctttgtaatgcctgctgtttgtaagatccctaaataaagactccaaaattgttatcattaagaaaattctcagaacaatatatgacctacataaaaattgttagactatttttcagtttaacagtagtgattttcttttgcatcttatcctcttgttttaaagatggattgtttttaaaaatagactacacagaatttgaaggaggctcaagggcttattttgtcaccatggcttccttagggaggcccttctctctatcttggattctgtaaaaatctctgggattagagattctacaacctccttgattatatattctactccataccatctaggaagtcttttttttttttaagtgaagcccctgtgcttcagtctaaacctcattcttcttttrtactctcttcagaaattaaataattactattaatgactattttctctataaaatattgtaatgcatccaaaaatatttctgtagcctcttctaattttttgggcaaataaatctcatagttttggttgccagaattggtttgtgaattgcagtattagttatacaattatttatatacttatttcttacaggtaaattattgttaggtatcttagaaatcatctggtctaactcagtcattttgcatatgaggaaattaaggtctcagggtggttatatcacctgtctgtgccaaactgagatggagcaggtcttcagaatcccagtttaattttctttctactaygtcagttagagycactaattggaccgttcatgccgtattcctattaaaccattccagcagggttggcatattttgttttaatggaagcactttaatgcttacaagcaagttgtggtcatttctgatcattttcttgtgcctaaacagaatttctacacctaaatatatggaattattgtacaaacccctcttgaatttcatcttagttgcaataaaacatttctgtaatwtgccactctctatttttgttttgcaagtattttctaagttagaaactccatctgtcttgttatcatgccgtgtaatatattctagatattgcattgccctatatattagccactagccttgtgtggctatttaaatttaaattaattaaagttaaaaatgtagttcctctgtcatactagccatgtctcaaatgctcagtggctgttatattggacagtataggtatagaacactttcgtcatcacagaaagttctgttggccagtgctgtagatcatcactgaggtcattgataaaggttaaaaataatgccagtccatattcttagcctttgaaagatacttgaaatgcctacctagttctatcaaaacatggtgaactactttaattgtccagcctcagatcacatgtaccctcctgatgaaggttgatgtttttggctctgcattatcaaaatttctcctattgatgttaactaatgctaaagggaaaaggttttgtgatcaaatagacttggaaaatattaaagcacattaaatataattcaataccagaaaacctctaaaatctttactatattaaccagataattacagcagtggaatgtttcttaaacttacttttcagtgaaattctgttgtcccagcgtatctcacggggctttttatccatgaaacaacttctgggtgacactgcccaatgctatatttaygtaatttgtttagaatattttatttctcccggcaccatcaggctcagggcagatgttccactattgcgggaacttaatttcatattattggcaaatttgcataccatcagatgacttattttgcaatttggttatttgattatttgattcatttagtgatttttagaaatgttcaagtcarccaatataaaataaccatggtttccctttccgcctgtttcaggcttggctactgctatagtgacccttttccagtcattgtgcttttctcacaattctcaaagattctagctgcaattttataacacaccccaattcatgcaataatgtcaatrtatccatggtgggggtcctgggattgatttatgataaaaattttgttgtataatatttttagatttagtgtaaagttgcaaagatattacagataatctccttatctctctcatccagttcccctattgttaatatattagtatgatacatatgttacaagtaatgaatcaatattgatacattattattaatgaaagtctatacttagttcagattttcttagtttttccctgatcttctttttctgttctaggatctcatccaggatatatcacatttataccacagttttcccatatcacagttatcacatatatcacatagtgatgtctccttaggctcatttagactgtgacagtttcctagactttccttgttttttgtgaccttgagagttataggaattctggttgggtatttgtagaatcttcttcaatctgggtttatctggtgtcttttcctgattagactgggcttgtgggttttcaaaaggaaaactacagaggggaggtaccattctcatgaaatcacatcaagggtacatatcatcagtgtaactgattactgatgatgtctgggattgactttgtgcctccaatttgtgtagtcctctctaggcagttccttccaaattttggattgactctccactttctgactacaaattgcttatctttctagtggctatttttttaacatgatagaagcatcttattataagcccaatgtttggatgagttgaatacttgctaagaaaaatggttgtctaccttaaacaattatgcagttgataatggattataatcttgtgggtctgaaagactctgtgggaggagctgttttttaataccttgagccacttgactaaggcctgtagctacttttgggttgctacatgtgctaaacatcccttaataaatgtatacaaccatattaatttcaaacaaaaccatgctgacattaaaagagtttaactaaatttcttcactaaaaataaagtcttattttaacccattttaattaaactgtaatgtgcattgttgactcaaaacccattcacaagtggaactcgcttcctgagataagtccttttagagtagaatacctcataataccgagctgcacatcagttataatcagttagagagctgtaaaaatactgatgtagagattttgatgtaattgttcctaggtatgacatgggcaacaggctacaccccagaccaatcaaatcagaggcagagaaacctatgttgtaaaggagtggttttcagcctcatcgcattagaaatgcctgtgctttttaacatatccccaggcaattttaacaaacaaccaaggttgagaaccactgatttagagcccctaaaaatttcttctttaatttctgtcactctctatatttgggaaatgctttgtaattattttgccagttcttctatcctctggagcttgagattaacgtgatttcccattttacagagaagaactgtaggcatggagatacggtacttcgtgtccatgccagagtcgggaccacagccttgcttagcagttgttagctaaactgtcacccaaatctgattaacaacaaaaatgttcctcttacacttttcaagccagctaaatgagaagggcacaaggaatctgtgtctctcaacacaaaaggctgcaattgccaaaccaatggaatgaatgtagatatgtcattgaaartaaatggaaaaggccgaggtgtcggtccacccccatcccccaacygcacagttgcgcaatattccagcatgttttttatgcattcccgatggtgacttaatattttctatgagatggaatgtgaatattctcatgctagagctcactatcatggactctttgtgccttaatagtaaaygaaaaataaaatgcaaatcctccagctgtttgtttttctgccttggcacaaatgaaaataaaaatttccctacccaagatctcttgggaatctgtcgtgtttcaggtttgcttttgtcagaccattaagccggagttttccttgtcataatttcatctgattctttttaattagaactctatgcgtggtaattcctctctcgcttcagtatttacaagtttcaaatatttgttgactgttatcagacagttcctcctcagcctaccttacatgtttagtttctctaatcacctttctatggttagactttccgtgcccttcatcgtttttcattcttagtagttgtcattttcctaagctgactttcatattgtggcttcatttctgtcattcttcttttattgacgataccttccaaactcattgccattggttgatttcatgatcatgctgttgactaagaaaattaatttaccattggtattgtattttgttcatgagcttcccaccccctgcctgactctaaatatattttggccttatctmattaacattacttgtacttctgttgagcctttctctcttttaaaaataatgtccaaatatatttccatgttgtgctcaatgtctcaactaatgttttgtaggaacaaaagcaccaactgataattgtatgatgatccagttttgttcattttcagtcttaaatgtactctgcttatatttacaaactcgttgaaacttatcataatgaagaaagaattgtgtggaaagccgctgtgcttagcgtgttcacctgattattcttagctgtcttctgaaatctacgttattactaggaatggagatgctgcttgttcttttattttctaaggaataccatctagacctctctgtctccttctgtttatcgtgcaagcttcagactgaccccagtggggttccccgtgttccttggttttgagcatatttgaaattgctgataacacaagagttaccccttttttaaaacacatctactctggttttccctttcctgtcattgagtgtcctcccttggctccccaatcatggttacttttgactctcctcacatagccttgtcttcctattaattcatagagtctttgtcattcttattccttagtctaggagacatatagcacatatttgactttgaagtctgacgaacttaaggacaaatcaggcaagttagggtataaccagggggaaactatttggcctgtccgagctaaataggtcttctcacctgttaaatacaaataatgatgcatactcattgggttgctctaactattaaatgatctgatgaacttgaagttcttagcagtgtgtgatacacagtggggctcactatggggtttctgggcttcctaccatgaatcttatccctggagctctcattcattgtactgggtcttccccttcctcctgccccttcaggcttctcttttatctcaagttgtgtggttgctttcaaaactgttaatatgtgtgttcctaaatcatttccagtaaatcatggctctcactcaccagagctcccaaaatgtttctgaggtcatggaagtgtgtctgagaatgggcctgcactggagggcctacaggtgctcatctgagaagccagggttgaatttgaaaaaggcaccttttgttcttcaaaactacraaaacaaggctcagctattgttgaaaaacatgccaaayccaaccacaattccctctgtcaatcagctggtcgttagtagagttcattgtcctgtgctgattagaaagcagtaccccacccccctccgtaaggaggtgattatcaactgtggagctacagaaggctagtgctgtgggcatttcaatgtaattatggagttctaagtacttgcccataaaaaattatgtggctgtttctttggaaatgccaacatttgtacccataagggaaatattttattaaaatatgataatatcatggatgcttaagtgtggtggctggaagctgccagctgaatgattttatcttcaagcaaaactataaaatggaaacaacaagatatgaaagaatctctgggaaagaggagagacagaaggagttagaaagcaagagaaggctctaaaatggcatgctgaaattgcaaagccagacagagaagatggtggaaatgcagaatcaccagagcctgagccgacacccagcacagcagagaggaggagcggctgctgcagcagagtgacttgaacaagacatctgagtggattgatttggttgccacacagaaccacgagttccaatgaggagcagtggaagattgtacctgaaggcgctgattgtgctattcaatctggcctcttatctagaaaaacccttagayacttgggtgctttaaaacctgggataagcccaggaaccagtgtgaaatcatgacttaatgaactcctcaccagagaaagagtgtgtctttccattcttcacccttgaaactaagtttagatctacaaaatgcagtgggtgagggagacaratcctgacagggaaatccraaagaagatggagggctggctgaagtgacatggaaggactctccattacttggtgggattgattttagaaaaatgytctaaatataaactggatgtgctttttttcaaacagcttccttattaatcaatagtgcataaagactttttccagacagcccaggaaaatgtagcaaaggggcgagatgtgcgaatygtatgtgtgtaacagccccaaaggatactacggtaatgataatagactcaacattcagattacatttcagactttcaagaacctttgtaaccactcattcttaatctcttatccctgcctcaagccgtagttgacagaccagcctttatattctcagttttacaaggcatgadcatgaaatgcaaaagtttggcagtttcccaaggtcaaaatcagtcaatgacaaaaatccagaccacatctgtctgttctcagagtgcagaccagagtgtctggaaaaacaacataatcacctattacgagttacgagtgacagagttacaagcacaccaaaccagcgtgcctttgtttccccacggaggcaatgctgttgttcagctatctcccaaagctacagcagcaaggcgaatgcaatgctgtgtgcctaatataaatggtatttaataatacactttaaaaggaggagtggagaaaagtgagcttaacattatttgactctctttcagaagctgagatgtaaaagctgcacctcttacccccaaaggacctattttggacccaaatttggtagtcatgcattcagggagaggttctcttattatcttaaattcaatactgtgatttatattaaatattgtaaattatacaataaaagatttccttcatatgggtacagagatagatcaggtataggtctctaaggcacagtgttccttattaatagcagttaattctgtgtactaacatctttgagctctggtcgttgaatcctaggtggatttgactagagttcttaaccaacattttaatccaatttttatgaaaggaagagtaatgaggacttttctctaagactgatgaaaaacctaagtgtctttatagaagccaagaatatctgatcagattcttcaaggaagcaaaaatcctgtaaatgtcagaaagatgatgctggaaaacccctttggtcaaattcatctaaagaaggtactatttgtaggtgacttttcagcaagtctgtcaaaagcttcttgctacagataaaaattcaataacctttcactgtggatgtgccacaattatcactaatttaaaaacagtccctctaatagagtattttatcatgccggacagtctctgcattgttcattatttagtgtttgctaagctgatggcacttccaccaacttttcttatctctacttcttcagaattggattttatatttccaaaccagccagatatgacaagtcattttcttctctcttgtcttttaagaaacgcaaacttgatttttttttaacaatcaccacttaaaagattaaagttattggcaatgtctgtattaactagcattgggatgtgcagtaaggcctattgcattttaattgcaactggggtcttcccttcttcttttttattctttctcttttccaatacatgtgtatgtattctctatctctttggaactccccattctgctaaaacacacagtgtatggcaaagatgaggtattatgaagcctgatgtagttagaagacaaggcaaggagagtattatcagaaytattatattatagaacctccaaaaggtggtgataaatggtataagtagatctttcagtaaatatagactgtctttatatgagaaacttcctgaaaggaaaatgataaagtcattatcctgacacccgagggatacatgccacttcaaacaacatctctttctatccatagctcattattgaaatttttaactattttaagcctgaaaaaattctactagctgtgattctgaaagattttaaaagatctgtatactttacccaagctttggaccacgataagacagccacacatcttctgtcattgggaactctctccttaggcctcagggcatcttctgtcattgggaactctctccttaggcctcagggtctgctcctctgtccaagagagtctctcccaattttcagggaagtatagaacttcgttcaagaagtttgatgataagattttgaccttttaggggtacagtctttcaatagtgatatcagaatgctgaaaaagattgtgttagaaaatctcaccaaaatattcattttaagatttgtggattattgttgtaagcatcaaacagaaatagcattgtagtcagtcttcatacattaataataagggctgccctttaggattggctttacaaagaaaaatatttgctcaaactttacccagagacaggagatgcctgtcacgtctgcttctaaaagagggagtgtgactaaaaatccaccatcttattacttgtttaatggtaccacaagtccaattaacgcatttgttcaagccaacagccttttagcttttcacagaaatcttggaagtgtgctagagaaacacccccacaaaaaggttttgcatatgctgctgtatctgcctctctccaggaagcggagcatgggtcactgacagacagatggctgccacaagcgccaccagcggccrgaaactcctcccaccagctcccattccygcaaaacaaatgaggaggggtgcttttcttgaatgctgtgcctggactttctctcccttgacccagccctacccatggaataccaaggcaacctcaacatctgttacactcctgccttaattctattcctcagcaccagcataactcaatagaggagtatgggcttgtccttggacaaggtacttgacattgctgatgatgtcgtctgtattataaatccctcataggttatttggaggctaaggtcaactaacgtatacacaacacctggtacaatgcctgcaaacagtgatcacgtgwtaaatagtagtttcttctgctccttcttttttaagctcttttcctcattcttagtcttcctgagactattttatttcttgctttctcatttagctaccaatatttgcccatagtggtactcaacatgraatgcccaaatctgccctctgtttatttccccctactcctgtccttcctgttgatagctgggtcattctgcccattctgcctgatactttaacttcatctcaaaagatctttgctgtattgcatttgaaattagattttgagctcttaaatttaacagccttccaaaatccacatggcttgggaacacaggcatagggtaaggtcgtatttattcagggccacaatgagtgaaacttaaggttaacctccagatctcattaaatgacttcctctgtgaacttgtatgtcagcatatcgagaaatatggcaatgaagaagctgctgaattggccaggtgcagtggctcacgcctgaatcctaccactctggggggccaaggcaggtggatcacctgatgtcaggagttactagcctggccaacatggtgaaaccccatctctactaaaaatacaaaaattagccaagcgtggtggcaggcacctgtaatctcaactactcaggaggctgaggcaggagaattgctggaacccaggaggtggaggttgcagtgagccaagattgtgccattgcactccagcccgagcygacaacagtgagactgtgtctcagaaaaaaaaaaagaaaaaaaaagaagctgttgaattgtggcttcagtaaaaactataacaaaaatggcagaccagctaatttcagagcccacagtagctctgggactcagaccttttaacatcaagggaatgattctgtctgtattgaagtgggctttggaatagctgtagttaagatctacccaagcttcagctgggcatcctccacaggggtgacaatgatctggttagctgcttaccccttctctgctgcctaataacacacttacaggaattctgggagtctcagttctgctaggatcttaggagtgttagctaggaatggaaatttgtgttcttttttgttatcatttcagccatttttaaatgtccagtttggtggcattcagtacattcacattattgagtagccatcaccatcatccatctgcagaacttttttcatcttctcaaactaaaactccatattycttaaacaataatccctcatttctccttccctccagcccttggcaacctccattctacttcctatctctatgaatttgactactctaggtggcccatataagtggaatcatgtagtatttgttgttttgtgactgacttgttttgtttagcatgatgtcttcaaggtccatccgtgttgaagcatgtgttagcactcccttcttttttgaaagctgcatgatattctattgaatggctgtaccacactttatttctccattcatccatcagtggatgcttagggtgcttccatcttttgcctattgtgagtaatgctgctgtaacatgggtggacaaatatctgttcaagtcctggttttcagatcatttgggtatatacccagaagtgaaattgtggaaattagtcatttgagattagatgtactgcacgtctttctacttcttctcaactctctgattgcttatataagtgacgtcttctgaaggaaagttcagcattttttctcagatatgataataatrtatgctaagatcttggccaggcacggtggctcacacctgtaatcccagcactttgggaagccaaggtgggcggatcacttgaggtcaagagtttgctgccttcaaatcaatcattacttcttagcacctcttgaaatagaaaataaaaaatttggccaggcggtggccaggcgcagtggctcatgcctgtaatctcagcactttgggaggctgaggtgggaagatctcttgagcccaggagtttgagaccagactgggcaacacagggagacctcatctctacaaaaaagaaaaaaaaaattaattagccaggtgtggccccatttgtacaaaaaaaaatttttttttaattagctgggcatggtcatgtacacatgtggtcccagctactagggaggctaagrtgggaggaacgcttgagcctgggatgtcaaggctgcggtgaggtgtgattgcaccactgcactccagcccagcaacagagaaagaccctgtctcaaaaaggaaaagaaaagaaaaaaatgtaaaagccctagatagtaccctcctttcactcctagagaattcaaaatttacaatggaaatttaagcttactgtcttgttctctagatcagctgtttacaatgttggctatatgccccccaataattgtgtaaaacaatacattgaagcatgggaaggaaacatgagaccatttatgtatgctttttaaaagtaaaacaatcagaaacattgcaagttttactaatatttaacataagagatgacatgatagccctcatttgagccatatgtgaagtactatatgggaggaatcctgcaggaaccccaaggattcctcagcagagagaggctcaatcttctgccatttttaaaaattttcaacattttgtaatatgttccaggtgaagtagatttatggattacattttctagtttttactaaacttaccttccccaaatggataagtgacttaaaagggaaactgtggattgacactataagcaaaaatgaacatgagaaaatggcagaactggcattgtcaytgttcctggtggggatcttcatcagtcacattataattatctaagcagtaataatctatcagatgactggaaactggcaaaagaacttgtcaaggatattatttggaatacggatttacatctacaattattaacatgaaccttgctctaagtgtatgtgtgccttgaaatattagctaatacatgttgaagctgtaatcattaggaagacatttaagaatatcacttgtttcatctttagcttactttttattgatttcttttctggttatatttttaaacttatataatgtattagtaccagtatatataaataactaaatgtacatttactattaatctggacacaaatatttttcgctgttggaatatataatcaaagaggtttggaaattgttgtgttactggatccttggggtgtcccttcaccagcaggaagcctctgtggccactggtgcctttgcccgagttttgctcaggaccactgggctcacttgacctggcaggctgtgcttggcttggcttggcttgtgctaccggcctggatcccatgcctgtcaagggcaagtggagcagcaagrggggtgtgagcaagtgagcaygggctccagccactgctcacagccagatacactggctgcagtgggatggacaactccagggaccagcataggcaccagctgtctgtgaggctgcagctaaaccaggcataccacaagcagcttccacacctggcaccagggaacacggtggtacacggaagtttggagacaccaggaactgcrgagccccaaaggggatgtcacagccctggctcrgggagctcctacatctgggcttcccaaggggccgcagctcttctctcctctcttctgtccttgttgcttgcaacttggtgagcaaggggagtgtctcagccctgtttatgttatacctcttttagccctgccattcggcaggtcctgatttcttgtcctgcatccaggaagaatgagttacatgttcaagtgttgtgtgagcagagtgaagaggagctttattgagcaacaaaacagctcagtggagacctgcagtgggtaactcctttctgtagcaaaggcatcccaatgagtattcagctctcagcatagaggagaccctgtggtgggtagctcctctctgcagctggttgtcccgtcaagtgttcagctctcagcagagaggagaccctggagtgggtagctcctctctgcaggcaggtcatcctgtcgagtgcttaagtctggctgagtctggggcttttctgggcttcagaggggaggaagtgtgtgttgattggtccatgggtgagcctggaaaaagtaacataagttcccactctggtccatgggactggcagcctggcccccaggcttcagacctttctttacttaaaggtggggcttcaccggggayctggccctgtctgccctggagcttgtctgcctcctgctgctgttcatggtgcccaggctgtttgtgccaaggggcacctacaggcctgcaccatgctgccctcagcaccccatctgcctccctcctgacaagccagcacccaaaggccagaaggggctggcgtgtcagcacttccctgagtgcgtgcatacgtgaccaggttgcaacagtgcccaggcttagcctcaactttgctctgagatcagagtgggcactgggagcagggagaagccaggcagtgagagtaggcacttctgagccttcaggggcagttggggggcttcccaggcccctgagagtccagagatgcccaggtccacagctccagtttgggtggcagcagctgcacctgggagggcagggctcctgcctgctcctggcccccaagagcacagggaggcctgggtccgcagctgcaactgggggccatcaattgctttagacactattgtctccaaatgaagttgtaatgggaccacagggacagtagtaccattgctttttatgttctttttttttctttgttttgtttttagatgaacactgtgaattgtagctgataatatgacataattaggagtttagcagtctccagattctttccataaaacttaaagtaagtgttaaaagatagaggcggctcaaataggatgggattttctgacagacaagcagactaacaacagttcttcctccctggaagctcttttgtctgttttaatcattgcaaagtgaagcatataatggccaatgctggagtgtacagaaacttggcctttcagttatctgtacctagtattagaacaaaccagcccagatacttctcgcaattcagtgagttgactgagcagcttttctagccagagctcctcaagtagctgtgctcagctggcagctcagtgggggctgcatcatgtgggggaactgggggcctctctccatgtggtcctttcatctgggctgcttcagtgcacacaggtctcagggcagctccaagaaggcaaagactgaagctagaatagctaaggcccagattctgaaactcacataacagaacttcagccatatcctatcagtcrgtgtaagctataaagccaatcaagatttaagaggtgaggaaaagactctatttcttaatggggaaaagctgcaaagaattgtgatcatacttattccaccacactggtaaattaggaagaaacaataccaaaaaagatatttataattaatcactttggcctgtacagagagcatgttttctatgcatttccttataaaaagtgtattttccacgtgataataccattgatttttttttttgtcaatgtgagaactatatagagaggctaaaatgtgcamctgaaatgatgcatcttttcagtgttcctcagtggcattctcaaaatgatcgttatattcatggcttaaaattaactaaattaagttttcaatgcaagtgttccctaaagtcaaagcttttcttcatttcttcattagagattaatttgtagcatgtctcattgaatggattgttcacagtgattgtttttcagttagacctcttagaaatagttttattttagaaaggcagaataattatagactgttaaatgtctaagtgaccctgaatagttctaggaaggtgtacagaatactgatacttccttaatgccatatatgctggaaattttagagtaaatatacattaattaaaatatctaccataactttcaagcacttacttttgaataactgtagtctttagtcttcagtaaaatcctgatgcaaagtacaacttagtctaaattaggattttcctgatagagtctaaggagtacaagccactctggtctttggaaagtcaagattcttaaatgttaatgtggcatttcctgtgttgaccatttggataatggattactccatcatttcttttgtatacccaccctttataaggattatttcttaatccttatatgtttcacatacatcatgaaacaacaaaaggcttcattatcaggagcttctattcgcttcagcagaaccatttgaaacatctaaacagttgagaaatgcatcccagtaatatactcagaaggcctaggaaacaagaatagtgaaaatagctattarctcaaattcattaggggttaattagccatgttgcartctmcttaattttctactttccacactgaattagtcatgtgtattacttaacccagccactattgccagatcagttagcactacgattccttttcctcagcaatgcttcatattatgacttagatcataaaccagagcaccaggtaraaatcacagccaatctgagtgtgctgcatggggcctcgtgatacttcctgttaatttagatgttgacagggccagtatcagtaatgaaattagttcagggcataactccttgaacatagcaggcacttagtaaatgttttatcaaattgaattaaattaacaaaatgcttccagtgagggcctgaaatcttctaccttgcttttatttgccaaattggctacttaatcaaatgaatcaaccatttttcttatttttgcaagtactatcatttcttttccttttttttttctccctcacatttcaaaaactgatagtaacaattaytaatgtcttatagtactgggacgttcctctctagtcatccatttatctctgctaagaatttctcttaggattaaatagtatgattactatttccacatatttccacagtattttggtcattaacatacatatttaaagcaatatatttaattatatgcctattttatcccttgctaaatgtggattttatttactgaaactgttctctctgactttctactttgacttctctttctttttcttaaacaatctttcctatagtacctactctggcacaaaaaacactgttatattccagaagttcttttttaacccaaaagttagagaattggcatagctactgacattgaaagaggaaatgaagataaggctaaaaacaggaggacttgttaaaagtctgtttaggatatatttaccctcagatttttctctcttacttcatatacctgtgccactgcttctatcagaattgcagctgagcactggagttttagtttctgaaaatggtaaaatagagattccttggactgagggacataagtcatagctgagtgtgagggctgttattctgaaatcaggcaaagtttacattaatgactgctgacacttctgttctttttcctattggctggcatccaggaatataacttcagacaaaagactagaaagtcttttctgaaaaatctgataagcaccaggatggtgcaggtgkaggcgggagatagacactaacatcagtggttctccaataaaagagaccagccagatcacctacaaagacractacaatgcatcagccttacctccagacacaaaactccagtcagccccacttaaatatgagcagacagccaagaagagtaatgtttgaggaaaccttataataggaaacagagaccaaaacaaacaggaaaagcaacttagaggaaacagggattatccagaaattaagaaaaacttaaaaaatgaaaattaatatccctagmagaaataagagaagatattgtattcatgaaacaagagtagtatagtatatgaaaggaactttcagaaaacaagaactcttagaaataaaaaataaagtgaaataaaaatctcagaagatagaactgaagaaatatccatgaaggtggraaaaaaagacaaaaaagaaaaaggaccctaggaagcagcaggatattccataactraattwtaggtctacagagaaaaaaaggagagaaaatagagagggccataaaaaaaattaagaaaaattcccaaaatggaaaacaggaattctcaaaatgaaaggacccagtggatgaaaacagacctacatcctcaccaaggcagtcatctcaaaattgcagaaccctcaagttagaaagaaaaccctacaactgtcagaagaaaaaaaaaataaaagtttttctagaaagtacatctagaaaagaagcagaaaagcaatgatttgtcaaaagtggcagaggaagttaggtgacaaaaagaaaaaaaactatcagattctaagaaaattgattttcaacctrgaattgtttatctaaccacactaccagttccatgtaagggaagaatacggacgttttcagacatacaagttctcagaaaacttatcttccatgcagtcttccatagaatctaccaaaccgaaggagtttacataaaaataggaaaacatgggctacaagaaatggggattctagagtagttacggaaagagaaagatctccagagtgatcatgacaggatatgccaagataacagctctgccacaggcctaggaagcagctagcccagagaggaatagctgatctctcaggagagctttgtggaggagcaggatgttgattagaatacctaatgtgttaggatttattgaaaaaaaaaattgtccatcataagagagtttggagttgagtactttaaacaacgaataaaactgttataaggaatttagcatctatgttcatcaaggatattggtctgtagttttcttttttggttatgtcctttcctggttttggtattagggtgatagatactggcttcatagaatgatttagggagggttccctctttctctatcttgtggaatagtgtcaataggattagtaccaattctttgaatgtctggcagaattctgtgaatccatctggtcttggacttttttttgttggtaatttttaaattaccatttcaatctcactgcttgttatttaacatacacaagtcaataaatgtgatacaccacataaacagaattaaaaaccaaaatcacatgatcrtctcaataaatgcagaaaaagcatttgacaaaatccagcatccctttatgcatccctggtgtgaaacccacttgatcatggcgggttatctttctgatatgttattggattcggttagctagtattttgttaagtattttagcatctatgttcatcagggatattgctgtacgattgattataagatcacagaacttgcaagtttgacagaacctcagccagtagtcagctgcaatgacaagcactgccatttattgagaatttatgatacacaagatgctatactgcagattttaggatatcgtctctaatcttcacaatcctgtgtaagtttggtaggcagaacaaatggctccccaacgatgtccacgtcctaatccccagaacctacaaaaatgtgaggcaaatgacaattaaggttctcggctcacctgagaatagggaggttatcttgggttatgcaggtgagcccagtgtaatttaagggctcttaaaagtggaatagggagacagaaaagtagattagagtaatgcaatgtgagaaagactcaaccctcattgctggctttgaagatgaggaaggagccaggcagcctcccaaagctggaaaaggcaagtaaatggattcacccctagagcctctgacacttatttaaaccaatgagactcatgtcaaacttttttttttttttttttttttttttttgagatggagtgttgctctgttgcccaggctggagcgcagtggcatgatttcggctcactgcaacctctgcctcccaggttcaagcaattctcatgcctcagcctcccgagaagctgggactacaggcgcacgccactgcacctggctaatttttktatttttagtaaagacgcggttttgccatgttggccaggctggtcttgaactcctgacctcaggtgatccaccgcctgccttggtctcccaaagtgctgggataacaggcatgagcccccgtgcccagcctcatatccaacttctaatctccagaattgtaagataataaatggatgttgttttaagccataaggtacatggtaatgtcacagcagcactgggaagctaacacagtaagtattaatgcctccatttttctgatgacaaaactaagtttcaaagattgagtaactttacaaaaaccatgactaagtaactggcacaggcaggactggaacctaggccagtgtaactcttagaccagactctttcaacagcagtaatagttggcatttgtagaacaccaaccaggtaggaagcaggctgtggtctatgcactctaatgtggtacctcatctagtccttacagcagcctatgggggaaggtggtggccgccctcatttctcagaggaggaaattgaggccaagcttggtggaaacaggatttaaagctgtacagtcaaactccagtgcccacgcacttaatctcaacacctctttgctatctcctagcagtttatgaatgagaaaaccgagccaggatgtctgactctctcctgaggtcacacatcaaggtgctgccacagccagatctagaacccaggttaactcttgtctcatctagggccttgtcttcttgaagaacatacttactgtggaaatacaggtgaaaattccgcatcaaacagagataccaaataacagctctaaatagacartgatgcatttgctctctccttcttgttagtgtagtttaatttcctgagaagctttacacatacccctgagcttttctgtcacagctaattgtgcaacttccaagtagttgtcctgcctatgtttgttacttgggctcattaacataccctttaccgtagatgacactctcattaggttaaattaattaaaagatgatcattggggctacatagcttcagcccgggcagagatgtgccaccttcgaccctctggttcccttcgacagcctctgtggagatgtacccccaagacatttaaaaggctgtgctcttattttctgtcactctttatatactatctaaatcttaccacacaaacaacatttagcatgcaagttaaacagatttaaatttaagcaaaattgagtgtcaccacatgtgcttatgccagatctgtataattcttttgaggtttttggaaacgtgaaccaagccatttacgcttcataggaacagattatatcatttgaaatcctcaataaaaatgcagtctcatattctacagatgggtgtcatttaattaaaatatgtatttaaaatgcaaagggctacgttaattccacactgtggctgagattttaattgcactcaagttaggaaattcggagttaatgttcccctggcatctctcattcagcctcttagaacagatgtattgtgatccaaagaggatttcaatatgttttcacatgctgcacatgtaggaagggctttgagatacagggtggcagcatgataaaaacaggagttgatcccgagcaaaggaagggagtaccgcagcctgtggctgccttccctgtccccgcacttcaccaggtagcccttgctaatcactcacggcagttgtgcctcgtcccacttccctagatcaggtatcacagaaaggttgttggggtgctcccatttttgttttggtggggcagaggggaggcatctgtagtactcagaactgtaaaaatgctcataaattaaaaactcagtgaatgctttttagttgtagagtacattttagggtatacattaagggtttagggtacacatcagcctcgcataagtactgttgtaatacactagaaaatctattccacagtgcaacacacacattttgaaccctcaggaatttctctttagaccaaaggcagcccggaggcaaaagaaacgccaacacctgagggtgtttctgacaaggcaaggagtgaaaggaaagtgacaaatagatgttgtgggcctcagaaccccatgaaataactgcagtgtgaaggatttgggggaaasactggttttacgcttaaattattagagagttatccatgatattaaastgtcaaaaaggaaagaattgagaattcccatgaaagcagagaagaacgtgaaattggcactgagtaagaaagtatattgtcttttcattcattctgttacttcaatcctttaagcctgctctgtgcccaggactgtgttaggcatggggcattcatcactgaccattagatatggtgtcactttggggattacaacctaatggggccattatctacataagacatgagttraattaatgcagaggcttctgttttatttttaacgtggttacctaggaaatacagacaattatggagaaaagaagaaaggagtagttcatcttgaaaggatgactgttaagaatgttaagtacagaaatagggacttgtcttatatattttatgagaatgtttttattatgtatgtatgcccctgtgaaatctttttaattaaaatctgcaaagctagtatgaggtaatatatgagaaagaactttaagttcttagaaaaataggcagtgtgtaagtctttggggaagaaagtaaaccccaaacctccttagaaaaatcagcaaaagaaccagtcatagaattcagacctcctggctccttgtccagttcgttatgtcagagtcacaattttttatattgcaaaacaaagccagctaagttgaagaaccaaccatatttttctcttgagttttttttttcttcttctttctatatactttaagttctgggatacatgtgcagaatgtgcaggtttgttacctaggtatacacgggccatggtggtttgctgcacccatcaaccggtcatctacattaggtatttctcctaatgctctccctcccctagcccccgacctcccgacaggccccagtgtgtgatgatcccctccctgtgtccatgtgttctcattgttcaactcccgcttatgagtgagaacatgcggtgtttggttttctgttcctgtgttagtttgctgagagtgatggtttccagcttcatccatgtccctgcaaaggacatgaactcatccttttttatgtctgtgtagtattccatggtgtatatgtgccacgtttttctttatctagtctatcattgatgggcatttgggttggttccaagcctttgctattgtgaacagtgctgtcataaacatacatgtgcatgtatctttatagtagaatgagttataatcctttggatatctacccagtaatggaattgctgggtcaaatggtatttctggttctagatctgtgaggaatcgccacactgtcttccacaatggttgaactaatttacactcccaccaacagtgtaaaagcattcctatttctccacatcccctccagcatctgttgtttcctgactttttaatgattgccattgtaactggcgtgagatggtatctcattgtgattttgatttgcttttctctaatgaccagtgatgatgagctttttttcatctgtttgttggctgcatgaatgtcttcttttgagaagtgtctattcatatccttcacccacattttgttgggattgtttgttttttcttgtaaatttgtttaagttctttgtagattctggatattaacccattgtcagatggatagattgcaaaaattgtctcccattctgtaggttgcctgttcactctgatgatagtttctttagctgtgcagaagctctttagtttaattagatcccatttgtcaatttggctgttgttgccattgcttttggtgttttagtcatgaagtctttgccaatgcctatgtcctgaatggtattgcctaggttttcttctagggtttttatgcttttagggcttacatttaagtctttaatccatcttgacttaatttttgtataaggtgtaaggaagaggtccagtttcagttttctgcatatggctgccagttttcccaacatttattaaatagggaatcctttccccattgcttgtttttgtcaggttggtcaaagatcagatggttgtagatgtgtggtgttatttctgagksctctgttctgttccrttggtctatatctctgttttggtatcggtaccatgctgttttggttactgtagccttgtagtatagtttgaagtcaggtagcatgatgcctccagctttgttctttttgcttaggattgtcttggctatacgggctcttttttggttgcatatgaaatttaaagtagttttttctaattccatgaagaaagccaatggtattttgatgaggatagcattgaatctatgaattactttgggcagtatggccattttcacagtactgattcttcctatccataagcacggaatgtttttccatttgtttgtgtcctctcttatttccttgagcagtggtttgtagttctctttgaagagttccttcacatcccttgtaagtttgattcctaggtattttattctctttgcagcaattgtgaatggaagttgactcatgatttggctctctgtttgtcattaatggtgtataggaatgcttgtgatttttgcacattgatttttgtatcctgagactttgctgaagttgcttatcagcttaaggaaattctgggcttgagatgatggggttttctaaatatacaatcatgtcatctgcagacagagataatttaacttcctctcttcctatttgaatatgctttatttctttcttttgcctgattgccctggccagaacttccaatactatgttgaataggagtggtgagagagggcatccttgtcttgtgccattttcagagggaatgcttccagcttttgcctattcaatatgatactggctgtgagtttatcataaatagctcttactattttgaggtacgttccatcagtacctagtttattgagagtttttagcatgaagagrtgttgaattttatcgaaggctttcctgcatctattgagataatcatgtggttttggtcattggttctgtttatgtgatggattatgtttattgatttgcgtatgttgaaccagccttgcatcccagggatgaagccaactcgatcatggtggataagccttttgatgtgctgctggattcagtttgccagtattttattgaggattttcacatcagtgttcatcagggatattgccctgaaattttgttgttgttgttatgtytctgtcaggtttgtgtatcaggatgatgctggcctcataaaatgggttagggaggagtccctctttttctattgtttggaatagtttcataaggaatggcaccagctcctttttgtacctctggtggaattcagctgtgaattcgtctggtccttgcttttttttggtggtaggctattaattactgcctcaatttcagaacttgttataggtctattcagggctttgacttcttcctggtttagtcttgggagggtgtatgtgtccaggaatttattcatttcttctggattttctagtttattcrcatagaggtgtttatagtattctttgatggtaatttgtatttctgtgggatcagtggtaatctcccctttataattttttattgcatctatttgattcttctcttcttcattagtctggctagcrgtctatctattttgttaatcttcttaaaaaaccagctcctggattcactgatttttttttgaagtgtttttcgtctctctgtctctttcaattctgctctactctgatctgagttatttattctcttctgctagcttttgaatttgcttactcttgcttctctagttcttttaattgtgatgttagggtctcaattttagatctttcccgctttctcctgtggacatgtagtgctacaaatttccctctaaacactgctttagctgtgtctgagagattctggtatgttgtgtctttgttctcattggtttcaaagaacgtatttatttctgccttcattttgttatttacccagttgtcattcaggagcaggttgtttagtttccatgaagttgtgtggttttgagtgtgtttcttaatcctgagttctaatttgattgcactgtggtcccagagacggtttgttatgatttccgttcttttgcatttgctgaggcatgttttacttccaattatgtggtcagtttttagaataagtgcagtgtggtrctgagaataatgtatattctgttgacttgggatggagagttctgtagatgtctattaggtccacttggtccagagctgagttcaagtcctggatatccttgttaatattctgtctcgttgatctgtctgatactgatagtggggtgttaaagtctcccactattattgtgtgggagtctaagtccctttgtaggtctctaagaacttgctttatgaaatctgggtgctcctgtattgggtgcatatatatttaggatagttagctcttcttgttgcattaatccctttaaccattatgtaatgtccttctttgtctttcttgaattttgttggtttaaagtctgttttatctgagactrtgattgcaaccactgcttttttttctctttttttgctttccatttgcttggtaaatattcctccatccctctattttgagcctatgtgtgtctttgcatgtgagatgggtctcctgaatwcagcacaccaatgggtcttgactctatccaatttgccagtctgtgtcttttaaatggggcatttagcccagttacatttaaagttaacattgttatgtgtgaatttgatcctgtcattatgatgctagctggttattttgcccattagttgatgcagtttcttcatagtgtcaatggtctttacaatttggtatgtttttgcagtggctggtaccagcttttcttttccatatttagtacttccttcaggaactcttgtaaggcaggcctggtggtgacaaaatctctcaacatttgcttgtctgtaaaggattttatttctccttcacttatgaagcttagtttggctggatatgaaattctgggttgaattttttttttctttaagaatgttgaatattggcccccactctcttctggcttgttgggttgctgcggagagatccactgttaatctgatgggcttccctttgtgggtaacccgacctttctttctggctacccttaacatttttccttcatttcaaccttggtgaatctracaattatgtgtcttggggttgctcttctcgaggagtatctttgtggtgttctctgtatttcctgaatttgaatgttggcctctcttgctaggctggggaagttctcctgaataatatcctgaagagtgttttccaacttggttccattctccttgtcactttcaggtacaccagtcaaacttaggttaggagttttcacgtagtgccatatttcttagaggctttgatcgttccttttcattttttttctctaatcttggcttcacgctttatttcattaagttgatcttcagtctctgatatcctttcttccacttgattgattyggctattgctacttgtgtattattcacgaagctgtcatgctgtgtttttcagctccatcaggtcgtttctgttcttctctaaactggttattctagttagcaattcctctaacctttttcaaggttcttagcttccttgcattgggttagaacatgctactttaccttggaggagtttgttattacmcaccttctgaagcctacttctgtcaattcgccaaactcattctccatccagttttgttcccttgctgatgatgagttgtgatcctttggaagagaagaggcattcttatttttggaatttttagcctttgtgtgctggtttttcctcatcttcgtggatttatctaccttgttcttggatattggtgaccttctggtggggtttctgtgtggacgtcctttttattgatgttgatgctattcttttctgtttgttagtttcccttctaacaggccgctctgctgtaggtctgctggagtttgctggaagtccactccagaccctgtttgcctgggtatcaccagcggaggctgcagaacagcaaagattgctgcctgttccttcctctggaagttttgtcccagaggggcacctgccagatgccagctggagctctcctgtatgaggtgtctgtcgacccctgctgggaggtatctcccagtcaggagacacgggggtcagggactcacttgaggaggtagtctgacccttagcagagcttgagtgctgtgctgggagatctgctgctctcttcagagctggcaggcaggaacatttaagtctgctgaacttacaattttcccacagctgccccttcccccaggtgccctgtcccagggagatgggagttttatccataagcccctgactggggctgctgcctttctttcagagatgccctgcccagggaggaggaatctagagaggcagtctagctayagaggctttggggcactgtggtggtctccgtccagttcaaacttcccagtggctttgtttacactgtgaggggaaaactgcctactcaagcctcagaaatggcagacacccctccccccaccaagctcaagtgtcccaggtcgacttcagactgctatgctggcagygagaatttcaagctagtggatcttagcttgctgggctccgtgggggtgggatccgctgagctagaccacttggmtccctggcttcagccccctttccaggggggtgaatggttctgtctcgctggcattccaggcaccactgtggtatgaaaaaaaaaatcctgtagctagctcagtgtctgcccaaatggctgcccagttttgtgcttgaaacccagggccctggtggtgtaggcaccagagggaatctcctggtctgcaggttgcaaagactgtggaaaaagcatagtatctgggccggaattcactatacctcacagcacagtccctcacggcttcccttggctaggggagggagttccccgactccttgcgcttcctggttgagatgatgtcccaccctgcttctgctcaccctccgtgggctgcatccagtgtctaaccggtcccartgagatgagctggttacctcagttggaaatgcagaaatcacccaccttctgcgttgatctcgctgggagctaccaacccgagctgttcctattcagccatcttgccagccacccttctcttgggtttttaaacttcactgcttcaagatggtgagctatagagtcaccaggaaactgcaggttccaaatggtttccccctgacctgccttccttttcttcatctactgacttctcagccctgaaaaatgattcccaaattgcttctaagtctttgagaaatgtcttctcagttaaaaacccccagagaagctggttaaagactgaagagagaacctcagccctaactgtagtgccttcatgagatatagaggttataaactccagagaaatgaaataccattatgtgcatcagaggcccgggcttgactttctgattctgcaagggtacagaaggtttagagaaccttggcaaatggaggaaaacctaatcatcagggttaatgtgcaggacttgacgagtaagagattgatttctctttgttacgaagaccagtagggcttcagagttgttggttttttaaaaaaaatattcccagctccttgaaccttggctcttataagaaatgtggggaaaatgtgtatatatatatatatatatatatatakakagagagagagagagagagagagagagagagagagagarraagagagagagaatatgtattctatgtaagaatatgtattgtgtattcttatgagaatatgtgaatatatatacacatatatacataaatatattttttcttatagaakattgtcttacctcttattttttattaaatagatttttctatcaagaggtgaattttcttaaggcaggatgtttgcagaaactaatggaaaacaaaccttttttaaaggagtaattgcctccttaaaagtgctgatttccatgtgaaatttatgccttcttccagaggcagtgaggagtaccccaggcagttcgaaggagacaattcattactggttagtgtacacacaccaagaaggacattaattcacaaaatgaaaaactaatagagtgtttagctgactctttatcaccagtggcagtctgcactgtctctccatcattagtgtttactgagctgatggagaccgcagtcaggcctgcttatcacagctcatcttagatgactttacatcactttcagagctacatkgggcatccctcctcacttctttgaaatgaggaatccaggggtctcaaggaagctatgaagttattgtgtccatttttaaattttcttcccattctctttgactttctgatacatcccaagcaaaaactctagccctgtacattggtaccttacgctgtagtcatcccacagccactttctgagctaattagaaaactaccatctttactcctgttttacagatgtaaaaactgaagtataaaaggtatgaaccatctttaaccaatgagagagctgggatattaacctgagagctacattactttttattaaactaacaagaaattttaccctgcttctttttctccttcttacattcattattttccattttttcaatacccctcatgtaaatgattagtctgtccactatatttatgatttctactttctcatgtgacagaaaaatttttaccaatccgtcatctgaagtacaaagcaaaggtgtcttttcttctgaaaatgtgtttcagtgattcttggacatactttaactttctggattagggagttcgttacttatcttccttatcttttaagttgttttcttaactaatacaaataggtataatgacattataacaaacttaaaatatcagaattgctttattaagttcaaagtaaatttgaaaatatagtgtggtaggaatatgcaaagagaggatcatttacatatctttatattgaaataaagcaatgcttagataaatattgcaaatacaaaaccccagaaattttcactgtctrcattagagaattttttggtaattttgtgtgttgtgggttttttgagttatagagcatgaggaagtgctgaaagtggtctcacttggaaaaggaaatttggcttccctgtttttgcctttgatctctgacttccatattatattccctgggtctgtcccctgtgtcactctccatcttctccagtaggcatcccctgctgagggaacagacagatacatagtcaatcagctgggtagccayaactgttacacacatagacagggattcatacatcatgtgttctggggaatttttccaacagaaattaaatcagtggtgcactatcttatgrggacattagagaagatattcatttattcaggaagtatttgtggatagttcagtttaacaaataacacagtaccagctctgtccctaggctacagggacatggataaacaagacccagcctctgcctacagggagtttaaaagtcgtggaaaatacaggcatgaaagtaatcaccccataatatgattcggcgaccatggaaaaagcacaacatataattggaatatatgatgtatacatcttaaggggaatgtaagtatcaaggaaggcattctggagaagatggcacctgatctgtgtcttgaagggtaaatagtaataagccagacaaagaggggttatttattatgttaaattgttattacattatagaagtcacattatggagggtaaactaagtgaaaggaaagaaaaggctatgaagtggaagaaaatatggtgagttcagagtaattcacatattcagtagggctacattgcagggcttactataggggagcagcaagaagtaacgaagctagagaggtaggcaaggtcagttgagattttatgtggaggacaatgtcaagctattgaaagattttagactaaaagagacatgatcagatggtgttttggaattatttctccagtaagaatacagggtaatgaattggaaaagaataattcttaaggtaagagattatttagaaacctgatgcattaacatggatgatagatggcaaaagatttgtcttagtctgttttgtgctgctataacacaatacctgaggctggctagtttataaagaacagagatttatttcttatagttctggaggatgggaagtcccaaattgaggggcctgcatctggcaagtgcattcctattgcatcaccccctggtggaagggggaaggcagaagatgaaaaggcaagagaaaaagggacggggccgcaaactcagccttttcataactaacccactcctgctatgatggccttaatccattcatgagggtagaaccctcaggcctagtcacctctttaaggtcccacctcttaacattgttgcattggggattaagttttcagcccatgctttttgagggacacgtttaaaccatagcagactataccaaggcagagatagtggggttggattcaagagatattaagaaagaatgatatagggagtacaggaaacgggcatcaaaagtgtttccaagttctttgtctgtactagtcacactgtggctatattaagcactgtgctaggatgcagaatcatctatgccaaatagaaccatatgttaaaatgacatttattaaaatgaaacttgacctgcacatcacasatgtgtattacagcttaattctaaatacaaacaactaaagaaaactatccaaattatttagttgaactagaactttatacagttttccttaggatatactgttgattcatagaaatctcttccagtataaagatatttgtagtaatattatttgatcggtagtacacaaatctaatcttagatattattctccagacatacctactagaagcagcaacatggactcacttgaatggcattttgttcgtgccctgtatttgtcccattcgggagatagagtgaaasaagagttctgttttggggttaacaggcagaattataagcagctaagcaacctaaaatagttcaaaacacaaaggcaaggaaggtgattctcaccctaagcaataagcttttgaatgtccctaaagtaactcagcttgttagtagtcattgtgaatggtttaatgaaagtaaaagttgatggtactaactgaaataaaattatggaattcttgtgtaagtttcactgagaattgaatctattgattttgcaagtagtaatcaacatctttgctctgtgtataatgctttcaccccaaattatggcaaagtaccagatggaccatttgcagcaactaagtaaattcaagcgctgtwtaaattcctatacctttttttttttgagttctgtatcgcatatggaggaaagcacaaatatttattcaccatccttgtttataagtacagtgtgggaaatattttgtggaaattcacctctctgagaagttagaaaaaatattcaaatgaagattaaaataagtgaagaaggaagaagcaagtgatattttcataaaagtatactattcactcagatagagggtctggatcatgctttcttgacataaatgatgacactgatatggggatagtagggatggtttcaattagcttgacatttccagaagtcaaattcagccaaactagaatactagataagttcttractcatcttttgggtgatttttcttctccagagagaaacacttggagactcaacattttgtgcataattctgaccaaaaggaagaattcatgggaaagtaaaaatttataatctttaaagaatgttatcatatcatattggaatttacacagcaaagaaagtaaacactaggcatagctagatgtttagttttaagaaagttaaatttttagacatttggagaaaatgtaggtatgatctcgtgaatagaaacctatcaaagggagtgtaatttatgatgaggggtgggagattatacaatataacatttgaactataaaatgctaagtaattttaacaaaaaataatagcaaacattcaatgacaaggtatattytaaaatgcgtgtgcacacacacacacacacacacgctattcactttcaccataacccaagaagtagatatcataatcttcatttttacaaattgggaaactgagtcacaggtagagtaaaataactcaaacaaggacacacagctattaaatggtgaagccaaaatttgaacctatttagtatgccttcacagcctgtgcttttaaccaccacactattgtgtagcattcagagaactctctgatgaggtcacgtagaagaagatgtattttaaaaatgaaagaaaagccctgcagtcaatcacagatgagtgcatatagcaagcacacaaaatgtccggggggcctgcagrtacagtgttggagacactaaagcctagaatgacttaatggtcatcagagatgttaaggaccacaaaatgcagtgtgtggctatgtttaggcacaaagagaacatcaaacagataggtccacagattggtgaagtagtgaatataatgttaagaaaaagcagaaccactctaacctctcttttgtttctgtcttatttagaaaggggcctgctcttcaaatgtaaggataagacaagttgtgataagaaacagctgtgaggaaagcgtcagatggcatctggcttctttagagtagaacttaaacagatcaaatccaagggtgttaaggaaatttgctgaatttgagaaattgtggagcatgtaaaaggtgacagaatacccagattacagcagatattcctattctcaaaacagagtgaagaagaaattctagaaactacagattaatgttagatagtgaaccaatatgatagttagcacaggaaaagaatatgatgagtgccaggagccaacatggttcacaagagggagaaaaactatcataggtgcccaaggactactgaaagaaaatgaacaggccttaccatggaagaaacacgggcactatgcatatgtccttgtagttaccagtcagagaccaagtcttgccacagtctcaaatacctttgtttggtttacaaattggtatgaatatgtatttttttaacttagctcttatgtcctaacaaatcaaggtttaccagtatcagcccactgtttctctgaaaatcaaatttgacttaatccagcaagggaacatgcaaaactttaagtttcactttttaaaagtgaatgttctgatgaatgagccttagaacaaagagagctaagcttttctgccttgataggtggttccttctcaatttcatacctttaacctaattgccaaaggcttgcttgaggcttggtggtctaacctgtggagcccagaaattgtaacacactgagtgtgctcatgggcatggactttgtttggaagatacattcagtcttaagctgaagcttttacagaataattgaaagcagctccaaattgagtgaccttgctaagaagtctgttttggtggggtctacatctttaacctgggattctagaaaatagtagagaaacccatggcatacttttctaaaaagttaaaaagtaaaatagtcctgtgaaacattttctgaaaggaatgttgaatcttctttgcaagggcatcttgtgtgtgttattgagaataagagcaattcataatgtgttcagtattcactaaatccaaaaaaaaagatactagagtttatrtagcaaaaataatgaagagaaaggagaaagcaaatcacttgcttccaaataaatattatttatatagattgtcctcccactcgtcctcagcctataggaacggtgccataatttgaatgtttgacttctatccctgccttggctcacagctagagagtggagtgcagtaggaacttgtttgctgtgaccaaatctttccttttcaaagatagtggtttgcgagcagctggttttttstttgctttgggttggtttgttttgttgtkgtggtttatttgtttgtttttgtgtgtgtggttttttgtttgagttggttttgttgtttgttttgtgtgtgtgtgtgtgtgtgtgtttgtttgttttagcagcagaaccctttcttctagcagaattttactgtaaagtctgaattgggtaacaaatsaragtggagcctctctgactaaggaagcagggaaggcaagatggwgagaatggagactgaaaaatgttaaattgaattaagtttggcccaaagctgcctctgtacatgttttaagtttgaccaaaaggtttctttgtacatagtgaactgtaacctaacttgatgtgcaaacagactagaacttactcttgtaacaggtagctgagtctcagccagtcacagcagccaagcttcagtcagtgataggcagccaactcttcaacccaggttcaaatgaggcaaacactgagctttaaccaagtatgcatcctttgtacatccctcccgttacatgtcacttccttttctctggctataaatataatctacacatgtggtagagcagagcattctgaaccatttttggtctgggctgctgcactattctagaatcacaaataaaagccagttgagatctacgtttgttgtaatttggtcttttaacagagattaggaactctgcagggcactttccaaaaatccttgccttagaggttgcagcattgcattaaaggtagcccagagatccttgrtgacccttcatctcactacttcctggtccagtcttctctgagatttaaagtgccatagttcaaaaatgtctcaggagtagaaggttacattcattcatcaaggctcagttgggagamcagaarccawyttaggtatttcaagcaagaaggaatttaatgtagggaatacgatgttttagaaattgctgaaagggcttagacagccgttggaaggatacaaaaagcaaggaatctagctgctgcctttcaggataatcaggaaatgcagccggggatttcaccttcctgctgcgaggaagcagctgtctgcaggagctcttctggaagctgctgcaagcttctgatttgccagctgcctgagcatctttctgccactgtaagaagagaatcctgccttccctttctttttgcyttacacagcttttgggagtacatctcaatggcagaatccaaacccaaaacccctactggcaagaagttgtagatgttcctatgcttccaggaaagtggctagaggtgacactgagttgacaacagacaaagcacaagggtatgttcccatttcactctgtacagtaaatttagtctagagtaataggaaggtgaacgtatttccaagaaagcagataaaataacaagtctcctgtggtagtaaatataaaaagcatctttccaaaataatcctgattcagctgttttaagccttagtggaaaacctgatttgtcagtgtttttatgtatatattaaaataatttataatccaatttctgtctcttcaggtgaatataacacaatttctatcatttgaggtcaaaacttcataggtatcataatggctgtttagattcagaatcattactgtcttacctttaccaccaggtaaaggtaatcacacttgagtgtgattacactcaagtaatcttcttcccttctcatagtgcctctttggtagaaaggaaataaacggcggtcaggaaataaatgctgactccaggccctgtttgagtaaggcagacatgatctctcaatcacatgaacaatttacaggctttggtgaatattctttgaattyctaaaataacccctaagttgcggctgggtgcggtggctcacgcctgtaatcccagcactttgggaggcccaggcaggtggatcacaaggtcaagagatcgagatcatcctggctaacatggcaaaaccctgtctctaccaaaratacaaaaaaattagccgggcatggtggcgggcgcctgtagtcccagctactcgggaggctgaggcaggagaatggcgtgaacctgggaggcggagcttgcagtgagccgagatcgcaccactgcactccagcctgggcgacagagcgagactccatctcaaaaaaaaagaaaaaaaaaccctaaattgccttcgttaaagaacctagcttggcagacatcctttccttggaaagggagatgcctgtcattcttcaaaataatgttaaaaacactgatttatctcctcccacgctgctcctcaacatcattcctggctttcctaccaatctaccacctacctcatgcctgaaggccatctctaccactgaactggcgactggagaaaggcattctcccctttttatgtatgaaaagataaaatttgaacctgccctctgccttaatcccttttctctcctgcgtattttcactaatttaaacattgccagaatcctgtgctgttctcatacttctatgatkccttattttaagttcaaaatgtcatgatcttacccagtgtgtatgtttaatggattaatgtatcattttctttctggccattagccacatgaacaactaggcccacagctgtcagatttcttgcaaggtttttcgaggagtgagaggatgagtctaggaatctcactcttccaggatcctcaccagggggttcaataaagatcacttcaatgtgctgagcacttactgtgtgccgaaggttgttctaaatgcttcatgtgttttatatcattgaatccttacaatgaccctttgaggctgaaaatgtagtcacttcaataaacaggtttaacgatttccccaaggttatccagttagtaagtggttgaatcataatgtaactactactttctgggccaatcaaaaagaaatggttgtcaatccaaaagaagtgttgtatgtaagaatttggttcttagttaataggagaatactcatatccttttacttagcgaaaaatatttagattttgaagtaatatcctgaaattgtgtagtcaactgatagagatgattgcttctccatgtagcttactctcaactggcataaacacagattgattattaatcttttactttttaaaaattgattctggaagcatctatatgaactgttaattattctagggattatgtggcaaaactggaatggatgtgtgaatagtattcatgtgttactaacgtataaagacagaaatatagtcatatattattaaccttcacaaagcattagtcaatatgtgtatcacaccacctcatcaatcagcctgcacagggactgtctgacaccagacagattaaaggggaggtacttaactattatcttcaccccatgctgagaggtggccacacttgtcctcactgagtagaaattgtcttagcaagatttacacctgcaaagtctgtaccatgtgtcaactagttaattctctgttttttacttctaacatgcttcagaggagcccccaccaattacacagctactcatggtgatgatctrtgtacttggtggcagggtcagcttcttcttccagataaatcagttgtccagatgttatccacatggcagtcagagtggccatggcttctaagattctgcctattttcctctgcagtctcgatggctctcagattttgcgatcaaatgtataaagctagtgtcattgtttcagtgcccacataaaactgtagatggagtgaaaaatactgggtttttaatttacaagaaaatacaaccccataaaaaagtgggcaaaggacatgaacagatatttttttaaagaagacatacatgcaggcaacaagaaaaaaaagctaaaagtcagtgatctttagagcaatgcaaatgaaaaccacaatgagataccatctcacaccagtcagaatagctattattaaaaagtcagaaaaataacaaatgctggtaaggttgtggaaaaaagggaacayttataccctcttggtgggagtgtaaattagttcaaccattgtgaaaaacaggtggcgattcctcaaagggctaaaaacagaactaccgttctacccagcaatcccattactgggtatatgcccaaaggaatataaatagttctactataaagacatatatatgtatgcaaatgttgactgcagcactgttcacaatagcaaagacatggaatcaacctaaatgcccatcaatggcagattggataaagaaaatgtggtccatatataccatggtagaccatgcagccataaagaagaacaagatcatgtcttttgatggaacatggatggatctgcagrccattatctttagcaaagtaatgcaggaacagaaaaccaaataccacacgttcttacttatgagtgggagctaaatgatgagacctcatggacacagaagggaacaacagactctgggccctacttgacggtgagaggagggagaggatcagaaaaaataactactgggtattaggcctatgcctgggtgacaagataatctgtacaacaaacccccatgaygcaaatttacctatataacaaacttacacaggtacccctcagcctaaaataaaggtttaaattaaaaagatacgggccgggtgtggtggctcaygcctgtaatcccagcactttgggaggccgaggcgggcagatcacgaggtcaggagatcgagaccatcctggctaacacagtgaaaccacgtctctactaaaaatacaaaaaattagccaggcgtggtggcgggtgcttgtagtcccagctactcgggaggctgaggcaggagaacggcrtgaacccgggaggtggagcttgcagtgagccgagatcatgccactgcactccagcttgggtgacagagtgagactctgtctccaaaacaaaacaaaacaaaaaaagatactgggtttttgttacttattcaacacctttattgaggaggaggaggaattgccatgtattagcaattgtgtgtcaaacgctgttctaagcctttatatagtttctcatttaatcatcagaatcctatgggtcagataggatgatcctcctttcacaagtggcaaatctgttacagagaacttcttccaaatagtataatatatgagaaagtcggaaatatgaactcaggtcagtccgcctccaaaggaccaccttcctgttcactatacttggtacttacctgctggtttcagaaaacacattatgtgttagggatacaaagataaaagtgaggttgtacctgctattgcttaagaggtatgatagtctgttcttgcactactataaagaaatacctgagactgagtaatttgtaagaaaacagatttaattggctcatgtttctgcaggctatacagaaaggacagtgctagcatctgcttctggggaggcctcaggaagcttccagtcatagcagaaggaaaaggggagcaggcatctcacatggcaggagcaagaggctggatattcacacgctttaaacaaccagatcttgcaagaactcactcactattgtgaggatggcaccaagccctaagggatcctcccccatgacccaaacacctcccactaggccccacctccaacattgggaattacatttcaacatgaggtttagagaggacacctttccaaactatatcaagaaggtaatgagtatttcaacttagatccaaatttatgagtgatgcagctgcctcagaaagaaacccatgaaataaagcaactggaaaaagttaagttgaagaggaactccatatgggacttccaattcaactgctttagttctatttccgcttacttgctgtgtcatattgggaagtatgctttatttctgtttggttcagtttcaccaattttaaattgtcctaatgtttccaatttacccagtgaataagccgttccctaaggctctttggaagatttacatatacttaagctagaaggatcctgtttgaacacatagacaaatgttacctctctgccatgtaatatttttgcctctaaaattctgctaagcttaaatctgtgtcccttattcatccaaaataccttgttaagtattggttaacacttttagatgctctttgatgcagggttttacagaaatacaaaaggcttacaaaagtccatggaaatctaatacagcaccacaatactgcttttcaacagaagaacaggagctgttcattagcccccactcccctacccaccctgtttctctttcatatccggcaggagctgaattggccacaccatatgcttttttagcaaatgatgagtttttttaccaagccttagggaggattatttggaataaaggaaaaatcaatcgtaatgtttctccccaggactgaaagacactgaagtctgtactatcaatcacaaggtataaaaaacatgtgtctaggctggtttgcactgtatgcagataggaccccaaagctaaacgtccttggggacctagggcttgctcagacttgttaccatcaagcactgtttcctgagtaaccagatgcaattttctctctgcagagctgtgcagtgtgtagtgtgtactcttggctcacgactggcctcttatcctgtggtagcctaagggaacgactatccatttctactttggctgttatttttgttttgctcatcagaatgagccttccatgaatctcctttgttctttctatatagtttgatatttggaacaattcttccatttcagacgctcatatccttcctggagctttagtttcttaccctgaaacagaataatgttccaggtgaatgaactatttggaagacattaagttaaaggcattgtgaaaatataatgaaaaaaatggttataaaactctttgatttgtccttaacttgaagataaaattcaacaaacattatcagcagtctactgagagtaaggaagagctatacactgagagatgccaggaagaagtagttattgtttttgttatcacagatctcacaatccactaggaatgctgtgggcaaatacagtgcaagatgaaatgtgctaagtccgtaggagagaggcagagtgttaccagggctcgaaggatggcccttagctttgttgcaggcacagtgcaaggtgccacatctcccatttggtcctcacaacaactccctaagttgtgtatttgaggaaaacgagacttagagttgttaagaaatttgttctagaggtaataaaaagtgsaagaataaattatattcctctgggaagcagcaggagaaagtatggtttcatagagatgaaaacgtctcttaagcagcagagtttggtttttactcttttttgggaggctcataatagtatattctcaagcgaatgttgagacatctaagacattaagctgggcagtgaatggaacaggtatatcttttcttcccccaagagttaatgtttgtagttagggtaatataagatatttcggaggaagcattctaagaaacactaaaaagttatattgtccatagtcttatgaccagtggttgggggaaggtgtaacacatgatcatgtaaataacaaatggtaccgcataaaagaaagtaggtctctgcctcctatacccaaatataaaacatcccctctgtgaaagttcattatacaaattgggtcattcttgtcatccccaactgaatcaaactcaagaggccacaggtaaaatcactctgtgtacattacacctgctccaagaattaaatgttccacaagcccagctgctgaaatggcctgctgtaactctaagaccagttttacctagaagctgcttaaacaacctgctgtgactctaagattgcttttatctaccaccatcactcccagtcagagcttgacagctaccagaagctcctctagggccaatgagctttcttttaaacaatatgtaatatttgtctttctcgtaagactcttaaccttctctttgttctttggacatgtcacaaaccacccattctctgtgtatgccccaaattgcaattcttactttccaaataaaatactttaaatttagacattcatctctatattttgtctgacttcaacacctccatattcaggaagcattttttaaatataaatatattaccaattatgtgactagaccatagaacagcacatataattaagacaccttctcccgatcctccagttccctcattcttatcccttttttccttcctgataatttcttccacttttctccatcccagttcttaataaatccctttcatctctcttcttcttctgtaaaagtgggcaaaagagagagagcagtgaaaaggcagggaatgattgctccgttattgagatgtaaaaggattcattggttggatgttgtgcttcagagcgtaggctttatttccacatctggctatacacatgtgtatgcatgcataggacctaatctgactaatgtgcattatgtccccatcctttgcaatcagaatatcaatgagcatggtggttttcaaaattaattgattttgctattaatagttcaaacctaaaatttctgggatctgtgaaaagaggtagttattacttggaggcagaagaactattgcttctgaaataggaagcaaaatgaagagagctttccaaatgtgtttcttagataaggcccatccttatgtagaaacatagcaaaagaacttaaaactagattatagatggtttggaagatgggaaagaacaagtaaatacatgaattgctagtagtggcagaagccaagtactgttgggaaaagagtagtagctttggaaaaagggactcaggaaaagagtgatcaaaaatagttactatgaaattttagtttggcgtaatgacttagttcaagaagaaaggacatctctattccaagaaagttcaaatcaaatgttaataagctggtatgtactttagcatgtgaagatcacccctctgttccaaaaaccggtaggcttcataaataaataatttatttcttaaacatgtatttagtgcctacagtgtacaaagcactggggtaaggaaagattagtttgtacaggtttgcaaataattcaaggcaataaataaaatgtagggacagtagtacagagaaattatgaagactgggggtagaattagctggcattaaagctccagcttggaactggagtattatggtgtctgacactcaactgtgatcccagtgttaggcttgatagcagcatatcccttaggcatttaaggagaggaaagaagttagatggaggggctcctgtcactgtccccactgactttgtaggcctcgtgaatccttaatatcacagacctaatgagcattcctatttttatttttttttaagtatttagttttgtccaggcaacaacatcaaaggatttcagagttgtcttaagacctggtaacatattgctatagaagttaggaaggtactattaatagttttctaaataggaaaactgaagattaaaaattaaatattttggggctgggcaaggttcctcacgcctgtaatcccagcactttgggaagctgaggtgagaaaatcatttgaccccaagagtttgagaccagcgtaggcaacatagcgagaccctttctgtacaaaagaattaaaaaattagccaggcgtggtggtgctcacctgtaatcccagctacttggagatgaggtgggaggattgctgtcttagaaagaaagaaaaagagagagaaagaaaagaaggaagggaggaagggagaaaagagatggaaggagggaaggaatgaaggaaggagagaaaggagggaagcggggagggagagaagaaggaagaggaaaggaaagaacttattttatcccaagttagagtagaaaactgtgtggtgtctttcacctctgtacaaataggaagaggatttggaaatcattattataccaaaatttgatcttctaaaatgttttcaatgagaaaatctcatgggatcattcttcactgtctttttctatcttctagaaagtttgaattcacagtgttaacctttcctttcstgccgagataaccatctttcccttttcaatttctcacttgcctgacagctgataccagtctaagctaatattgtaacaattttagataatattgcagatgcacaaggacatcctcatatgaatcaattaaagaagtcacagtgagttgccattgaaagtgtggcagctgcatccttgaaagcagatgctcttctgggtctgaatgagtccaattttaactaattttaagacctaaacagatttcagtctggttaatattaggatgtggaaccacttgagacatcctaatgtcctagtctgattacttctccatgacagtttgtatgttgactttccttgagagatgctgggtacttaatgccaggcatttttatgtcaatcgtaaagagagaccccaagtcatggctgcagcaaagtgcactgacaactcgtgaaattgaagtggcttctaacagcagcatgatttatagggaaagaacttggggtatagggattcaccagaattgctttaaactatatttctgttagattcctgaatccccagaaacaggctataatgaactacttccccatccctactctctctctagattatactcagaaaactaaggagaaagttagagttgtaaatggcaagttgctccttcttttttctgatttttctttaacaatctgttattatgttctttgtcatattgcattggtcagtttaattaaaaaggcattgattgagcttctgtaatgcctctagttattctgctggccttgaatgggggaaaatatatataatacataattctttcactgaagtaattaatgatctggaagggagacatagttaatggaatataccttctattctagaattgagaggggtaggggaacatccagaagagccattgacccttcctggggaatcagaaaagactttctgagccagagaaggcatgaatagttttgaaagaggagtaagagccatcaaaggtgtagaatcatgagacagcatgatatgtttaggaaatttgctttagacaggtggtaaatcaaacggcccagggttggagaggggatacgctgaagagaaaaaagaaagtggtaagagatggagaaaatctggagggttggacagaaataaaaaatcttggaaagctttgctaaggagcttagacttgatcatataagccttgggaaacactgatgttatttatacaagaaattaacatagtcaaatttgtgttttgggtaaataacttatctgactcatatttaattagataaaagggggccaggtaagaagcagagacaccagtcaggtaactattgcagtagtccatggaagagatggggtccaaaccaagaaagtggcagtagataacagaaaagaaaaaataaatattaagaaaatatttgtaaataaaattggtacaaatttttctttgctagagagagtcaaaaattacactcacgtttgcagctgggattcccagattgatgtatcacctataaaaagagaattcaggatagagaacagatgctaaagaaagataatgagtttagttttgaacacattgcatttgagatgcctatgggatatacaggtagcagtatcttgcaaatcattaawcaaataaggtttaggagccatcatttcatggataatagtgtaaacaatgaaaagggatgagctcactcagaacatattggcaagtaaggaataccactagaggaaaaagtccccagaaacaccggcattatggatggactaaaggaaggggattcagtgaaggaaactatggaagaaatgccagagagagaaaacaacacccagaagagtatgccatataagccaaaagaagatgatttcaagaagtaaagggccagtgaattcagagatagcagagagcctgcatgagatgaggactgaagagcagccagtagatttggcaattacagtatcattgatggctattaccagaaaagttttgaataaaaaggtgagggcagagtcagattgtggcacactgaagagttaataggaggtgggactggagaaagtcagtgttgagattcttttgaagtstttgttgagractaacagggagcaggtaggacaaagggcctgaggagaacagcgcgaatttggaaaaattgctgagaaagggaaggaggtagccaagcaccagggaaaggattgacaagtggtaccgcaagcttcttttgaaattaaaatccagaacgttttagtggcaacaatctatacatttttgtctttttaaattaatatattatagctgtacgtattttgggggtacatgtgayattttgataaatgtatacaatgtataatgatcaaatcagggtaactgggatatccatcacctcaaacatttatcttttctttatgttgagaacatcacaattctcttccatctattgtgaagtatacaataaattattgttaagtataattaccgtgtggtactgtcaaatactagaacttatttcttctaagtgtatttttgtgcccattaactaactttcccctcccccccccacccctttttatttctcagcctctagtaatcaccattcagcctccatgaaattccctgttcaggtcccacatttgagtgagaatgtgtgatatttgtctttctgtgctagcttatttcacttaatatgatgaccttcagttccatccatgttgctcgaatgacaggattttattctttttgtttgtttttgagatgcagtctcactctgtagcccaggctggagtgcagtggcgcaatctcggctcactgcaacctcctcctcctgggtcccggttcaagcaattctcctgccttagcctcctgagtagctaggattacaggcacgtgccaccatgcccagctaatttttgtatttttagtagagacagggtttcagcatgttggccgggctggtcttgaactcctgacctcgtgatccacccacctcggcctcctgaagcgctgggattacaggcatgagccactgtgccccaccaggattttattctttttatgggtgaataatattccattgtgtatatctaccacattttcttccaccattcatgaattggtggatatttaggctggttccctattttggctatggtgaatagtgctgcaacaaacatgggagtgcagatgtctctttgatatactgatttcctctctcttggatatacccagcagtgagattgctggctcatatagtagtactatttttagtttttgaggaaactgcatgctgttttccataatggttatactaatttacattcccaccaacaatgtatgagcattcttccttctccacatcctcaccagcatttgtcttttttataatagtcattctcactggtgtgagatgatgcccccttgtggtttttatttgcagttccctaatgattagtgatgttaagcatttttttcatatacctgttggccatttgtatgtcttcttttgagaaatgtctattcaggtcttttgcctatttttatagtcagattatttgttgttttttttgttttcgttttttgttttttgtttttgctattgagttgtttgagtcccttacatattctggttattmatcccttgccaggtatatactttgaaaataatttgtttcattatatatgttgtctcttcactttgttgattgtttcctttgctttgtagaagcttttttggcttggcgtaatcccatttgtttatttttgcttttgttgcctgtgcttttgaggtcttacccaaaaatctttgcccatatcaatgtcctgtagcatttccccaatgcttttttctagtaatttcatagtttttaggtcttatgtttaaatctttaatccattttcagttgacttttttaataagttaaaaaatgagcatctagtttcattctttggcatacagatagccagtttttccagtaccatttattaaagaaactgccctttccccaatgtgtgttcttggtgcctttgtcaaaatgaattggctgttaagtgtgtgagtttatttctgggttctctattctgttccattggtctatgtgtcygttttttatgccaataccatgctgtttgggttaccatagctttgtagtacaatttgaaatcaaagtagtgtgatgccttcagctttcttgtttttgctcaggattgctttaactattctgggtcgtttgtgattccatttgaattttaggattcttttttctatttctgtgaagaatgtcattggtattttgatagggattgcattgaatctgtaggttgcttttggtactatagacatttcaataatattaattattatttcaatccaggagtgtgcatatctttccattttgtgtgtgtgtcttcaatttctttcatcagtgttttataattttccttgtagatgtcttttactttgattaaatttattcgtaggtttttyttattgtaaattggattttttttcttgatttctttggtggattgattgctgttcgcatctagaaatgctactggatttttgttttgttttgttttgtttttttgatacagggtctgrcgctgttgcctaggctggaatgcagtgatgcaatctcagctcactgcaacttctgcctcccaggctcaagtgatcctcccgcctcagcctcctgagtagctgagattataggcacccgccaccaagcccggataatttttgtacttttattaaagacagggtttcactatgttggccaggttggtctctaacgcctggtctcaagtgatttgcccgcctcaggctcccaaagtgctgggattacaggcatgggccaccgcacctggcctgatttttgtatgtggattttgtatcctgcaactgtactaaattcatttaccagtcctaagagttttggggtggagtctttaggattttctaaatataagatcatgtcatctgcaaacaaggataatttgatttcttcctttctatcttggatgccgtttctttctttatcttacctaattgctctggctaggattccagtactatgttgaataaaagtggtgaaagtgggcatccttatcttattccagaacttagtgtaaggctttcaatttttccccattcagtatattagctgtgggcctgtcatagatggcctttatcatgatgagttatgttccttctatacccagtttcttgagagttttgatcatgaagggatattgaattttatcaagaactttttctggcatctgttgaaatgatcatatgatttttgtcctttattctgttgatgtgatgtatcgcatttattgatttgcatatgttgaaccatcttttcatccctgggatgaatcccayttgatcacagtgaatgatatttttaatgtgttgtcaaattctatttgctagcactttgtcaaggatttttgcatttatattcatcagggatattggcctgtagttttcttttttattgtttcactttgtctagttttggtatcagcgaacaatatgttcttttgttttcctgtcaaatgatgagttgtagaattgactcaatgttacatgagttttaggacaattatagtgaaagaaaagtattcaagggagttgaggtttatggtcaaagagtagctcagggaatcaaccatgcaatccatgctgaggatcctaagagggactttttctaccaggagaaaatgaagggattacagcattaaagttataatggaaatgagggtgggagagagttgaaagaagaaaagtttttgatctgagaatatgatactagaatttaaaatttcagaggttgaaaacaggatttaacttggcagcaagttattaatatatatttttaatttgcagtgatttaaagaggtgtttgtttttctaatatagcaaaaagtctgaagtcaagcagttgcttcttttggccaatggtccaacaatacttagtccagcacctctctgattcttggtcttttcctcttaataggaagatgatgcaacttcagatacctcaatcaaatcagaaaagcagggaaagtgggagcaagtggtggccacagcctcaattctccttttatcaggaaaaacaaaagacttcccaaaagccacaaaagactctacttagggggtcagtggacagactatgacacacgaccacctctagcaacaaatagggctgagaatacaaatatttagccttccagaatctgtaatggagtgagcaagggagagaatggaactggaagtaactgttggttcgccaaaaaggcagtgtctgctccaaagaccaatgttcagcttcctttcgkggaacaatgtttatgtagtacagaaagccacaatcatcctgccacaaacagctaactaggtgacttaaagatgcatgctttatgatgttcccctccctgtgcccatgtgttctcactgttcaactcccacttatgagtgagaacatgcagtgtttggttttatgttgctgtgttagtttgctgaggatgatggtttccagcttcatcgatgtccctgcaaaggacatgaactcattmttttttatggctgcatagtattccgtggcatatatgcaccatgcctatcggggggaggagggcaaggggagggagagcattaagacaagtacctaatgcgtgcgaggcttaaaatctagatgatgggctgataggtgcagcaaaycacaatggcgcctgaataactgtgaaacaaacctgcacgttcagcacatgtatcccagaacttaaagtaagctaaaataaaaataaaagatggcatgctttatgcagtggtcacaggaggaacagacatactaggaatgatctgatgtcatccatccctagtattaggaaaacagctcaaagtgcatgtcttcataaagcgatcaagcacttacatatttaaagcccaatacgcgtgggctcttctgatatgaagggtaatactatagataaatatacaacaatgtagcctttaaagggtatgtacaaggttttktgtgtgtgtgtgtgtgtgtgtgtgtgtttctagtaatctcataccttaactgtaacctcccaagcagattgtgttagcattgcttttttatagattttcatttgacattgaagagctagttaattgcttttgtggtgtcttagattgccatgcttagtatttctttgctcagtatattctttcttgttaagaaaactttgtaagtttcagtaagccctgaggagttcacaagccaactttctagtagagctctgggcataatttttcatgttgctttaataaaatgttatctttttgccatagattatggtcaagtgaartgtacagtgtgctgttacctgaaactactttttacctcactcattctaagttttacctcagcagctaatcttgccatagacttactcaacttagatatttttttaatttgtaatttgacagtggtcaattgccacatgataaaataatgtatttacaaaataagaaatgcaaattttttaagtttcttggcgggatttgtccagaatgcctttgatggaatttggtctattagtatagctttggacctcagattaggagtgagacttcaaagtccaatttctgcctcttctcattgatacgtagataactctccatgctacagtcactatcacccaatagaggaactgaagggctgaaaagccctaaaatgttttgaaatatcatagttgtatagttgctttccctctagcctgttccatgaaaatattgcaaaagcagtgatcttgtcttggcgatcaaacaacatgattaatgctaacgttagagaggagatgcaatgtcatgcatctaggctccagcagatcaagttagtaaacatctaggatgatacyaaggctggcaataatttaaaatctacattgctacattcccttcctcctcacccatcagttcccttgaactacattctttttttttatgtttgccatgttattttaatttattagagtctggttccacagaggagaacttagccttacatgttagaagcctggattgtctatccaggcccttttctggacttagcaaagtttaagaatggatatartgctgaaaggtcataagtgtagacactacacactacagcaagatgttggctctctaccctataaggtgaatgaccttctgagttagtgatgcctcaccaattcccatgttccctaagtccagagagcctctttcttccaaaggactctttgaaaaagagaaggatgttcatacagaaaagcaaaacatatcagaaattgaataaagattgatggaattattttgtaagtatatggttgctacagcaaccattaagcttaagacctaacctggacaaatcacttgctaaagaataataataattgcttatgtttcttgcttatattaagttttatatgttgttattctaagtgttttgcctacattaattcatttaaccccatgatatagatactattaccctcactttacaaaataaaataataaggcagagaaaatttaaataattagctcttggtcacataaagtaaatgttggagccaggacttaaagccaaacttygaggctctagagagctaagaaaacttttgaatgagatcaccaaattattgttggttgggaatctttgagaaattgtgaggacatggggatacaatagaagtttagagataaacagatgtagttttttgtttttgttcagcttttttttgaagaaaatgtctaagtggtgctaaatattttaataaatcgttttggaaatatatagaaggtagctttatcaaattttccaaaaagaccttcttagggcttttagttggccataagctatatatgagttgaagtggaatacagcacactaccacttccacctcccagaatttagggaggtgtaaagcgtcatggcatctagaaaaagggaattgatcattctctctagactggtcagccccttctgtagtatttattctgttttgtcctgagttctacatttcaagggaaatagagaaaaattggaatgttttggtaggtaaattttgagaattataatttaattcaatcattagaagaatgggtgaagaactgtggacattccgcatagaaaagggaagacttcaaggaagccaaaataggtatcttcaatacttgtagtactgactcatgtgtgaaggattacaaagttaggtaaaattagagccaatgattagaagttaatgaaggcagatgttggcttgatgtaagatggtcaaatctttcggagatggaacaggctgccttgaaaggtattgagtttcctttcgccagcatttgtgtaagtgtgcrgccagaatgtggacagccacttgaaggtgcacagaagatggaggcacagaccagatggttgggccacatgacagtgaaggcctcttccaactctgaggttctgtttctgtaggttggtgcaaaagtaattatggtttttgacattgaaagtaatacttttgcaccaacctaaatattattatatgaattgattcaagataagccactgcacttctatgtgtaatcaaatatagaaattgtctatcatgtcttggacttctaatgctgccaacactagtgttaaccaagctagtaaaaacaagatgaacagcaaaataataygtcatttcagaaaaatctgtrggcatctaatgaaatgattggtgttttatccttacctttcagtgctttctcctgctcaagacagccacacgaacacggatctycccccagtgtcagagcagatcatgcagactctcagtgaacttgccaaatcgttccaggatatggctgaccgctgcttgcttgtcttacatctggaagtgaggtatgatacagccaagcccaggaccttgcaatttgaatgcactgcggttcataaatcacttgcttatttccaggcagtatcaccataatttctggctcatattattgatgttatccctttttacactgaaagtgatttttagctgtattcagtgattatttgagcgcacagtgtattgtgagtgtggtgattcagagctggcatgatctatgaaatcaggtcacctagattggaatgtcactatcaactggctaggtgatcttaggtcagttaattaactttacaaaccacagtttccttattttaaaaatggaaatgatagtttctaacttatagagattttataaatgaaataataattagcacaatgtcagccacaaagtaagtgctcaaaatatggtagctttgctattgtggtgactttattgtgattgatatttttactaaagtgctctgctagtcaagaagggagtcacatttgaaaaagtagagggaaacaggtaaaagaattatactaatatattttagttaacccagtatatccaaaacagcatttcaataggcaatcaatggaagtgattgaggtattcagcattttcttttgcactaagcttttgaaatctgcacattttgtacttacagcacatcacaatttggactggccacattttaagtgcttggtagctacatgtgcccagtactagcatagtgggcagttgccaagagtggctggggctgactaggaatgggattcttttctttaagataaaatggtcagaagaaatgtgacaaagtaacaagaatgatcagtctgtacaaagacctagaggaagagagtttcagacagaaggaggcacactcacaaaggtcctgagacaaaatcaagcttggcggttttaagagcagagaggaggctgatatgyttgtaggctgatgaacaagctgggtggggaggactgaaagaataaggcacaggagacaggctggagcccaatcctgtggagtcatgaagcctgacacattacagggtcttacagaccaagtgaatcattcagatgtcatagaagccatggaagagttttaagaaagggagagatatcaattaattaacattttttaaaggtcactctggctgttgtatggaaaagggattgcagggaaaaatacaaatggaagcagggtgaccagttgaaaacaactctgagcatcaaggtgatagaggtagagatatgagaagcataggatttgggacatatgctgaaggtagagctaatgaagtttgttgacagattgtattggacacaggggctggtgcaataagaggaaagactcaaggaaaaccactagtttggggccagagcaactgtgtgccattaactgaggggagaaacactgagggaggagaagggtggaaatcaagtatgccattgagagatgttcagtttgggatgcttattaaacaactaggtagcaatgtcaaaacatcaggatcagaaagtgcatggtgtggtaatacattctattctgtattgctttggaacatgattaacattgatagaatatttttcttttcatttgaagtctttactagatttagattttaaaaatgtaaataggactttgtttgataggtgacccttgggaatatgtttggactccagttagaacttggatttctttccagggtgactccttgtgtgtgctacttgctttttatccttcattaccattgcccagtgagttacttccttattgcttgtgagagccttgtgagtggaacaagagaagtaacattgcagatttagaatctgtgttacgtggcattattcctgatgttatttctcacattaagctgtccagaaataaagctctttctgtatattttctgatttgttttacaataattttcatatttggtatctctttatttacaagcggacagagaaatcaggtgttttctatgaacaaatatttgcaatagatggaaggaaatgaaaaataccaagtaatattctaatgccgctgttacctgagttacaaaggaaaacaagggaataccaaattagttactatcacaattcctggaatttatactattgatcgtgtgcttatacatattctacattcagaattgtttacttatgtgtagttaattccaagtgggatatttgcaacacatttgaataagatcttttaaatccttaacccctattctgcccttttgatacatcttggcaatactcttcttaatactgaacatgctttagtcattaatttacaagaaactatacagtgctatagcactggttgccatatcttcttcaacattagtctaaaaacagaaaaatgtcatttttaagaatgaatatcaaaaaagactgaattttagagccctggatgtagaattatctttccttgaatttaactcagaacacgaagcatgggatttttttaaattaaatttcctcacttcctcatgtaacatggttccaacactcaggttgctttctaatgagtatgctccattttgtctttgttccttttaaagtaaggtagatacaactagcagaatacaccacataaggctcggatagtgaatgtagaygcacttactctatcctggtcacgttaacaattttttttcagtttgcacagtgatgatacaaaatgaaaaagacagatttcatgccactctagtataataacgctagaatagaggtgtctgctaagtgctctgggggcgtgactgtggtagagaccatcgagcagctcttccaggtgtggcttgttcattgtgatggctggccctgaaacctaatatcctgctgtatataaggtgctcagtaaaaatgtgattaagaattagttggtttgaaaccaaacccagataaagtaagggctactttacaaaacaaaacctgttgtctttaaagaaaatgaattggtttgcagtttctgtttttacatagcagtccacttgtaagtccactgcattatcttaagaggtacagaggctgtgtggccaatatcattctcatcaactaatgtttgttttgttcccatcctgctgtaaaaaaagaattagaacgtaggcccggttgtccaggagctggtgtggtgaaaaastggctggttagctcctgtctctggcacttttagccaagaaaccactgtaatagtacagatagaagaaaacaattcatggaaaaaagtaatgggatatgctagcaaaaagtccagaacaacttcagatgccaaaaattggtcttgttcccccaaatatctttatatccatagcccatatttttctttgacattgttaaaattcaaaccaaaaactgttttccaatccagcgcagtctgtgttgaaggatccatctaaggagtgtttgacattttacctgtgtcattgtaggtcacattttaaccaccaagcagcccctttccacagtttgaagcataaagcaaatgatacccccaagagatgaaagacatggtgagcccattaaaaactattgaggtttgttttttctatttgaactttagaagaagaaaattaagttgccatttgagtccaagatgccaagaatgtcacctttatcagctgatttttctcaccatcaggagggctctaagtaggttcaacagcaactgcctatcactgttgggatcctaagtgtgcactctctgaaaatcatccaccccactgtgtaatcagcagtgtttgcagaatacgttaatgtcaaagtcatagtaaggtcagcaacaacaggccagaatttaaatttaaaaaaatactttatttgaatttggcattcgctgatgactattttaatttcttttttttttaatctctaatcacttgggaagaagataataccttaaagaaaggttatatgtcttctcccccagtagcttgaaggtctcataagctctcacctccagttcataagaatttcctaactagtcactctacttccagttgcttccattctctgctattaatccacttgtatactgtgccagagtgatcttgccaaagctcaggtctgattatattattcacttaaaatccccctaaggatccctatggcttctaggataaaggcttgattccctacatggccttcagagcctgtgctgacctggcctgtgcccatctccccaagctcgtggagtgcctgtaatgtgggatctgtgtgcagcagaaaagaactgctcaccagtcctcagaacatcctgcatttatagtctcatgctattttacatggtcttctcattgcctggagtcataatgtctgtcatttactttaaaaatactttagcatagatgctttaattttattttcaacaaagtgctacttcatttaaatttcaaccacagtagcaatcagtgtgctagtcatgaatcccattccagagttggtcaactttcattctgtcagaaagctcacattccagaggaggctacaaccagtgccattactggtattcttatcaaaattatacatttgtgccaattagtacttgaatatcagaatgagtttttattggtgaaattagtcattagttaattagcaactgttaagatgagcatctatcagtaaaaatgagcagtagtcaagatacttggattctcttggatgaactgcttataagaatatgacacatcccatataaaacttagcttaaaatggatcattcaactaaatgtaaaatctaaaactctaaaacttctagaagaaaacataggaaaaaatttttatgatcttttttaggcaaagacttctgaaatgtgacactaaaaataccatccaaaaataaaaaagttataaattgaacttcatcaaaattaaaaccatttttgatagacattgtcaaggttaaaatacaagccaaagaccaggagaaaatatctgcaaagtccatatctgataaaggacttgtatccagaatatataatgaactctcaaaacttaataataagaaaacaaaaamcccaatttttaaaactgggcaaatgatttgaacagatatttcatcaaagatatacacgcagaaaataagcacatgagaatatgctcaacatcattagtcattaggaaaatgcaaattaaaaccacagtgagatactgctctacatctattaggatgaccaaaaatttttatttaaaackgacaacaccaagtactgatgaggatgtggaacaactggaacttttgtatactkccagtaagtaagcaaaatggtacagctcctttggaaagcaatttggtaatttcttacaaaagtaaacatacacttaccataagtgagatctagcaatctcacttccaggtatttatccaagagaaataaatgcaaagttatatgcacacaaaaatgtgtacatgaagtagctttatccacaaccacctaaacctggaaagaatctaaatatcaatgggcgaatagataatctgtgggacatccaattcagtggaaggctacccagcaataaaaagtaatgaacaacatgggtgaatatcaaatgctttgtgctaagtgaaaaagccaaactcaaaaggctacatactgtatgattccatttatatggcatcctggaaaagacaactgtaggggcagaaaaatagatsagtggttgccaaaggtttgggagttgagtagggattgactgcagagggacacagggaattttggaggagatgtttgtgttctgtaatttggttctggtggtggttatatgattgtacatgtttgttaaaactaatagaactgtacactaaaaggggggagttatactgtttgtaaattatttctcaataaacctgactaaagaaagatgacaggcaaagcgtggtcgcatcattagagataataatgcccaaggcttttgcagccattcatttgggaatatttcttattacttgatgccaactgtaaaggtaacagaacatagaccctggattatgtcatcatttcttacctccggtgaaccttccatgcaaggtcagacagagcacctaaaacaacagagttaggactagactgggcttatggaacagcctgtttgaactctgcctgccaagggatactattggtttgggatttttttttttttctgctacggtgggggattcaaaacaaatacctgcatgtagggcagaatttggactgaaacactttgattacaactttaaaaggctgtggcagtgcagccaatccatacccacctcagacttcctcagcagctactaatatctgccaaaaagcacctgagaattgtgtgtgaccagactgacacaggccattttcacacagaaatgccctccttcctcaagctgtcagatatgttctgtgagactcaagcatcaccttctgtcaggaccctttcctgataccccgtggcacatttccatggcacgtggatggatgtgcttagagtgagatgctgttctcttttagtcatttttttcttaatctaccccactaggttatgggtctttagggatacaaactgtcttatatttccagggcctagcacaatttcttacaaattcatagaggttccatacatgatttagttaactaataaattattgttaataaatataagactagtgatgacagccagtacttactatgcacgccatttgtgccagacactgctatacttaacactttayatgtagtagttactcrcagcaccttatgagacaggtgttgttttcacccatatttcgtggataaggaactgagggatagagagataaagtaacttgcctaaagtcatacagctggtgattgaagccaaagtagtctccttacacttttaagatctataaactcggcctctcatcttcattgcaacaatatctgttgaaaattacaatgcttttcacagtatgcctacaaccctggcattgaagagaattttagaactccttcccaacactgtatagattaaacaagcaatgatcatagcagccagcttgccccagatcactcagttgttctatagaataactaagatggctttctggttaaaagaggggagggtgtttacattaaaatgtacaaggccacagctgcttcatattaagtgtagagcatagtgtctggcacaaatagggtacacagtaagtgttggctatcatggctagtcttacatttattaatgataatttattagttattttggtgctctgtcccaagatcattgccctccctggaaggatttattattaactgctctccctatctctctctttttcagggttcactgtttccactatcttatccctcttgcaaaggaggggaactatgccattgtggctaatgtggaaagtatggattatgaccccctggtggtcaagctcaacaaagatatcagcgccattgaagaggccatgagcgccagccttcagcagcacaagttccagtatatcttcgaaggtcagaccctgcttctgtctctgggagtttgggaggaagaaaggatgaaagttttcctgattttctgtattactgaagttcaagacttgtagaaaagagttgtttgcttgcttgcttgtttgaactaaatctgcaatacctagcctctttgtgtatgactaggtagacaacaatatggccgccatctgctccgggttgataaggagatttaatccaagataaggcagatggctgcctccctgacatgccattcatgagatttgagagaatgtgcagactgggccacaaattaactcaagaggagcttataaaagaaaaagaaaacacacatacacaatgaggagagaatcctgaaagatcactcattggctaaaattatcactggaacgggaagttttctcacagaatgttataatcatctggaaagaacagaagcctctgattagaggcaatttttaggaaggacgtgtccataaatgcctccaaggggcaggcaaggaagggtgtgagagacaggaagtgccatctaaagacrttacccttcacaatttggaaaaaatgtgatggcacccaaataatttttcatggtgaatttcacccagaggatccctgttaggactccacattatgttccctttgtccatgttttggtttgtttgtatgaaaacttgtatctgtgttctctcacagaattaaactagtattatttaaaacaactaagaaggtacattgtccaaaggattgtggcaaactgacaatacatggccaatgtttgctttatgaaagttatattccagcaaatttgggccccccaaaatccaatccttaaatgtatatggagttataaagagatgtgttctgttggggtatatctctcaaagactttagccaaaaagtgtaagtgattgaagggttagctggcagttaaccccatggcactrtgagtttggtggcatctgtaatattctgcagctttcagctgcagtgcctacctgagaattcacttttctgttattacaccgagtttcctctgtgctcttgactgtggctcttcccagcccctgcatatcaacatttgttttattcctattacaaaatgcatttaatatatttattataatatattattatttcttattctctacaaacagcataccccttcattgcccagtcttgcagaccacgttatattgtggcagcaaaaacaaacaaacaaacaaacaaacaaaaactgtacctaaagttacagacttgagagaatgacaccaaaacttggcctacagagatttttcatataaataagttgtctagttttaaatgtagaatctgcagttgtgtttttctttgaataaaaacttttcttcatattcaaatagtaacacatacaagtttgtggtcttgaagcaatgttgtttgagtgtagctgaagcaagacctgaatgcatctcctccctcatttctactttcaccttaatcaagggaaaactcattttgaagacatggggagccatggacctaaagataagccccgcactctgatctaaacctcagagtctcggggaagggactagacttcagaacaggaaaacaaccaatagcaaatggcttgcaactagtcagaccagtttacagttccaaggaaaatgtcctgctagcatccaagaataagaaagaaggaagaaacgtttactgaattccatttagaattaaaatccagcttttaaaaatagtaacccatatgtgcctcacgttgttctgaaccagtgtctctcaacttaattacatgggatatcctgaggaggacttattagtttgctgatgtcctgagctgccctttgctaaattttgcagaccataagacaaccctccagacctaagagcaaactacttgtgggggggccccaaaatgtccacaggtgtctcacgggaagtcaacagttaatgtatgatctgcttttccttcacccttttttctaattgtgtcttatacacccattgccattgttaaggtatattagcattattgccaataacccaatttcttattgatttattttttacttggcaatgttgaaatatattaacattattgccaatgcccagtgtcatattgattttatttatgtagcttcccaatcaacttttgagcccaaagtgtccttctctactttgtaggaggaaggagaggcaaaagggtcattgtatatgcctgtggtcttctctgcttcccaattgtgtataaagaaaagcgggatttcctgtgtacttcaacagtttataataacctggcctcttctctaaggccttggcatggtggcagtaggtgtacatggcaatgctggagatgtggctattaccaggctttgccaccaacatgaagtccactcatttgtaactactaggacaatgtagaaataccctaaaattattgtcagatcagcagatgcaaccatcagaggtagattttctttggtcrtttaaatgtatagaggattagaagacagcaattctgtgtgcaagtttctgcaggaatgcctctaatctgtcatccgttttctttgccccgcactgtgctgacccctcaggcctgggccacctgatctcctgcatcctcattaatggtgcccagtacttcaggcgcatcagtgagtctggcatcaagaaaatgtgtaggaacatttttgttcttcagcagaatttgaccaacatcaccatgtcgcgggaggcagacctggactttgcaaggtaggagggaaaactgggtttagtttcttatgccaaagctaagacctcgttgcctgtgaagtcatttttaaaaatagaytcttggtgcagaaaaagcttagtttaaaaaaagaaagaagcacagatagatgtttttaggtcctatagagaaaataattccacagaattctattgaattttgttactttggcagatagtttttcctgatgtctaacccaagttcttcttaactacaatacttgaataactctttttttctgcatgtaaaagtatacatgctcattgcataaaatatataagataagatacaaagaagaatataaacctttgatctagaggctaagatatttggtatattttctcctggcttttttgcatgtgctgtgttgtttatgtgacttttcacacatattcaagcatgtgattgccctttttccaaaactggaactgtgttaatgcaattttatattaatttaattttgttttcccctatcaataacgttgtttgaaaacataatttttccacgttcgttaatactccttgaaaacgttacttttaatgatgcctgaataaatatttcatggtataaatgagccatatttattttttcatcacttgcaaatttttgaacatttgaatttttccctttttttctctcattgtgaataacatgtatctactgtatttttacaggaacctacttctcatttcttccatcttgttccaattgaaacccatctcttcttgttctcactgggaggaaagtgagaactcatcactatcctttctcttctctaagttttctgatcttaatttttttttaagtgacagggtattgctctgttacctaggctggagtgcagtggtgtgaacatggctcactatagccttgaattcctaggctcaagggatcctccgaggagctgggactaaaggcgaacaccaccatgcctggctaatttttatatttttttatagagacagggtctcactatgttgcctaggctggtcttgaactcctggcctcacgcaatcctccttcctcagcctccaaaagcactggaattataggcataagtcactgcacctggccttgatctcaatttttaatgtttttgtacaatacagtttttcaagatttgagagttaatttttttctctcttcatttgtcttaaccccatctaaaccttaattagaatatcaaacctttggtgctttaataaaagcttaagcaatttgaagatgatagatgataaatatgttatcttcatgctctattgccgtttatacctgagtggattattcygtaaactcccttattttccaaagcctttatggctaggaagtcctttgtttttaataatgcccaatgtttctgcctgagatttagtatttctgtrgtcttttcacttgatttttttgattctttgagaagtgcaggaaaatttgaaacaatttatggagatgatgaaatattatattacttcaacaattgtaaagacaatatgctgtgatctttgttttgggtatgaaccatatatgttcatttttaacctttcttcctcaatctgttactccatttgttccattgctaccctgttcctctgcttttctgtccttctccttccctgtctctttctttctatttgtgggaaagtgagagagagagagaaagtgaatgagtgagtgtgtgtgttttcattaaattccctgttttaggctaaatttgatggaaagccttccttgctcagattagggaaaccaggtgtgactgaatgctgcatttatttggtcgctcttatggggaatgatctcattattgaattagtctagtcataataacattgacaaggagaagttaagaacatagaagcctgagggatacaaaaacccattactaatgctctaaggaatataattcctaaattcaatcatcctattttaaatgattttttttatttagctgaaataagtaaattaacacagtttttggcagacagtctggggcctgaaaaacctggcatctgaataatgcaatgctgactgggcaggattgaagttggcatcagcaggtcatgtgccgatgaagcatttcttcaggaactgagtcccaaccacgccttgcctttcacagtcggattggtgaattgtgtcccaggaagtaggtacaagtggcatgtgaccacttgggacatgtattgctactattattctttattctgacatggatttttgacaggaaataggctagcataaagatacagcactggatgaatctgttcttctgattctgctttagaagacatctccttactaagactaagctccaagaggccgagactcttttctcagtgcctctaccaaagtaagtgttaattgtatgtactgaatgaatgaaaagatatcaaatcaaggctaattttggtgtggatgaagaccttggatattgacaggtcagtttatgtttaattgcctgaaagtttaaagtagccggcatgggtcagttttcttataagcttgtaagaaaaagcgtatcttccttgcagttcgttctttgtaaaacagaaaccatattgtagccctactactcatagtctctttccctctcattttttcttgttttcatacagacacactttatagccttatttttcccccgcttcttgtttttggtagggacaggttttgtgaaaggggctccatcaattctaccatatttgaagctatgtaaaatacataaaacagcaataccaaaatagccagaaataatagactgcagcagtgtacctcagcattccttaagcaatgtttaatcaagcatggacagcatctgtatttccagcaaatctctataggaatgttatcttctaacacagtaattaatcactagttgccgtgtgtcagaaaacttatttaacaagaagttgcaaagtgcttgtagttttcttaccttctcagccttcctggccagtggaaaatataacayctttctgtaataaagaaatgaaggatctggagggattccattgatgttgattcttctactcatagtattgttatcttgtctctctcttttcatgcacaccttccctctaactaatctctaaatgagggtagatcttgggtgagcaarggaaccagacaacttgtaacattwccagaagtacagagagcctctgtcctctatggtaatgatcatttaagctctcttacggttttaacccccctgttaattttcagagtcaaaaagatactttatccaggaaaatcagtgtagatgagttagaaggtggaagggctttatgagtgtgcttttttagttcctttcatcacagatcatcttaacttgagctgtcatgcacctttccacatgtgagtcacagaagccacctaggagtccagatggtggcagcataacaagagaggtctgaacgaacgatgattggagtccccaagatatatctgacaacctttctagcttgagtgacgccattgttcaaaaagaatatcccagagttttcttcccagttctcccctctttaccccattttgtttctttctctgcctcttcagctgtctcttttttctcctttatttctccaatagctctacttcctgctctcctccttcaaggtttcattgctcctcagtttttcccctgattttggttttttttggactggtatctttcattcttaaacctgcacaaggtaaggaaacaaaagctacgattcgggaagcggtagggcgaaaaattgtaacacccaagacagattcctcgcccggttattccttcatttcttcattccttcatcaaatatttattcagcgtatgttctctgtaggtcctggcctcatgaaacttgcattactgtggggcaagatgcaaagtaataaataagtaaaatatatataaagtatttcagwwgataatatatgctgtagttaaaaaaaaaaaaaaagagtaggcatggggaggggaccagagggtgccagagtctaatggaggtaatccgwaatttkagagtkttwatggaagtccttaatgagatggtaacatttgaggaaaaacctaaaggaagagtaggagcaagccatgcagctatctagggaaagagcgtaccaggaaagaacgtctaagggtgaagagccagagggaggcatacacttaacatctgaagaacagagcagaaaggccagcatggatgaagtgagtgagcaggggaagagtaagagatgaagtctgaggtttgatctaaggagctgagatctggaaagtcattgtaatgacactgagttttactttgcatgaggtaggaagctattagaaggtttggagcagaagagtgctacataatgtgaatcagtctggccgcgatgttgaaactaacatcacagttgttagttggggaggggaggttgtaggcaaaggcagaagcaggaagctctgttagaaaactgtggcaataatcttctaggtaaaaggtagtggtgattcaaagcaagatggtagcattggagaggatgagatatggtcagatgaggatatattttaaaagttgagctaacaggatttgctgaggaatcagaagtgaaccaaagactacaaagtttttgatctgaacaattcaaagcatgaagtttttatttactgtaatgaaagtgaaccagaccataggagaggctattgaagtgtgtggagggcggagagggggttcagatagagaggggataacaagaaatgtttgagatgcctgttaggcaccagaatagacataaaaagggagccggcaatacaacctggagttgagatgagagttttggagtcatcagcatayaggtgggatttaaagtcatgagaaaggctgagaggtgagatctcaataggagcacaagtagatgaaaaagagaagctgtccaagaattggaccttgggtaccccactgttgagacgctggagtgctagcgaagaaccagcagaggaagttgaggaggcagccaacagaataggaaggtagctaagaaagggtgttgtcccagaagtcaagggaagtgttttaagagaagtgtgtcttcatctgtgtcaaatgctgttgataggttaaattagctcaagacagagaactggctactggtgggcttgacaagaggcctgaaatgctttggtttgcattcctttatctttcatacacaacttacctaaagtaggaatacgcttcaaatgtatatatttgggaataagttcctcactcctcaagtctacggtagggtttgatgtcatcagggcaaaacaaaaatgcaattagagtatttttagtgtgctatatgaaaggccaaattggcagcctctcttttctcaaggtcagtatcaacatgcataaatcatgttgacagtatgtctatgtgcccttgacatgatgtgatgaaaatggcacgttaccaaaacctattacctcaatctaatcatgagaaagacatcagaaagattccaatagagatacattctgtgaaatacctgatcagtactcatccaaactgtcaaagccatcaaaaacaaggaaagtctgaaaaactatcacagccaacaggagcctaggagacatgatgactaaaatgtactttgacctcctggatggggtcctggaacaaaaataacattaggtaaaaaccaagaggccctgaatgaactatagattttagttaaaataatgtgttaatattggttcattcattgtaacaaatgtatcatactaatgtaagatgttaataatagggaaactgggtacaaattatatgtgaactctgtactatcttctcaatttttctgtgaatccaaaactattctaaaaataaagtctattaataaaagtattaggcaaagtatttcagagaacatttatccaatgaaaatatacaggtggctaattcatattaagcatgaaaaatgctcaaattcatttgttattagggaaatgcaaattaaaaccacaatgagacatcagtctgtgcccagcaggattgctgtaacaataaaaaaaaagaaaagacaatgaaaatgttggcaaggttatggagaaactagaaccctcatttgccgctggtagaaatgtaaaatggtgcagctgcatcatttcctcaaaaagttaaacatagagttatggtatgacctaggaatttcactcctaggtatatacacagataaatgaaaacatacatgcgtacaaaaatacgcacacaaatgttcatagcaagcattatgtataatagccaaaaagtataaacaggttgggcgcggtggctcacgcctgtaatcccagtactttgggaggccaaggcaggcagatcacgaggtcaggagatcgagaccatcctggctaacacgataaaaccctgtctctactaaaaatacaaaaaaattagccgggcatggtggcagatgcctgtagtcccaactactcgggagggtgaggcaggagaatgcttgaacctgggaggcagagcttgcagtcagccgagatcgtgccactgcactccagcctgggcgacagagcgagactccgtctcaaaaaaaaagtacaaacaaccagatatccatcaacgtatggatgaatagaacgtggtacattcatacaatggagtttatttggccacagaaagacatgatgtgctgaatcttgaaacattatgttaaatttaagaagctagtaacaaaaagctattttgtatgacactattcatatgaaatgtccaaaatagtcaaatttatagagatagattagtaggggtcgaaaggaaatggggaaatagatagaggagtctttggggggtgatgaaaatgcactaaactagattgtgctgatggttgtacagccctgtgactattctaaaagtccttgagttgtaccctctaagtctgaaaattatatggtatatgaattatatctcgatgaaggagtttaaaaaaaaaagaggttgagttttaagacttgaaaaattaaatcattcatcataggaaatgaggagccaaagttttatcctcccattagtggggaaacttttaaaaggaaatatttggctcattttttagtttccctaatccatcctgagaggtagaagataaaggaagaatttttggagaaggaggtgatacttcatattagtcttcataggaattatccagaatagggagaaagtcatttggaagagaaagggtagttccggggactggagaagatgttcaaggaaggaggtggtgaaagaagagacctgagtcatcatcaggcctgaagtcagggctggctttgggtaagccacaaatgccaccttattaaggccttctctcctgcactttcaaaacatgccttcctcccccaccagcactccctattgtccttaccatgattttaaaaagcgtatatctgacatatttcgtatttacttatttgttcctcacctgtctacactgaatagaatgtaagctccataagcagggactcttttttgttcactgctgtagccccaggacctaaaccagtacctggtatgtagtagacattcagtaaatacttgtggggtgttaaagttatttggactttgtcctgtacgtaactgaaggattttaagcagaggagtgagatggtcagatttatattctaagtayatcatttcagcagcagtataggacttggatttgaggaagataaaactggaggccttgccaatcaactggaaggtgattgctaagaaagtggtagggggctaggcacggtggctcacacctgtaatcccagcactttgggaggccgaggcaggtggatcacgaggtcaggagatcgagaccatcttggccaacatggtgaaatcccgtctctactaaaatacaaaaaattagccaggtgtggtggcacgtgcctgtaatcccagctacttgggaggctgaggcaggggaatcacttgaacctgggaagcggaggttggagtgagctgagatcacgccactgcactccagcctagagacagagcaagactccgtctcaaaaaaaaaaaaaaaagtgatgtgtagggcttcaacaatgtatcagtgcttggtggtggggggagtggggatggaggagacatatttgagaagtgtgaaggagctaaaattggcaggtcttggagagtgattgaatagtgagggtaaagtgaaggagtcaaggatgactctccaatttctaacatgagtgtctagccagatcacactacagtcaagtaagataaggatacaggaggagagaggagtaggtctgatggagggaagatcatcagtggttgtggtgagtataagatggatgtgggacttccaagtggagacatctaacatgcaactggatatgtaaactggaagcttgagggaaaggccgggagtgaacaaacagatatggggaatcatcagcatggagctatttaaaaccattaacggagatcaaggctgtaggtagatggagagtaatcccctggggaagacccaaaagggcatgagaaggaagaggagcccctgaagaagatagggaaggaatggtctcatagcacaaggacagaacacagctcatgaagaccaaagagagtgcatgatcacatagctgcctgcacagaaatgctactttcaccataaattgatagagcatccttcttcccaataaatggaagcattttctcacgttaacttctccaactcttttaattaaactgtccagatactttcctcaagtgacagagtgataaagccagcctagcaactaaacatacagattcagacccctgctttatccttgaccttgtaccttcactaaggccaggaatgatctctggcatagctgagaatgttgaattcctcccaggggagctgtttacataaatttatttcctacaaacctgttgcaccgggaacattacttttgttttctgcaggaaaggttgtgagttttcctatttggaatgaccaaagtgtagtttgatagaaggggattagcaatgacatgctgccacctactggaactgcccacagacagccagactgagaatgtctgtggtctcctaaatctcccctcactcttctgaatcaagagtgggtattgcccctgaagcggacttcaaaggtgacttggcttgaaaatgtgaaatgccccacctatcaaataaaaatttatctgactgctttgctagaagaacaattttgtttctgagaaagaagcacaatatttgtcacatccttttctctgtttgcgtttcccagctttattctgccattggtcttgtttgccttcccaattctaggggcacctatccttttcccaagatttgcctttaataccccagatttttgactcaagattattagccgtgtagatttgggattaattttgtagaagagactagtctgctgccaaaaaaattctttttttaatgatgatgccccttaaaatgctgttaaatctcttaaatttaatagtgataaaaagctarccctgattttcctaggggccagagtaaattgggaaatgcgatggtttacatggcttccactgccagatagaaagaaatataccagttgataaaattcagtaataaaaccaaatcttgtayggcctgatctgatggactttttaaagatctttatataaatagatttaaataatattacatctctccaattaaaccttcatttgaccttgctgtcccgtttctgaccatgccgcttttttctgatctccctttttttacatttacattaggtcccgtgcattgtaacaattaattgatctctaattaatcatttaattaggactccttgaatgcgggtgagcatgccttactggtctgcatatccttcacagagcacttcagagcaataaatacttctaagcctctcaaaaaaatctctcagtaactgacgtttgattccccataaacatatctcatgtgtgaggctttgattaagtaagatttcttttgattatgctcaattagtgtcaccatattttgtatatatatattgtcaatgtataatttagggttcctcgagattactggcagacagtgacactcttccctttgtagcacatgtgctggaattggaatgattcagagattagcatagatagcgagtattattattatccagtaaagatcccaaggaacagaaataagaagtgacttgtccagaatctgtcatcgaatcctgctgtttatatattctgcagtacctttgtattcatcatagttagttaattaacccacccagggaggctatttttctgccagggaagggttgcattgtactgaaaagatattaagcttgttctgtgactgaagcccaagaatgatcatttaccgactctattagaattctcactgaaaaatttgaggctggaagctgacctttcttgttttctaaataaagatgtagtgtttaaattttgatgcttgaaagtaggaaactggcacaatcgctgtcgtaaaagcagagctacagcccctgtaaaccacatcatgccagacttcccatcctgcccctccctttacctgctttatcatatacaggaagaaagcccttctcttcattcccacctcctgctttactgaacaccctttgctgatccaaacagaaaaagatcagagtactgaaggaaggtcacatggccacagtgaattctgtggccagcactccgctcaaggaccttttgttctctgaaaccttctccaatgtgcctggcccatatcacttgctctttttataatcctttttttttaattttctgtactctaaaattaatacctcattatgtgctatattgttcttcatttgttcccatcttttaatattttattcatctaatttttattaacatgttctctctctactgaattataaagttcttgtgactagttaccatgattgtattttgtttatttggtttctgggtggttttcccccttttacttctctgtaatagactacctgtcagcaatctgaagtatttatgaaaataatatgggttttaaaatatgtttgatatgtattactttcgatgtatgtttgtttttgttttttgtttgtttgtttttttgagactgactcttgctctgtcacccaggctgaagtgcagtggcctgatcttgcctcatgcaacctccgcctcccaggttcaagcgattctcctgcctcagcctcctgagtagctgggattaaaggcacgcgccactacacccggctaatttttgtatttttagtagagatggggtttcaccatgttagccaggatggtctcgatctcctgacctcaagtgatctgcctgcctcagcctcccaaagtgctgggattacaggcatgaggcacagcgcccagccacgatgtatgttttagagagcatctgtagctaaatacaaataggttaccaagaaatagtttttgtacctagctttacagacctttaactttaaactactttctctaaaacaaggaaagctcctgcaagacatgtgatttttttttacaaaccatcctagaggcctatattggtgactttctctcagtgatgatgatgatgatgatgatgatgatgatgatgacatattccaagtataatatgagtaattataattactgttatataatgatctcagcacatgacatgaackttagtaaatgctttacctacattggttcactgaatgtccctgaaactctmtatttagctattgctgcaaaaagatgagaaaactaaagcttaacgaagttaagtaaattcctagtttacataagaagagaggccagattcaaacttaggtcaatccaaccccaaagtctatgtatgctcttaactacgtgaagtaaggctaccattttggtcaatgttgggtctctcttttgcttatattaaaatatgattttatttttcagttattctcttagctatcaaacatttcttttttcctttattttctctggttgggtgtctttcccccttgatttccactgagctctgattgctaactgttttaatcagctttaatgggcagtttgacggcagaggggtctgcagactcttcctaccttggtggtgttatggggttggttttgctcagctgtcaggtgttcatgctgcttgtgggtcttctgctggccttccaaacaactgtccttggggagcaacacttagacccgagaccactctctcagaatctcaccacaaattagcacgtcatcaacagcactgagcagcaccatcattaatccaaatgcatacacctgtgcttttaagacaataagcagctaaaccaagtgcttcccaaagactagaaggtataagaatttccctatcagctacagggtctcttgcagggaaattgttttaagtggaaactctttgactccatccctaaaagttctgatttagaaggctgagggtagggcttgggcatctgcggcttaacaagtgctcaggagattatcatgcagaaataccggccctgacctcgttttctttgagattcatgcaatatccaggccatcgtctttcaacctcatgtttctcctttagtcccctttactcttatctcctactgcaggcagcaaaagtaaaaataacttgaaagcacttttctagattattttaaattattaaaatgacacacaaggtggtcaccattattactctcagttaacatgtgtagacattgaggcagagtcgggttgtattcttggaaatttgggagtaaactaaatagcatttcattcacctagtagttggctaataaatcaacctttaattgttgcatgaatttgagtaagtcacttcagctctcttggctgaagtttcctcatctataaaatgaagggtttgtgcctgaaatggcagcactttgggaggctgaggcaggtggatcacttgaggtcaggagtctgagaccagcctggccaacatggtaaaaccccgtctcttctaaaactacaaaaattagccaggcacggtggcaggtgcctgtagtcccagctacttgggaggctgaagcaggagaatggcgtgaacccaggaggcagagcttgcagtgagccgagattgcaccactgcactccagcctgggcgacagagcaagactgtctcaaaaaaaaaaaaaatatgaagggtttgattagaggatcaactatagggtctcttgcagattggacttgcctagagttccatgacataaagccagagagcggtttgagagatctagagccctgcctcaactcctagctctcaaaagagactatcacaggaaagctatctaaraggaaacaaattagctcccatccaattccataaagatactgtaaacatgtctgagatatgcagtatataacaggcattttaatatttgttgattggacaaactaatgcctgtgtgtatggatgaattaatgaggaaggaagtactgtaggcctgtttcttttcatagtcaagatcgtgcttaaagcatttgctcmccacacgtacaggagagtaaaacagatctagacgctggctactgcttttgcatgacctataaaggtcttataaggctytgaacagtaattcaaaatgtaaacgtgtaggtactcaaaaacataaatgtcacatctgctttagctcttcatctccattkctgtgctgtagttttccaattgatggaaaggttttattcagatcagccatttctctttttcctggaggcattcttaatctccgtgttctaacctttaacaatataggcttcagttgccgtgtratgatttccattgcctggaatctacatgtttaaattcttccaaagaattgtgcaccttctgtttttctcagttgcagatggagtcaaaccagaaaaaaaaaaaaaaaaaaaaaaaagtggagtaggagaggccagctcttgattgacttctttctcttgacacacacggtcaggggaaggaatggatcaattgcctcaacttttcagcaggcattaacactgcatctcattctccttcaggcagtctgtttcgcagagacactgattaaacattttggggtattggggacagagggagggagggagaggttggggatttttagtggctagagccttttattgacaacattaaaggcttcatgatatatttgaccagaaattaattacagcccagttccccatttctcccttaggtgacagtcttctgttgatgtgtgctgctgtgaaagtaataataggtttcaaatgtttgtgaaaaacataaagtaattacttgctgtggtaaatcagtcatttgaagcttcagcttttctctgttctatgtgtgtggcagtctgtttcttttgttaactttaattatacaacatatgagaatttgtatttttcagttttcagaagttttgcttttttcatttcttggtgcatagttctccagggatataggtattgaaatgataatgacacataaccagcatttgaacaagggaagcacatgtgtgtgaggaagctgattgctttagttaagtttcgtagctattggctatcagctatttgccagttttctaatgggtcttaaatatttactgtctgttgtacagaggggaagaattggctttcaggcattttaaggctccttccaccaatagcacttgtttacattatgggccctcaagccaaagagtctgtaatagctctttcccctttttcaaattaaaaaaaaaaatctgtttttttctattaaaagctgcagctccttgcctggggttcttgccttccagtaagatctgtaaagatctgcctggataataccaacctctatgttgactcacctggacaaagagagagaaatttccttttggcagctgttttaacagggagccttgcccagacagaatagtgaggcctgtatactggccagcatggcatattatcacacatcaatttccttctgtctgcactaaggctagctcactcctcaaaataggaattgttcacatgtattttcaactcaaataattcatgttaatcttgtttctctattttgtctaatctctcttgttcattcctgatcagtgaagtatccttagtctgcatttcaaaggtttgcttaatttcccataccaagctgcccctcttaaaacaatgttttccccattcgatgttaacctctttctttgaactattatttatatttagaaccaaatataagaacagtaagaactggttatcagtaattcctctgtatggaaaattgtgctaaactaggactctgtgcttttacattgcagtgataattgggattcatgatgtttgcccgagtctagaatatcccatccattaccaaagaagaatactwctacaattagtatagttagcattatatatattttgctgtattctgtctttgaaaaatcagtaactcaatatgatatatctgagaataagcaagaatatctgattaaaaatacccctcatgttcttttcatactgcatcgtagagtatttatagctctataattgtcatagcatttcatttcttccataagactaggtagtaatgacaaactgcttaaaataattttatattactttattatttttaatattaataactactatgaattgagtatttattttgtataacttatgtgatttacacacattgtcttatttaatccttatactaacctagtatgtttacgaattaactttttcattttgcaaatgggaaaactcaaactctgaaggattaagtaacccgggttctacactgtggtaaatgacaagaccatgattcaaagtcaggtctatctgcagtttagccattgcgctatacagcttatgacaatgtaatacattagtatttcaagaaaatgtaccacagcctcaatgttcttattgactgtattgcacagtattcctagtcaaaagaacttaaaggagggatggcagtgttttatcttcccagagaggaactgaaaggagatgttgtatagtcgacctgcagggtaaaacaaaagaagacccaagaagatgatgaaggaggattttagcacagtccctaaggcctgtctaggaatgaccacagtcattgatgggcccaacacaggcatgaagtggtgtaagacctcagagagacctggcatggcagcagtgttaggggtgcccaaatccaggaggaaggctggaccacaccttacagggagaatgagtccaccaagtacaaacctcaattcccacagtatcagtagagctcctacctagggtggtaccacagtgactgatgaaagtgtcttaaaatagctcttaaaaagttagtggccagatacggtggctcttgcctgtaatcccagcrctttgggaggccgaggcaggcrgatcacgaagtcaggagatcgagaccatcctggctaacgyggtgaaaccccgtctctactaaaaaatacaaaaaattagctgggtgtggtggcaggcgcctgtagtctcagctactcaggaggctgaggcaggagaatggtgtgaacccgggaggtggagcttccagtgagccgagatcgcgccactgcactctagcctgggttacagagtgagactccatctcaaaaaaaaaaaagaagctagtatgtttttaattaatttaaaatattcacaaaggaggagaaatcaagaagctctgtcttttgttatttcaatagaaaatccagtcattttaaaagaaaaagtagtgatatattattgacacttgtccatttttggctacccctcctctaaaatctatgtttaaggaattccccacaacctggtcttggagtgaaacaaagtgcatcttccatcataaacacacaaaagcccaagcttgcttactgtgtgggggacaacctcagcttcgcccatcagatgcatgcactctgaactctgatcggggagctaaggactccaagcacaagggtgacagagcaccacagaaggctccctcagcagcagtggtaacttctggttacctaaggtggcggcagtagtagtggcagtggtatggccaacatccacttctgctggcagcagagcaagacctggtgttctgtgtttagcagcagctgtggtggtatcttcacaaaactatctttgaagagtgattctggagagattttggccacaatcccagctgctgtctagctttgtttattyctgctccctttccaagtctcattctccagccttcctggctcatcttggagttgcccagtaccctttcaataattccttctctgcaactttgaaccctgattgttacatacatatatttatgtaaaatctagtaataattgttaatcttagcttttaattctggcagtccacagtgaagtttggagtcttacattattattattactattgaagtttcaacccacattgtatcacttatcttggtcaattatataacaaacttaactgtctatcaagagtttttattttttaaagaaaaagcaaaattgactggattgcatgccctgaagcaaggctacccagatctgggaaaagttagttattggatctacacatttgtttcccataaatcatcccaaagcgcagtacctaaaacaacaaccattatatgagttctcttagttgagcagattgactggggcccagctgtaaggttcttctctggactgccttgggttctctcctgtggctgcagtgggatggcagctagggctggagcatccggaatggcttgcctcatctgtctggtgatttggtggggacaactggaagcctggactcagctgggagatgggcatggctcagttcctctctctgtttctgtgtagtctcagagattccccctctccatgtagattttccatgtgatttcttcatcagggtaggcatacctcttacatggttacttggggctcccaaaagcatgaaagtagaagctatcaagcctttttaaggcctagacccaggacgagcatagtatcacttctgtcactttcttaaagcaagtcacagggctagcccagatttaatgtaggagaggactaaatagaggcatgaatgacgggaggcatgtttcattargagttatctttggaatttagtcaccactatacttaaacttcagcctccagttatgtgcacccaacgcagtgcctcatacagtagacattccatctatttgtcagaatgctttcagtgcaaggagcagaaacttaattcaaatgatttaagccaataaaggaaatttcttgaatcatgaagctaagactttcaagggctggttggctttaggcttgctttaaccaaggattcagaccgtatcagcaagatcgcttcttttcttcctccaactcctgcttctatttgcatctgcttgtctttataactacatagcctgtctccccacsatggcaaagtagtagcccagacttatactcatagctggaaatcttagggaaagggaaatctctcttccagaatccacggaaggactcttgatgggctctgtctatttctgagccaattcctgtggcccagaggaatgcagcattctgatttgacaatttcaaatcacccacctgcacctgtggtgaaaagttgctcagtgtaatctggatctagaagaacattttctagagaaaaggaaggtttggttaccaaaagaagagggatagatactagataaacaaaaacgagataatccctaagcccaatagcagtttgctgaatgaataaaatgtagcttataaatgagtggtgcagacactaccatactgagtttattaggtgtcaaagaagatagacatttaaaaacaatgctgttatggaaagatatttttatggaaagaggtagaagtgctgctggaacattattcaaagtgggttgaaatcgttagagaaaatgttgtagaagcagtttttgaactgtactttgaaaaaggtaagatttagaaggaaggaggattttataggcagagcaaacgttgctttcttaaaaaacaaatggtgttaataaaagagaaggttacagagtataattttaggatgtttctgatcctctgaaactatacatgtaagaaaatcaagagtttggttgttacagtatgttgaactatatagttacagatttagttggttccaaaaagattttttttaacctgtatatgacaaatgggtgttttagtgattaaggggggggattcacacaaaaataaaactatcaaggtgattgctatcaaggaaaagaaaactcctttaaaaatatatagtatattcatttttgttgtcctttgtcactttaacagtagatgctgaaattaccagaaataacagtaatctgtatttatagtcctcctgtgaatctgaaggtttccataaatgtaaattaatttggttctactctcatgaactgtggaggaaacagaagcgaaatattcccaactaccccatccgcacttctgtctgagaaagacagtgaaagaaggactgagaatatgaggaaaaaagcagcaaaaactgaattggctggctgggcaccgtggctcatgcctgtaaccccagcactttgggaggccgaggcgggcagatcgcaaggtcaggagatcaagaccatcctggccaacatggtggaaccctgtctctactgaaaatacaaaaattagctaggtgtggtggtgcatgcctggaatcccagctactcaggaggctgaggcacgagaatcgcttgaacccaggaggtggaggtcgcagtgagccgagatcacgccactgcactccagcctggcgacagagagagactccatctcaaaaaaaaaaaaaaaaaggaattggctgagctgactttgtagttctcatggggttagtgaaggagaaagaagcagagctcagagacgggatttgaatttggtaagaatagagtcctggttggctcagatcactagatcgtactgtcagaagctcagaaagtcttaattgagtaggaccttagagatggtatcttctagccccttcgtttatcaggctggagacttgctctgagagatggagtaactggccacaaatgatccagatagggctagaacccagatttctgaactcgtttttctgggctccctcctggagctctcaacaccccttacagactcatgtcaggagctctcagccttattcacattctccctgggaagagtgatgccctagggcaacgataggcaacccaggaagatgattactagaatcctctggaggaggagggtcattttgtggtgtgtttctgatacaatcctaagagtatcatgttaaccccattaaccataatatccaccttctctaatactagagtaacattgctgtggacacatctttacaaacaaaaattactatgtgatgataattatgacttctgttcacatactcaagtccttgttgctaagtaaatgcagaaagattattagttttattagcctttgatattgaaattgtcatgttctctcttagctatgaagacctgctctgcccacatcaacttggttattttttcgtaaggaaattaaagtagaaattataacacaattactatcaaaattctactaaactataagtcgaaacaaaatataagaaccgcaattatgtgagaataacatgtgggaaactgttcctgctgctgagatgcgtaaagtgaagtctttggaagaaggcatggagttactaggtagccgcagtgtggagggtggctggacttctctgtcgctagcaatgggcatggtgccattgccaatgcttggaagatgagtgtcttcacctaacttgttaagtgccaactagtcttctgcctccaatgaagatttctcctttgtgtgcacaggttcttctactgagccccaggagtttagggtcatcatgtgcccttaaagtgtggagtgataagagagaatctctatacctctgaccaatttggaggaaagcagagatttagtgttggggccacttacacgtaatcttctttttctcactttttcgctgagaggaatgtggtctaatctagacacctactggctgccttgaaagagcattctcagctatactggcagatctagcaaagagatgtgaaaggatcctcaggtggccccttcaggggtctttctgaggagtcaggaggaaccagccattgtgatgataagacacccacccaggtggttttctcttagtgtgataaaggaagctgaccctgtcgaggccaagatgttcacccagtgggttatccttcttatgcagagggatgacgtaccctcagtatccaaaacattctaatgtcttcattgtctgtttacattatgcctcctcctcactgtgggagttccaagaagttttgcgtctttccctataacttttataacttttgccaccaccctgactgatctcctacaacatacaacatgggtaaacctcaaaaacattgtgctaaatgaaagaagccagtcaaaagaaaccacgcactttataatttcattcatatgaaggtccagaatagggaaatctatagaaacagaagtagattagtgttcactttagggctggatggagaatagcggggaaggggatgagcactaaaggatrtagggtttctttttggtggtctattgattgattgattgattgattgcttttattttatttattgcttcatgaatgacaaggttttactctgtcacccaggctggagtgcagtggtgtgatcacggctcactgcagcctccacctcctgggctcaagtgatcctcccacttcagcctcctgagtacctgggaccacaggcagacacaatcactctcagctaattttttaaaatttttgaagagacagggtctcaccatgttgccyaggctggtcttaaactcctattctcaagcagtcctccagtgtcagcctccmaaagggttgggattacaggcatgagccaccatgcctggctggtggcccttttaaagtagccttttcttaggctcttacatatctttggaaccatccactattgggagcttctctccactgctttctaaaatgagaatagccatgtacaagcatatgatttaaactgtttcaatatctggaacgtttcctaaagaagtcacttgcttgaggttataacagattggcaaggggtcagtcattccattcatacatcaaatatttattgaataaatgtgagagctagtcattcctggagctacaaagataaaaatatgattcctatttttacacagtatagcacagtagacctcagtaatgggagcagaactttgtgataagaattaagagagggaaagcattaaggtaagaaaggaggttaaaacctcgtaagatgccctcctaggtatatacccaagagaaatgaaaagcatgtgtccacacagagacttacatacaaatgtttatagcagtaggtagtattcataatagccaaaaggtagaaacaactcatatgtccatcaatgatgagtggataaacaaaatgtggtatatccatgcagcagaatattatgtggccatagtggacttgaagtactgatacgtgctacatgctgccaagtctgtcctgcagactctgrccaagcgacagatggaagaagttcactggcacaggtattttgcctaacaatgcggctagaggaccccacagcttagcaccgctgatgagagtgcagtgcagccacagcagcccccataaggtggagacacttgcatttatttcgtacagatttaatgacaaaggcttggagcaaatacactttgtgggtaataaaccttgttgacccgcaccccccctctgcccccccagctcacccccccgccccgagtagagagcagtcctgcacacgactgatcaaaggttggtttctggagagagtaaacaaatttatctagataagtctctttacagtcctttgttatcgaccctttgctgtcaggctcccaataagagaatttggctgccttcagccaaattttcttttgaagcttttgcaaaacctcctggccttccaagaagttttgcatctttccctataacttttataacttttgccaccaccctgactgatctcctacaacatacaacacgggtaaacctcaaaaacattgtgctaaatgagagaagccagtcaaaagaaaccacacactttacaatttcattcatatgaaggaccagaatagggcaatctatagagacagaagtagattagtgttcactttagggcttgatggagaatagcggggaaggggataacagctaaaggatacagggtttctttttgaggtgaagaaatgttctgaaattcattatggtcctggttgtatatatctgtaaatagattaaaagccattgaattttacactttaaattggtgatttgtatggtatgtgaattatatctcaataaagctgttttttgaagaagaaaataagagcaaaaactgagagcagtggtagggaatagcagagagtttttggttttgttttgtttttgttctctctgtttctctaaaaggggaaacatttttatgggttatggaaagacagacgcaaggtttataaccctgcctggaagtaaggaaatggttttggtagtcttggtgattttagtgtcattactatcatcactgttgttattaagagttgattgtggagctaactaggactaaggagcttccaggtagaggaggagtagattacacttgggagggtagagacaagtattactagttcagaatctgacacctccatccagctggaagaagacttgcttatgctagaaaaggaactatgctgccataagctactgaagaaatagcaattccaaagttagaatggatgcatccaaagaagagaaggaaacttctatgcaagtgaatctaagactccattataaacccatgaagttaagaagagctaaagaagcatacagaattattttgtttgcaacaaagttttttttgtaagttttcatttgttgctgaatctctctcagttgtggttattttaataagcagtgagtttgtaaagtcctggtttaaaatactaaatgtctgatctccytattaaccccaagcatctgagattrtaaatcatgactctttgttgccacctgatgacaacaaagagtacagcccttctggaaatactagcctttctagaaacaaattaatttcttgaaagctgaaattagcaatcagtgattcagagatgttgacaaaggctttttataagttccttgaccttgatatgagaaagaggcctcttgtcataggcatcttaacgcatactgaagttttttcttataactacattacctagaaagcaacatcctccatattgaaagtgattttcaatatattacactaaagcattcagtgtgtattgccctaagtctgtcaacagtttctcctgcagttgtcgctgatgtcactgtccagtggctgcttctctcatgtctgaacagctgcaagcctgttcttactgttgctgctgtcatcaccatcacacacaaactgttgcccctgccaccatcttcctgctgctaatgggactgattggcacctctccacaccacatcaaggtgcaggagctatttcccctgccaggctcagagccatctgacacctcttactgccaccattcattatcaccctcacagcagtgaagccaacaggaactagctcagtcctgagctggggggcctcactggtgaagggagtgcggtggccacctttctgcctgcagaagcagctgggcctctcagactggacctggggactcaaaaaattctgtacttttaggggtcagcacattagagccccagcatgtctcttctgtactggttactggagatgaaagcaattagaaaattattctgtttaggagagtggacagcaccaacagcttcctcctcaccatgtgcctgcataggtaacaaataagcaatattctgccccttcctgaccactgggcaaagattaatgccatgcattgaaagttatttttaaatgtcctcaattagctataatatttttaacaaagcttgtaaggtttaggtaatgtgtagggtataagatggcagactcattactgtactttcacagagaaacaaaaaggaataaatccacaactgagaaagaataggaggatttaccaataaataaatgacagcaactttctggatgataggaagaagatggaacattgttaatggataaagtagttggggaaaaggaaaccctcagtctggaatgtgcaacgaggacctyggagaagttccatgttcataatcagcagttcaaaaaaaaaatgtcagagtgccaagagaaaccgaaaatagagactaatgaaaattttctagacataaaaatatatatcctacaggactattttcttcacccctccaaaatgttggtatccagaagttgttcttgaaagagccatcctaggaaatatttagggaaagtcaagacttctggtgtggatgtcagaggaccagaataaaacattcattttagcactggagggagaggtcccagcctgacagttggcatcccacctgctcatcctaaagagaaacccacctgttagcaccttctgcaccaccccacataacactcccaggaactccctccctctaagaacctttttagaaacatgatcttgcctatacttagaggcccaagatccaattggagtccgaggaaaagagaacagagaatgaaggggaggggaaattactgaagaactagtaaaaatgcttttctagaactcaggaagggcccaagtcttcatattaagagcctgttgggtgcccagttcagtgaatgaagaaatagcctcacctaaaacacagcctcatgaattttcagaatgccaaaagtaaacttataaaagctccagagagaggggcataaaaaaaagtcagctggtatcagacttatgatcaatagcactaagtgctaagaaataatgaagcattctttctcagctccaaggtagaatgatttcaacctagaattagacatccaaacagtgtatcggccaattttgagggtgsaataagggcatcttcagatttataaagacttggaaagttgacttttcatgctcttctttctagggaactttttgagaatgcatttaagcaaagcgagtaaataaaccacaaaaatcagaaaacgtcgtgtctaaaaragacttgatccagctcagaacagtgaaaaggtaaccatgaagcaggcttagagaggaaccagtccaaattgggataatgagatacagctgttctggagaaagttctctgggtgggaaaagactcaagaaaataggtagtatgatggagaggttgaaaaagaacctaagatgtgaaaaactcaagtagtacaagagaaaggaaaggcaattggaaatttttaggaaaaaaagcaactatacaggaaatgtgtggcctgcatgcaaagtgaacttctagaagcacccyctttgagaggcctcaaggctgtgatatagttaggctttgtgtccccacccaaatctcatcttgaattgtaatccccataatctgtacrtgtcaagggagagaccaggtggaggtaattgaatcacgggggcagtttcccccatgtttttctcgtgatagtgagttctcatgaaatctgatggttttataaggagctcttcccccttcgatcagcacttctccttcctgcagctttgtgaacagggtgccttgcttacccttcactttctgccatgattgtaagtttcctgaggcctccccagacatgttgaactgtgagtcagtgaaacctgtttcctttataaattattcagccttggacagttccttatagcagtatgaaaacggactaatacaggttgtaagtgactgatagagaaggaaatataatccttagcatcactggccaagcactatttgtgtatatgtgatggcgtaaatgctttttattgtttttcgtgaatcatcatgcaaacaaagcatgaaagactccattgtgtttgcaggatagtatgtaaatgtttatcttcacccagcaaaagtaagaatgtagctgagagaaaatagaaggtgagagacagaaatatggtttggggkaaagaaggagataaaaaggktttttttcttttttcttttctttactttttttttttttttttgagacagagtctcactctgttggccaggctggagtgcagtggcatgatctgggctcactgcagcctccacctcctgggttcaagccattctcctgcctcagcctctggagtagctsggattacaggcatgcgccaccatgcctggctaattttgtatttttagtagagacagggtttctgtctgttggtcaggctggtcttgaactcctgacctcaggtgatccacctgtctcagcctcccaaagtgctgggattacaggcgtgagccactgcgcctggccaaaaagttttcttaaaagggtcattaayagtgtcatcgtaaaagtgggagtaggcaggagatttgttgaagtaaaaatagtggtttaggtagttaatttaaattacaaagaacagcattttcacacaaaaatgctaaaatataaccataaaatactagaagaaggagagcagtattacagatgagccatatctttgtcttccacatcaggagatttatcttttaggatacttttaactgcgtgtaacagaaaacactgacttaagtgactttaaactttttttttcaagttttctctcatctaatatgaagtcccaaggtagggtggcttgtgggtgggctaattcagtagcccattgatgtcatgaagaacccacgttcttgccatctctctgctcttccttccttaaggtgtgttggcttcatcctctgaagctactcctgtggtacagggttgcctgctgagtttccaggcatcacagagacacattggaagaagagtgtttccttctgggctttatcttcatcagcagggaaacatttcctagcagttcctcagctgacttcctcccatgtcctgttggccagaacttgatcacacattccccctaaactagtaactggcaacggaaatggagagctgctttcttacggccactcttcagcagatttgatttggtggaagtccctggaaatagcaatttgtatctcagcatgaacctaagacttaaacgtgacaactgttaatctcacctttcccttaattgataagtgttcmtaccagtagacctattacagacaagttgtctgtgctgcccctgtatgagtttaatgacaaacgtaattcagaaaaaaaggccacggtgactttctagtttccttgatcagtaattttcccttgagatatagaaagagagcatccttctctccagcttatgtatcataccaaaatcctcagagctgcccgggtgcaatggctcaagcctgtaatcccagcactttgggaggccaagatggatggatcatttgagctcaggagttcaagaccagcccagcaaatatgaggaaaccccatctctatcaaaaatacaaaaattatctgggtgtggtggtgcatgcctgttgtcccagctactcaggaggctgaggtgggaggatcccttgagcctgggaggttgaggctgcagtgagccatgttcatgccactgaactctagcctgggagagatagcaggaccctgtctcaaaagaaaaaaaagagagagaattctcagaactgctgaatgaattttttcttggattaaacagctttatataattcatagattctagaagtttcttcatctctgcaaatctatagattttacatttacatatgtagatattctgtagagacagaaggtttctgtgtcacttctcaaagtttccttgttttgcttggtgaggtggaaacagaatgcaaactagagcttgaatcccacattttactagtagctgcttagcccccagtagtttttaaccttttaatacttcggttaccttacctataaaatagagatgatttctttacactttagggtggttgtagataaaatgaaactrcaagtaaaatgcccagtacaaatagaagggggagattagtgattatttattcattcttattcttcctattgtaatgtgtaagaggattctagcacttagtttcccagtttttatatttttgatagtagcttcatgttattgaaaagtgagtcaaattagggggcaaggcagaggaatttaattctcattttaaacagcaatatagtaacaagaggagagatgaaaggcagcaaggataaagaccgaaggtacaagatatcagtggttttgacgaagttttctcaatcaaagactgcaagctgctcccacgttgcccagatccggatcctacagagctccattgaaggggatttcagtggaatggtttcctcacagaaggagaccagggtgactttatttcttcactgaaacactttgattataaaaagaaatcagatgatcaaaaagcatgagatgatgggtgaaatatgttatatgattataattcaataataattgaatttctctagcatttttcccttgtgggaggctcagagaagttcagatgtattatctgaattcgtttcggcatacattggtggagaggggccctgtgttaggctttccattcttcacaccctacccaggccatgagaccggagcaatgttcctgtagctttggtacccgtggctttataaacatgaacgtgaacattttaggcacaatttagaaggggattatccgcatccctcctcagggagagtccttgagtagaagtgtcatctttccagttccttctgaatccccttcgagcaattgctctaggttcaaacagttcatgaaacagaatgccacaatgaaactgaagacttcctatgagtttttacaagttcttatttcccagtgatgtcccaggagttcttgataaaaaggaccttttttctttctagtattccaattataagatagcgatcctcagcatcttgctactcaccaactcaggtgttctctgattctgatcccggggagttttttcaaaatgcctagaactgtgaataacaaggtgcaaacatagataacttatcttccactgtttacctttaaaaggtcaagacccagtgcaatctaggccccctatacctactatggaccactcagtagaacagacatcacatttcctgaggctagtctgagaagcatgggctaaggagtcgcagtatcgattgtataaggattagcatatctggcagatgggaactgtctgaactcattcaactgagaggcatctgcatcaggcggattggcattgctgaactttcacacggcaaattgaggattttaacatgcagcccaacttctcctgtggagatccagtgaacacataaaaaggtttcagtctttatgaattcctggatatattaggcattacagaataaaaatattttcccaagtgctgtattgatactctaggcacctatacttaacatttatgttcttcgggaaccactccatgtagtcagatattcagggattgttggactctcgtttcttttatatatcctttaattgccttagactgctgagcttcattatgtgggtcaattagtcttttttgagaaatcacttctaacacactaattttattctctattgcttccttctgattcctcatctctttcccagtctccaccctctaactcattctcatttttattttacttctcctgtttatttaccttatgttccttcgctatcctccacggccccatgccctcatcttcccagagagtgcttgaggcctagaccaagcagagcagccacaccacaggctgctcccagtctgtgtcacttaccattggcagtaactaggggctcttggagcatccctgagctatcagttggaaacaagctcttcctaggtcttgactaggtctaggtcaggatgctgagaatcaagatgaatggaagtttgcttacctagcagtctcaaagcactccaaatgcacatgtaaagagatacccatgtgtgtctacatggtaaatcccataacctgtgttcccacttctggagatcctgaggtttctgccttcattttccttgggggaacatggaaaggtccactcacctttactttgttcccctctcctgcttctgtgtatggtctgagttgacatcttgcttaatcagaaatagaaatgggtgaaagattgctatatgaggccataatgatcaatagatatagataatagataaatgtatatgtactcacgtaggtatggtatacacctacgtaaggagtataggagtataaaccatgtactcctaacttggagtgcatgataaagcttcagggagtgcataataaascttggagtgcatgataaagcttcagggagtccataaacccccaaaattatatgcaaaatctgtgtttatatagatgtgaattttttctggcaagatagtccatgattttaccaaattttgaaaaggtgctgtgagattctaaatccattctctttggctggctgtatttactttcttgttcttagaattctgaacaaaacattagggatcagaacaggcaatcacacatactaatgctgaaataaaatcatatttccaggtctgctagtgttgtctccttcaccactgccctccatcatagtcctccattcagagctgacctctacccccagctggtcatattgcttttccttgctgccccagtacaatgagcaaccatgggaatacagtctcaggatacccaggttttcactatactgaagagtttacatgcaaagctcatcatcttctctcatacagcaggtccccatttctaactttgatagcattctcattcaggagggaagtcttggatggttgttcactcctgattctttttcctcatctgtatctggtcctagcaactctacttccaagttttcagatattagtaacagactaacagcttcattaacttggattttggttctctgtgaaagtagcctcaagatctgccaaatctgaatcttagttccatattccatcccttaaccttagatttcacattacacaaattgccaacacctctctatggctcacccatctgtcctgtcagcccttcatatcctgttaaacacatagacttgttgactctttcttcctccaaatctggaataaagcgacagtcccacagctgatgttcatgtctcttggtctcttcccttcagccatcctttgtgatgtagatagactaatcatcccaagatactgcttctctgaattttttgcccaatccttagagtgacttttttataaatacactatttggcccaaatttgtcagagttaaagaaaaacttgcctrataactgttctttcttaattggccagcatcttctctcattatttaaacttatgttcccactgatttgacagtcttctttacatgtgactcacggtgcaacctccatgcctttattctggctgttctgattcattcttcaactcccagccttcaaaacacatcgcactcccacccctcytctggaataattgactgctccagttgaccctcatttttcagtcttccgaagtcattgccatgttacttgaaacctccataatgaagcacatggcgtaaaacagatatttaataaatatttgatcatttcaaagatagttttccaaccaatggaattgaagagcaataaaggcatgtcttggggaaagcaggtagtgataatggcaaagtaatcagtgcacaaatttttagcaatatgtagctaattctgaggtaactaaagctcaattaacaatatttgtaatattgcatgtcagcaaagaaaaatatgtaagcaaagcatgtttcaggatgatccttctaaaggatagtcaatcacctgtggtactatcatcaatggtactagtattggtcaacatatgtggtataggtggtcgggccttctctttaactaatcagatgaatatttaatatagcttcccaagcctaatccttggctgaactgtgacacatgatcagctggtgtgtacctctaccctctaataaagccgaaccatgcattttccttcccctccccaaactgatggtaaaacccaccaaatttgcatatagcctcctctccccatgattatggcatcagatgtttatagatggttctgtttgagttgatcctaaataagggagacttttaccattgtaactgctgttcccaaagcgtaacataaactgctttagtcagcaaaatatatatatcatctttgccttggtagatattgaattgctgactctctcttctttagacccagtagtcatttctttacctccttaatttatgcatgaagccaaaagaaaaattacttcatattcttaataaaaatggcataaggtktagataattttttactatatgcagtaaaaatgcaaatgtgtgtggcttatttgcaaatgtagacattaataactgatatttaaacagtccagattagcaattttactgatatatttaagagatttttccaataatttgcacactcaaaatcaatttgaatacaacatgtaaattgaatttaattttttatataaaattgtggttatcagcttgaaccattaaatttactatttaatatatgctttccagatcacttggttagaatttcattgcaccttatctatataaatttaattaggcttgatatcatcagtatattatagaactaattaaagatttagataagtgctgagggggcttattgaaaactccataaagttccatttggaaaatgagatattcttccttcagttcattgtgagagaaggaaacagcaagaatgcttcttgcagtgtttctgaaaaattatttaactggatttaawgggcttattccattctttgaagagctttttaattactctctatctttgtgcagtccaacaacagttacaatctttatttaaaggctttaaaaatcctcatttccatcttctcccactgagccagctgtgttacattctgctgggcatatgtgcaggtaggtagtacagggtttgtgtaccctgattgcgatcatataatatgtagcagcatttgtggggaagtctatctagtcctcccaagcagaataaacattgagaaagctcagcgagcgcctgccacaaatgtcttaggaaaagggaaaagaaagaaaccctagcccaggaggatacctgggaaaaactgaggcttccactcaaaagatacagcgactttaartaatcattttgcagaaatcacttttggattcccttgtatctgcatctctgctatagagtataaagcatattagtttaaaagactattatttcaactaagtgctttgtgtcttcattacaaagcacaataaagctttttaatacaataaagcctttattactttcaattgaatatgcctggaaataaagctttatcaaccacatttgccagtgtgctcaatgctcttgtcaaaagcactttttcttcattgcagattgagtgacacagagcatgctaggaaaaaaaaaaaaaggaaagtgaaaggacacatgacaaatatgggccatctacgactgggcacactgtcgattaygacagaggcctgaggaagccagggaaccggataaattgtcaagagcctgtgtggtgtaatagaaaggttacaggctttgggctcaggagatgcagatttaagtcagagccctgctgctgattagctgtgtgacctggacctcatcttttccacacctaaatcttgtttcctggaaaatggaaataatatcagyaatgctgccctggccaggcacggtggctcatgcctataatcccagcactttgggagactgaggtggtggatcacctgaggtcaggagttcgagaccagcctggccaacatggcaaaaccccgtgtgtagtaaacatgcaaaaattagctggccgtggtggcgcatgcctgtaatctcagctactggtgccgggggctgaggcaggagaattgcttgagcccgggaggtggaggttgcagttagccgagattgtgccactacactccagcctgggtgacagattaagactccgtctcaatcagtcaatcaatcaatataatgctgccccttcccccactgcagtctccctcatgggttcggatggtttttaaatgtcatatattctagtctactccatttttttttccagatatggaaactgaggtacagtgggattgtgtggcatgatcgtaatcactagttagctagtgctggggcaaggactggaatagatgcctcagagatgtcatgttatgtctgtgctgtcacacagcacatamaggagcagataattattttcttaatgacaccctggctgcatttggtaggggtgggattttttcccccaagcaactattactgaaacacatcactgctgttttcctgctcaaatggtttgtaaacatttacaccccccagcctgagaaaacatttgcagaaacatttgggtcacaaaccaatgtttgcttcaccascacatttgaaatatttctctttgaaaacattagaaatgtttgtcagtaaaacagattctcaacagaagtataaatctggaaagggagggacacccacagccacctggtttggtgcattcagggtcctccagggatagcagtttcttcctggtccctaggaatgtgtgacacctcccagcatcaccgtagactctgacatttcttgggtgtaaactattaggggcacattgaggagtgcaatggtttcgggggaggtttggaggtggcaagtttgttctctcatgcagctgtgaatgtagggtagttgttgagaaggaagtgtaaagagaggaggcaggagattggccagggcagtctctgtgtagagaaggacaggctgaggcttacttgattcttcctcatcttttccctcattccccaacacagcctctacagctccaacacagttgtgctwattggaagtggggcctttaaaataaccttggtttgtagccctggcctgatcggtgatggagcatggtctaggaactggatcagcagtttggagtccaggcagagtgggttgaaccctaactctatttctgactcatggataatctcaactaatccaccttgccactgggtgaagcctagtggagaagagctcaaaggagcctgtgtagagtttgctcaaaagagtccttgtcaccaccttcctcccattttgttttctccaccaatatccaggtcatgagagcagcccttcctctgagccacagggaagtaatcaataaggccacatcccgctcactgacatccccactgaaacaggtgaagcacatgtggaaggtcatgagatttttgaaagcactagaaattaggagactaattctgaaggtagcaagtgtgagggaaatggaacctctgctgcgtcctgcctaccaccgtcttctgcaggatttgtaaaaaactaggttcaggtttccaggctatttttgctgctgtttgaacagtgtctactttttctactaggaatcagcatgtattttctttgacatctgtatctgctgagatcacaggccatcctggtcaccaccttgctgtctagaacagcgtcaactcaactgarcagtcatccattaccacgcataaagatctgaaggtccactctgtgaaagagcagacaattgcaaggcatctcctccttcgctttaatgtagcacacgttagcacaatgtgcacacttggagcagtcatctgcacctcagtttccagctcccccgatccaatgctgttaatatgttcttgccagacacttatattcacatagcactttacaatcgacatagggctttcacaaatatgatttcagtgagtctcttgatgagtcaacatttttgtctccccaagcaytttctgatttgaactattttctcacagcctaactcagcagttttcctggaatgatgtgtgggaggtagggtatgatagtgtattgctatgtagtcaaactttaaccctgaaagtataaaagaattcaatactggtgttattgttaactagccaggtgaccttaggcaggtgttttgcctttggagcctcaggttgtgaggactaaatcaggtgtatgtgaaaggacctggtatatagtaagtgttaaatgctaattgttccatataattatggtcctycttaataataaacattaatagaatcattagtgaatctttggctgaattatatttctatcatacgtagagttgttcccaattctaacctatatttctcgtaagggttactcattactagttgttatcaatgtttcttgagaacagtatgtagggatggagaaagttcaaaggcatttagtacaaagatgctgggggtcagttaacttacaaaagcgtagagccctgagacatgactttaatacatttctggggcacttagtgaaaatgtgagctggtgaagatgttgccatatctgtcagcttacagaatcttctgtgcacttatcacaggagaacatggaactgcagcaaacatctcaattaatggatcaatcctcacaacagtattggctgcggacagatgtcttctgtatagttaagaagtsagggttccagtttataggatttgcatttttataacagctttatcaagatataatttacataccataaacattaacccttttaacgtatgcaattcattggttcttagtatagtcacagcgttgtacagccatcatcaccagctagttttggaacattttcatcaccccgaaaggaaaccccatatccattagcagtcactcctcatttcccccaaacgctacccctggcaaccatacatctactttctgtctctgtgggtttgcctcttctggatagatcatagaagtgaaattacacaatatttagtcttttgyggctagcttgtttcaattagcataatattttcaagatttataaaattagcacttgtcttaataacagggtatgagacagttaaaaatatactcaggtacacatcccaacacctggcctacagcctgctctctttttcatttcctttttctgtaggggtggggagaaggaagctaaagtgtttatatcgaagtatggcatacacacagtaaactgcacagatcttaagtacacagcttgattcctcttgacaaagagaatacacccttataaccatcactcctataaaaatacagaatgttaaaaccacctcagggccgggcacaatggctcatgcctataatcccaccacgttgggaggctgagacaggcggatcgcttgaggccaggagttcgagaccagcctggccaacatggtgaaaccccgtctctaataaaaatacaaaaattagtcaggcgtgggtagtcccagctacctgggaggctgaggcaggagaatcgcttgaacctgggaggcagaggttgcagtgagccaagatcgtaccactgcattctagccaggacgacagagtaagactatgtcttaaaaaaaaaaacaaaaaaaracggctcagatkgtcccctcctaagtcatkgccctcaccacaggcatttcctaattttatttgatttttttttttttctgagtttgtttccttgtgttatctattaatacaggtagtaagtacgtggtcccctgagcccgggagacctttccccagtactccaggcctcagttacctgcgttcgttaatgttggttcccagggaaaacaaagcagcaccaagcactcaggacccatggcctcttcttctgaacccagggactcccatgcctttgcattttctcctcgcttttgtccccagctgtccttctaaacaccagcaagctctcagcacaggtcattacaaaaaacagttcaggggagtggggcgggctgtagggggagcattaacccccgtcagggacaactgggggcaaatgttgcgctccaaaggcagatgttttgaggaggactcctaattgtgacaaaggcagcccctgcacactggatgctggccagcctctgccattaacacgcctacctcctcactggtgtgatcaaattggtactgctcttatgaaattatgtgtgttagctggctcttcagaaataaaatatcttttcttaaagaaattaaggtttcattttaaattgactttatggcctttgaaaaactttagtttttgtgtggtccaaagctataggttagcattagcatttaaatagaggcrttaaacttgcctgaagaccttcctctcataatgtagccctttctgagaggttttttcaaatcagatactttttcgtcctaaaaaatgaatgcaaatgctctctatatttttcccctcaaaggccttttttctttatatgtagacttaggagagccacattgtggagcagcctcagtattagtctttttgtatggaaagggccacgtaaaaaaaaaattgctattctctcctacaatgcctgattttctctgctgactctcaggatgtatttgcctatggttaattttatcctattgtatgtcattccactccagacaccccccaaaggcacaaatccccattctacaactaagaatctaatgtaaactcctgctatgtaacagtgactctaggagttcccagtgtccccagcaaatccccatcactttagtagaatcagagcttgagcttttgaactggatgaactagagtttgagtcgtgtccatcacaaggaggttttgtgaccttctctgaccctttatttatctgccaaattaaggttatcaagcctttcttgtatgtttgtcaagagtttaaatgagatcatatttgtactcctgatttatactctgtgctcttaggtcctgtaacctaaccggacaggttcttcctgcctgctgcacaaataaagaccatggccttgcggtaaagaaagagtttaattgatgcgaggctggccatgccacacagtagatggagttgttactcaaatcaatctccccagaaattcagggatcagggtttttaaagataatttggtgggcaagggatcagaaagtagggagtgctgattggttgagtcacagatgaaatcatagggaattgaagctgttctcttgcactgagacatttcccaagtgggggccacaagaccagatgagccagtttattaatttgggtggtgccagcagatccactgagtgcagggtctgcaaagtatcttaagcactgatcttaggtttaacaatagtgatgttatccccgggagcaatttggggaggttcagaattttrcagcctccagctgcatgactcctaagccataattttgaatcttgtaggtaattttttagtcctgcaaagacagtctagtccccaggtaggaaggggtttgttttgagaaagtgctgttgtcatcaaagtttaactataagctaagtttctctcaaagttagttcagcatatgcccaggaatgagcaaggacaccttggaggttagaggcaagatggagtctgttaggtcaggttctctttcactgtaataactttctcagttacaatttttgcaaaggcagtttcagtccccctccctcacatttcaaccagaccagttgaggagtaggttaggaggaacctttgagtaaagggtgtcctcttatttcttatgttctcactgctagccttctctttcctttcagccaccggcctcatctcagtaaagttgtgtgtattttaatggccccaggtcacatttgacctgaaggagacatactagaggtgagagcctgatgtgttgttctttactgaggtgctgccatccttctctctttgaggttgattttgtttagctacaagcttggggatgtggagttgtgaggaaaccttctagaagattggcgtggtctggtactagaaaaaaaaaatagccaagttgcccaacagtctgaaggctttcttaccctcaggtccatcctccatgctgcagctggaaaggtctttctaaaacacagttgtcatcatgtgtgacttctttctaaaatcgtctgtttccagattcctccctgtcattggttccagattccagggtgtatgtaaactgaaactgattgtcctcatctatacgaaaattagaaaaataatgactgtactttgtgagtttctcataaataatgactaaaagtttctgagtttcccacacaataaaacatktaacctttttgttctgagattattttctttccacttaaggagtgttaaaataccttcttttatcaaatcttggtaataataaatggtaattgttttgtttgaataatctaggcaaaataaagcttaattcaccttcatccttccactcacccatgaaagtccaaaatcttagcatggcccacaggtctgttaggctctaggcccagcttgccttgcccacctttccccttccttgctcttccccacaccccatgcactccagtgaggaataaaccacttgtcgttttccccaaataccgtattcttcctactgtcccacccagttcacacattctgtttcctttgctcgtggaggactttatttccttcatatttgcctcattgttgacaacttctccttctctattaagccttccctggctgctctcagaaacctacagcccttcctgcctgtgatcttagagaatctcctccagacctttattatggccactgtcacattgctataagtacatacagtgcctggctactttcacaccagactctgcatcgccagagaacaaggactatgttttacttacctctgcatccacagtatctactgtatactacctggtttgtcattgatgctgaaatatttgttgagcaagtaaacaaatttaaaaaggacttcgaaaggsactatataagcagtgaggatgatacaaagagtcataagacacagtctttgacatcaaggagcctacagtctaggtgaggttaataaatactaataatggtacatccacacaattgagtactctgccaccattaagaagaatgaggcaggttgatatgaactgaaatggaaccttctccaggctctattgttaagtagaaaaagtaaggtgcagaacagtatgtaaacaccatttatccttagatatatttgtgtgtttatatacacacacacattcaagaaagactgcttctatatgtataaaatatatttggaaggataccctggaaactagtaatagtaattgtctctaggaaaggaaatggtgggagagaggctttacgctatatgcttattttgtaccattatctttttacgtaacaaaaaatattatgtgccaggcgctgttmtaagcactttataaatattaacttgcttagtcttcttaacaattctatgagctaggtgctatcaatatcctcattttacagatgaggaaactgaaggcttacaggttaaataactttcccaagttcacaaaactagtaagtaaataccctagtaaccttttttattgtatcatcagctcaaaaagaatattaagagttttttttwaaaaaagatrtgattctacaggataaatgttaagtgggttacccatgcagtaagtgacagagaagaaataaattgctcaggatagcttcatagagggtagaggatttagcgattttgaacatgaagtaggctctagatacttagagccmaaaagtactaagtattattcaggggacagtgagtagctcaatttggtttgaatggcaggttgaagcagggaagaactgggagaaaatgtggaatacaggtcaagtctttaaaaggccttggatgtcaatgttgraagtttggacttgattctgttagcactagtgaacacacaaggttttttttttattattattaaatacagaatagtgatatgatccaactaagaactgggggttagtctaggaggagtgagtgagtgaggtggccagttaagaggcaactgtaacaatccaatgagaagagtgtaggatctgtgatagtgagattggaaagaagaaatgaatatgaaagatgttgcattgatagacctggtgacaactggaccaaaaaaatgaaggagagtgaagattccaggtgacactgagattttgaggttttgcaagctagttccgttaagcaaaattcagtgkctagggaggccacctgacaagggcagctgatagaaatgtctgcagacaagtgaaaatgacgttttgatctactgagaaaccagatcttgagaaagacatctgagcattatatatatgcacagataagactttcagaagcagagagagaagaatggagggcccccacctgactggcaggaacacctgcagcaggcagacacagagccaatagcagaatcagagaagaaactcagagggagctgggagaagtgccttaaaaatgtggcttcatggggccaggcactgtggctcatgcctgtaatcctagcacttcgggaggccgaggcaggtggatcatgaggtcaggagttcaagaccagcctggccaagatggtgaaaccctgtctctactaaaaatacaaaaaattagctgggtgtggtggcacatgcctgtaatcccagctactccggaggctgaggcagagaattgcttaaacctggaggggcagaggttgcagtgagccgagatcgcgccgctgcactccagcctgggagacagagcgagactccgtctcaaaaaaaaaaaaaaaaacttggctmcctgggccgatgcagaggctcacgcctgtaatcccagcactttggaaggccaaggcgggtggatcacgaggtcaggagatcgagaccatcctggctaacacagtgaaaccctgtgtctactaaaaatacaraaaaattagctgggcatggtggtgggcacctgtagtcccagctactcaggaggctsrggcaggagaatggcatgaacccgggagrtagagcttgcagtgagccgagatcacgccactgcactccagcctgggcaatagagcacgactccatctcaataaaaaagaaagaaaaaaaaaatgtggctccatgacagttgggttgaggatggaaaactgtcaaggaaaagaggacttaggaaaagctgctgtgcgtgtccatgaagacgtcattgacgacccttttcatagacacattggaggcttagaaaggacaggcagtgaatacaaatgatttgttcaagaaattcaacaatgaaaaggagaaaagacacgaggggagagatggagtggacatgggatsacataaagggtttggggtttgtttcttgatttgtttttccaaaatgkgagaaggaggatgtttgaagcagacatgaaagaaccagtgaaaagggaagatactggatacaagagttaaaaataaaacaaaaacccagcagagtcttgaaagcattgggaggggtgaggatcaaaggcatagggttaatcttacaaaaagaaaaaaagaaaagaaacccctcttcttctgagtcaagagggaaggaytgattttttttttttaatgtatgtcagcatggaggatgtgatacctcatacaattgtgagacccatagagataatatatacatgaacaatggccaatacagactacagaggaggatgcaaacaaagttagcwgttakttttatcatttgtattatatcacatagcaggtgttctatcatatcatttgattaatcttcaaacctaatgtgatgtaatattatttatcccatgcytaaatgaaaaaactgaagttgagacaggttcagaaatttccagtcatgcatcttaggtaaaagatgtgggattcatgcctaaatctgycagagaatgaaaagctgagaaggattacagatcactagtgaaaacacggatctctgttgtctcccccttttccattagcgaccattatcctgaccatctccccccggagttacatcagaataaccctttgtgttttatacagatcaattatttcattcatagttcctcttttcccagtgtcagagaatcatagactgctttttagattgtatgccatacttaatgacatgtatagactatcagctgtctcattcattcattctttttcatttactcagcattcactagttaccgtcttcttaggccaaggggtaggagcaagttgaatatagaattcagccctgctctagagaatggcgtgaacccgggaggcggagcttgcagtgagcagagattgcaccactgcactccagcctggacgacagagcgaaactcsrtctcaaaaaaaaaaaaaaagaagaagaattcagccctgctccartagaacctgcattggaggagggggaagcagatacttgtttatgtactaaatgcttctacattcttactctgtctagccactgytcttaatcatttaagccttggaacaaccctatgttactatttccttttctcagatgaagagaataaggcacagagagattaataacttgaccaaagttgtacaaataggaagaggcagaattgggtttaaatcccaggcaactggctcccgagtccatgatcttaaccattgtatatgctgatgraagtatatctgattttatatatatatatttaaatatataattttaaatatattttggaaatatattttttagttggagatgaatgctaaaaagaaaattaaagctcatttaaaggacaaagcttgatgaggatggagcaagtaacatttaaaataaggtggtcagggaaaacctcacttactgataagcagacatttgagcaaaaattgaccwgaatctcytttaatcttctattttcctccaacctcctgtccctttaatcccatctgatcctcttttctgattttctttcagttggcttacagtataaagcaaaagaagaactatgaagtacaacaaagacaaattaatgtcacttccttgctctatagctggtactttttattttamtttattttattttttaattattttttctaagatggagtcttggtctgttacccaggctggagtgcaatgccatgatcttggctcrctgcaacctccacctcccaggttcaagcaattctcctgcctctgcctcccaagtagctgagactacaggtgcgcactaccacgcccagccaattttttatatttttggtaaagacggagttttgccatgttggccaggctggccttgaactcctgacctcaggtgatccacctgtcttggcctcccaaagtgctgggattacagaacttgtacttttaaaataggaaataagaaatgctctggttccatggcccttaacacccaccccaacacacccacctcctcctcgccacccagtgaccattcacccacctgttctaaggtttctcccaactattgaatgaatwtaggaggttagaatttctcctagacaaattcacttgggtttttctaagatgactcccctttcattacttgcttcccataattccagatttcctggagtccttgatgtgatttttcctttcttgttgccattcacagcccytccccgttcactaacattggcccctttcaccactctgtatcttcctgtgcattaatgaaggtattaagtgagatcagttctaaagccagcatccttagaattcactagatgcttcttttctgcatttgttgacttgccgttctcawtaccctctgtttgtttttcagcctgtgtcctatcgagggtagccattcagaataaattcattttgctagttatatttttctagaggcactgcatcaaacggttcactgacattcaaatacgtatcagccacagtagtcttttcatccaccaaattcacattgttatccaaagctatccatcacrtttgtcagagtatttgggtctttaattaaacctgctggatattgttcatatttccattagctcctttctagttagtctattatttttctaattgacatctgttctgagtcwcatgtccttgaatttcaggtggcccattttgtagctttggtttatktaggttttctctctttcataaattacctaaggatttagttaatacaccctcaagtgtttgccactgggacctgctgatttacatatgtttacgcttctcaaataatccagagttttttggttcttctacgaaatcattttcctttgwggcccttcagtcctgtaagaagtagtcttgtgtctcagcaaggcagagagatctcctacaatttcaagaactgtactagagtcactaaccaggaccagaaggtcaggaatcagggtttgagtgactcaaccaagtgatggctgaatagcagtccttgcgtcttaagactcccagaggctgtagtgggttgcagtgaactctccattcagcctcccccagccctgtcttaacatcattgtgaggtagctggctaggggcagagtcaacggccaaaaaatagaacgaattggcacctgccagaatcaaccattaccttggcctcaytggcatcatgctcatcaygctytcgttgatgggagcatatgttccmatcaaagccatgaagtccattcctgttcccactgactgttctcctcacacacccacaggtagggcaagatccattattataaatacagaaagcccattacccattcacttcaccatctcatttccaaccctggtcgtcatttggagcagaagcattgtttttatcccttgtccagggcactccaactctttgtgcctttcttatgtaccaggagacaagggcaggcagggagactgccaagccctagttttgctttactttaaattaaaacatttgcttcatgccttgggtatttttggtctgagcctggattagattttaaaaataaataaataaataaagcttcttgaagccaaggactatacctttctatatcatattaacatttaaaatgttattagagtttcctaagcattagtaataacattaggttttgctttgaagaaatcctttgcattatttattgaaaaattaataatgtgattttattactaaaaattgaaaaagccgtagggcctctcagcagttgtttcccagattgctaatctgaaaaatatagataatatacactacaagagtcttgtgctaattgggttaaatgatatgtagctttgtggtcactaaagtatataatacaatgtcctttttatcaccctatgatattagataaattgtctttaaaaatcagaaagactctctaaagtgatatttgatgaactattttcttaaattgaaaagactctaaagtgatattcagctcagaatagcactccttaacctggactcaccttttgataatcaaaagaacatttacagaagtatgagacaaacacaattatgaaagtaaaatgaaggccctaaataaaaaaatcacagaacaagagggtaattctattcactctttcatatttcattatttgataacatcagaagatgaatccatcagaattgccttggcaagtgcaaacagaaatgtgcctgatcaatatttataaaaaccttcaaaatgggagaaggagttgagcagacttcttaatggactgaataattattcatacaaatggggtttgaccaaaggcagtgccagaccaaagagacacagttttaattgtactgaatttaaaatgcagatcttcctccagcccttttgtagaaaacttaatttaaaaaattatctgatgtagcagagagtgacatatgaatccttaagttgttgaagaggacatgtcaaccatagatatttataaatttagaacgtgttccaaaggtggggagcaaagttgctagctaagggaacaaaaagaaattttctccccatttcaatgactgtaactgagccaaggagtgtgtcatcatctcaacggtgatgggaatgtcctggaggagtttctttgtttcaagtggttttattatctgaagagaaataaagcaagtctctggctgctgctgtctatcaaaaatgtcaggatacgttcctgagaggagtgaaacagctgattttaactttcagcgtctccccaggagaacccccacccccgcagtactgctgaggcgtgatggttatcaggacaaggccaagaggtaactggtaactgccatttaaggatagtgccattgacaaagggtaggtgcgtgcatgtgtcactatatataaaaaacaggtaggtagatgaccgatcaaagaagmccgagcaagccttaaagaacagactcccaggctatctttacctcttgaatgattttctkctgccaccagctgagggaatataagcaatatgttttctaaagaccattattcacttctagcgtgtcctgatcagaacaaaaacctatacaatccgttgtgagaagtgtaaaaaaaaaaacaaaaaactrtcctgatacagaatatatacctaattgtgccactaactgtctgaaaattatttagcttttctccaccttagttttctcattcctaaaatggaaataacttcagctcattttaaattagaattttcaatcatgtttgtaataaactttaagctcttcgaaggggaatacaaataagagcaattagattatactttttaataaactaatttattcttctgacacacaggattaccatccattttattattggtcggaaagtccatttgagctgagattacacttgttcagagtgttttcamgtcaattgctactgcgtcttgtctaccattgcttgaagaaaaacaacatcagctaattctgatgggagccccatgattttgaaggaccaagcaggggacgctgtaaaggtttaaaatccaaaaatgccagtgcttttatatagcatctactgtaacctttctgttttggacatgagaaatagatccagatagctggtggtatttgcccaaggtcacatggctagttagtagcgaagaatgaaagacttaaccagaatctgagtttagttgatctcttaaatatttacctcactaagttgttctgctataaccacaatctctcaattatttatgggatgattatctggtttatgggttattcttttttctcttgtcatttccctgttattatcatagataccattgagtggctggagaaaacaggagttcactgcttcacttgacaacttagtgacccatctaccattgggtttttattaaagtgctcaaaatgctgtagatattggctaaaaataatgttgggagctacagtcaatactaacttttattcagctcaatttttctccctctcaaatttgtatttcagaagtcagattcagcacakaattcacttgttgacattaatactagagctttatcttgggaaggactacaagagaaagtctttacaatgaaaataattatctcccttccccaaaaaagtactgaatcagagggacagtcaacttttggaaagaaaggttacttcatccattaccaacttgaaggggcaaaaagggaagaaataaaaagaggtgacaaaatgaaaaagccaaaaactcttkcttgtaaactcccaaattaagtgttaaatttacaacatgactgcattacttggtttagagcactgaattcccagatcaaatccagtgttgttcagatataactgcaaagtttgtacaaacgaatttgaatcrccacaatactggctcattgcattacaaagaaagacagagctgagtatgggaattttatttaattcatatttgtgtactcaagactcaaatgagtcagcgataaaaatattcttttcagttagttcttttgctttttatagtttcaaatatttttgtattaaggtggttttagagtaaatacagggctcaaaagtctttcattttgaggccttagacaaatcactaatactctgtagatctcaattttctcatatgtataacgtagataattgtagttcctatttaaaaggattgaaatgcacctaaaagctagacattattattaatattctacaatcaagacagatttcaaaacccagcatgagacgtagctgtatattttaaaacacagtttccattccgggatctaggactctgaattctaccaagtaaaggaaggcaaaaggcaaagctttcctcagagaccttggacagttccccagtcagggccttgctgtcacccctacaggcaaagtttatggaacgcctacaagtacaggaacaagagttgccatgggcgggaatagtttatgttagtgagtatttcttccctcaatttgcaaagaagggaactgaaactgtttctaatcactttcagagatgcagtactaatttttgcactgagtatgccaacttgggaggtagaaccagggatgagaaaactccctggcctcttgtctatgaaaatttatgaaaagctcttaaagagaagtsagaaaagcactaatactcaaagataaaaagatatcaacaattcatttatacatacacgcatacctacatacattaaaaacaaataagtagatgaaaaattgttccacctcatgcaaatcaaaagaatgtgagttagatgctgcccatatgttgttgataggaggataaattgatagagcttttttagaaagcaacttggcagcattgtcaagtgtcctaaataatatacttatcttttaactaattctgtttttagaaatctatccatgagaaagtaagtctttataattggaaacaattgaagtatccaattgtgtttcaacctaaatatttcaactataagaaagaaattggctagaacactacatgtggtgggggcgaactacaagaaaatatgccaaactgtggtttatctttatgatgaaattatgagaaatctttctgtatggcccatatattctatatggcatatgtattaactttccaatcagaggragataaaattttgttttaaaactttaaaaagatctgcccacctttccaaaataccctgtatttccttcctggtagaaatgttttcagacagaatgtatgggggagaaagagtcgcagtgcaataccattaaaataaagcacaaaagaaaaagccacagagaacagtctgttgataaagcaaacatgaggaagataagagaaaatgatctgtttgcaccagaacaaagcataaacattgttatgttctagactctgcacatgagaccagtctgtgaagtcacacctcctcttctctgtcactctactccctcacctatctgcttataatactttgggaactgctgcaaaaaggcacacagcaaagggtaggagaagccacagcaaggtgcacatctccttccagaatgttccatccagcagggtgacttgaaactctttggtctccagaataagatatttggtgtacatctagcaattgactgctgaatattgtaggctatgaagagtctgtgaagggctacaaaccatgagccagaaaatgtctcaatcaaatgtgcattcactgatcccatccaggcagccccagcaaagtgtcatcaaatggaaaatgtgttgccctggaagccacggctgctattttaatgctcgatgatgaagrccaagctttcaatttcctggggcctcaataagtgctgataaattatttatccctattgggtgacatgatttcatttcagtctgacagtgtttatcatggaagctcattctaatggtatagtttggggcatttttctattttctctttaggacacctggtagcaccctttccccacctccaggtgaaactgttgctgtgtcagtttagtcatctttgctcctgggtaccattctgaaagataaatgaatttccttctgtctttaaatatttatgattctttatgatctaatatatcagcatggttatggaggaattttttctctctaactatagaaaatacaccatcaattacctgtcaattttgttgaataactcagctttgcaattcaggggcactgttcatacgaagctcttgaggactcttttagtctctcagtccacttcagactgtcattccgggatttataaaggtcttcattgcacagaggatattgaaacattaaggacttaagtggcatgccctttatcactcatcacactgtggaagatccaagagtagaaatgcaggcatctttgttttgttgtttgctcccagcgtggaacaatggcctctgtagaaaaccagccagtatccctggaaacaattcatcagatttttcaaaagaaatccaatttcatctggcatgatgggctcagtgttgcttcttaagataaatgataaaaatatcaacatcctaatacaaagaaatccagttcttttggtttaatctcagtgaaaagcatcacaaaccttttattgcttctgtagccttctctgatgcgtttaggtccttggttgaaggagacagtggttctgtaactgttggtctaccaaacagactctgactgagtcgtggctggttcagaacctttaagaagcacatatctggggatggggcctcaggaatctgcacttttcataggcgccccaaggtaattcttaggtaccctaaagttcaagaactgcgagtctagaaatcgcagctttcaagttccttctagctttgaaagaatcgtgagccccagattcactctcatttcatttggtaaatctcgatgcacgcatgagctcttcttgggcaattttaaaaatgtatattcttaggaagttccattaatagacaactccctccatcacctgtgcatctacaggaaacagaattagatgacatagggcatcatttcccaaaataggggccaatatcagtgagagccaggggacatgcagagctgtaggataaatattaatatgatgcttcttcctgcagcatcaartttttcttagaaacagtgtgtttaaattacagcagatacattaaggagtagaatgcaaagttcacgtgagttttatgctaaacatgaaacttcaaaagatttactgatctggcactggggtctcacacccctggaagtggagttttatctccccktytaccaagtatttctgtctatattcagggtcaccctggaccagtgattgctatgtgtctggttctgtgatgccaaaatgaacactcgtttaaaaccactatagaaaattagccccctgtacacaaggatgctgacygatttgcttgcaggagagcttcattaacttaccaatctacaaagagcactttccatttctgccactatttagagtatattcacaaaagattattctctcccctatttttaaaagagtgtgttagttagaaaaggaggcttagcaggaggaaaagaagctaaccgtgtgaaaagacaccacaactcttcctgaccacattccccttgtaccagcaattcaataaaacaggcctgaaattatggagctcctagaatgtatttcttaccacaaagatagcttcatttccccatasgaggttctttttttcaaaatgttcctgatgagaaagaaacaaattcacggccctgagtctaataatacaggattkctgagccactcatcctgctaggtctggaagattgcttcgtctccaagagttgccttgagtgcactgcctggttctgtcccctcgatcttggcaaagttacctttcacgtcagagagaagtgagtaacactcttcattttgctgacaagctgtgataagccttcctggctcagagtctgtgttgaacttgacctcctgggtaatttggagtggccatggaagtcacagcttcagagtccagtagactgagagatagcagtggcatagtattggtttaaagaatggtgagtggtcatcttctccccttcctgactcccaccttcatcttcctgctgcattgaagaatccctataatgcatatttctattacaggcacaagtcttcctccaccaaaggacagagccaggccaatggccttgccgttaagtggctctcaagtctcctctttctgctagaattgtaaccaatgccctgccagaccattctgcgtttgattgtcacagtaatcttccagaagcacaattttgaatggcacctctgctctctggaagaaggaagtcctttattggcttaactaggtctaaaatcatagcctgatgttcagaggctctaccctgtggcttcaaatgcctcatcccaggactctctgctattgctctgcactccccagtctaaccarattattcttccatgcctttgctcatgctcttccctccaactagaatttctttcctggaagccctgcctgacagaatcttaccccacaggaagtcttcctcagtcccacaccatcccctcagcatggtgcgatttctcctcctctgctattaacgcacggtactaggacctcacttatggcacacagaatattcttgtgagttgtcaagtgtccgtgaaaaaacagtcttgaacttagagtcagaaacctggggtcagatcctggcatggtcagtccctgtctttgtgaygtgggcaagccctctaacttctctgtgctttcgtctttgtatctgggaaaagggaggtgtagcccctgggtggagtgaggggtaagtggcacagtgctcgggaatgaacttggtcaacagcactggaatccttatgtctctgcttttcaggacctttcctccttgtctccgagctacttgaggaaaggggctgtgtcttgcccatccttatatactactattaattttattacattactrtcacacattagcatcattatagttctaataataataatctttatgaagcaccaccattctgagtgctttatacgtattaattaattcaactatttcaataaccccaagaggtaggtactattattaacccactttatggagcagaaaaccatgtacagtattttacaaaacctccaatgaataatgaatgaatgagggattgaatgagacaaaacctgttaacaatgccttctctccttcttcaggctatacccctacttttctttcctttctcccaaggtaaatgcaaaattagcaaaaaaatgtagaatgagctgagccacagaaaggtatgcggcctccctgggtcctcacttagacttctcctraagagagctcccatgagctccaaaggacagagcttatggttgtcctgttctttattctgttggtggggcctagaacactgcctgctgatcaatcgttatgaagtaagtagaggaatcaatgtrtagacagcgtatttgtcccctcgagacgacrttaccagtggggagccagtgagcagtgttctctcttgctttctcaggcagtactacgagatgctttacaacacagctgacgagctcctgaacctggtggtggaccagggtgtgaagtacacggagctggagtacatccacgctctgaccctgctgcaccgcagccaractggggtgggggaactgaccacccagaacacraggctgcagaggctcaaagagatcatctgcgagcaggctgccatcaagcaagccaccaaggacaagaagataactaccgtttagcagggcgtactgcggttggtgacgggggtcccctcagtcacactcactttttttccttggtatgttattgagtatattctgagcttagytttctctacagtgatactttagtggagaggaggtgtaaggattctttctctctggttttggcttttcatataaatgctaaaggaaggcgacagtacagagtgttttggttgaacaactactttaatgcagtcaaatctaacgggactagggtgggatagggaggaaggtggtatcaaattrttggactctgaaaaacaagtggatggattactaatatttgatttattactcaatatatatataattccagccttggaaagtaggaaagtaggctgctacctaacttttagtcccttccaaaaccatttagtagggttctattacataaacagtagggtttttcctctcctgaccttatccgtttacagttcaatgaaataagtgtatgtgcattgctgtctgtctctattgccaaaatcaaataaatggcttctcagctgctgtttacaacaaacttccctaaccaaaacagaacctctaatttagggctaggaatagaagtcttttgatcccagtccstgggacagttttgtatgctgtatcttgtacacaggttgtaggttggtttattgccattttgttttatttctgctrtataaaaaccaagagccagacaattagacaactatggaggaatgaaaggcaattcaaacatctgcttgattcccgccccgccacccctaatttctgagagaataatggttagagaacattgcatctcacttgaaacatcctttgggggtaaatgattcttaggtgctcacttggtctgagctcagctgaatgcagggaagatgggacagagtgacatttctcctctgtgcggcctccagctgagcctgtctctgaattgttccctcccccgcaatgtgggcacttaccatgttcctggcacactggacctcaccatgtcccccggtcaccagtcctcttgctgcccatggttcataggtcatagaaggcagcaatgcactgactgggccacatcttgaaaactcgtggaaagggaaaggggaggagatgggactttgaccacacacagtgatgcctcacaccctgaaggtgggggattttgtacctgtttgtacaactttggtcttgatgggaaaaatggagaattaaaaagtgttttgagaagcttaaatgtttcatgttatttttcttgtgttctttattcagcaaatattccccagaagcctaatatgtgctccatgctaccacacacaagggcaaatggatagatgaagargacacccttattatctaagagtgtgggaactggactggagccaaaaatcccaacagctcaaactcagggctgggtcagaatcaggtcaggcagtggggctgccgggaaggggattcagtgggcagctggaggttccaggggattctggtgggaaagaatgtagtcaatctgtctggctccaagggcctgactgggaagaagttgaatctctgtrggagacaactgtggaaaaacatactgccctaaacgatatcatgagaaatagtctaccctagaagcaggagtggaagaaggggggatgagaggagawtagggttgcctaagctgctgcttcatggccgtgacccccagcattgattctgtacctttcctttttcttcctgtccactccaggcggagaacccggagtggtgacagtgatggcagcagagccagggtgagactgagagtgctcagactaattttcttggaagtagtggaaagytccgctaaaaaagaaacatgrgtttggattgagcagaatgtcaagagccctgagaaccaaccaaaaaatggcagatgagctgtttcaggggcaacatttaggaaagtgaaatctctgctttgcttacaatgacgggactgaaaatggcaattctgcacaggaaagggactgtgggactcttccaagacatttaggacatccaagtttctttgaaggttggcacrtcagtctttattcttccacaggtaaagaacagccagtgacacactcagtgggtggtcaatggctacctcacaacctatatgcatttgggacacagtgaagatttccacattttggtcctacttaggagtattttgtgaggctgttgtgctgtttacagccttgaccaaccagaaagtgctagagagagccagggtctgccaaggacagggcccacgaaacacatacacagttacgtaatgttcttgtgtgaagacctctccctaagtgtgctattgcagataagaaggccaacaaaggtcagrcatggtggctcacacctgtaatcccagcactttgggaggctgaggcaggcagatcaggaggtcaggagttcgagaccagcctggccaacatagtgaaaccccatctctactaaaaatacaaaaattagctggtgtggtggtgcacacctgtaatcccagctactcaggaggctgaggcaggagaatygcttgaacctgggaggtggaagttgcagtgagcccagatcacaccattgcactccagcctaggcgacagagcgacactctgtctcaaaaaaaaaaaaaaggccaacgaaatacgccttaccagaaggggtgctggaaacaaagcaaaccrttttctcattcttatacagaggtacaaatgggagggayrtgtggactgctgcctgcatcactagtcactgtgccatggagtaggcccacaggagtaggaggggtcctgagatgggaaatcaacatgaccatgaagaaggaaggctttggagtgatgtcatccaacttggttctcagaacagcagctcccagagagcacttccttctaacactgttatctactctctggtacttagcatgtgttcccatttagtcctcacagcaacccttatcataaatattactttcctctcttccatacccaagggcccagaaactactgaaagaatctctttcaagttagccttcgttggaataaattccttgaaaaagaggtagttcatcagctaggacccaactctatatatatayayacacacacacacacacacacacacacacacacacacaggcaaattgtgttcttggaagtgctggtggtggtttcttctatatttttggttacttttagctatatattattgcctgtcagtrtaccttccaayttataaatgaaactactctttgggtgatattgtgccccttaccccacaagcacttctttctacctgctctattaatacaggttctttcagggtctctcatcctaggcggtgtttttattcctacctcacagtagggctttgaaatcttactgcccaactagaacattttccccctccacactgatttcatcccaataattagacaaggattggttcctcaggttgctcttgctggttaaggacaagtcctgcttccaggctctgaaagacaagtttattttttagtatgtccagatcagctcaagtttagtggtaagaccaggcctgagctgctacagcccayactcttgaaacccatcctcttgaaactcttgacaccacactggaaaccttgtgaaaagcctctgcttttcatgacctttcctccttgtttctgacctacttgaggaaaggagctgatacagtttggctgtgtccccacccaaatatcatcttgaattgcagctcccataatcccacgtgtcaggggagggacctggtaggaggttaatgaatcatgggggtgagtttttccagtgctgttcacatgatagtgaattagtstcacagcatccaatggttttataaagggcagttctcccacacatttctccttgcctactgccatgtaagacgtgactttgctcctccttcacctttcgccatgattgtgaggcctccccagccatgtggaactgtgagtccattaaacctttttcattataaattacccagtgtcaggtatttcttcatagcagtatgaaaatggactaatataggggctgtatcttgcccatccttaggtactattacttctattacattactrctaatctggtgggatcctcttccagcagttactgccctctgcagagtaaccccattccaagaagccccaccctctctccaagactttattcttgtctgaatgttttctgagcccgacggtccttatttatgtttcaaatagcttgggaggaaaaactccaatacagacaacttgaattggcaaccaaaccctaatgctacttactgtcaagtcatatccgtgaatttcgtagcactaatgcattcattcagtcagtcaaatagaattgcctgttacagctcaggttgatatgggagtcgggcaatgacaggcaaaagaaacagccccttgtgacacaaagcttatacttccactggcttcttacaactcctctctgatctacccttcccagagtccatatttcccctctcgattctctgtgaccaccctttcatttaggaagacagctcaaatttcagcctgactctgtgcactctcttctgagctttgcttctctggaagcttaggactctcacgatccactgtgccccactmgctagcacacctagcagttcaccctttaccagttcttcttcttcttctccttcttcttctccttattctccttattctcctacttcctccctcctcttctcctcctccttctccccctcattctcctcctcctcctttcttccttctccccctccttctcctccttctcctcctcctyctccttcttcctcctccctcttctcctccttctccgcctcttctccccctacttctccttcctcctycctcctcttctcctcctccttctcctgctcctcctccttctccttcctcctccatcctcttctcctccttcttctcctttcttctttcttcttctttgagacaargtctcactctgttgccccggctggagtgcattggcaccatttcagctcactgcaacctctgcctcctgggttcaagcgattctcacacctctgcctctcragtagctggaactacagaccatgcccagataatttttgtatttttagtacagatgggatttcaccatgttggccaggctggtctcaaacccctggggctcagcctcccaaagcgctgggactacaggcatgagccaccacacctggcccctttaccatttcttgatggaactaatggattcccaccccacagcctttatgaatggactgaggccattgaattcaggattcttactttggtgygtagctgtggctgcctccctaggaccagggcacagaaatttcacagtaaccaatgagagagaccaggggccagctccaagccagagtcatttcattcagggcagatgtgatcagaagaccagccaaggggctgtccctctagcaggatgtgaaaacaaggagagtcctggtcaacacaattttgcttggaaagcaaagtggtgctgaaatacctacacctgagagcgattgtcttaatgtggcaggaatgtaaaacaaattggacataatttggagggagggtaatgaggtaccacgaacaagaaaacataaagaatcactaggctcggcaaggtgtcaaccctgtcctaattaggcacagttgttataagaagtacataattaataagcgtgtgaccagatgtgaaatacagcagaggtttttcctgaaatggagggtgtaatgaacttgcgcagctggaagtagttgtcctaatttggcrcaggcggaaggcctgcctggaattttgaagaggtgtagtaagatgcacaccacaggtttacacctgaaaacaactaatcctattccawctggrctggggtgtaatgagatagagctacttatcaagagtrtaatgagatgcaaaagccattggaactgagctggaaatttmtttaaaagtgaactaagacgcaaacaccaggaaagaatttctgctaatggaggtaggtgtgagtgtgatgaaacrtacaccatgtgaggagrggctgctttaacatgtctgggccaaagacgcgtctgtaattaaaaatattgccaggacatttacacacctggagcaagagtccctgggaacctaagaacgcaatgacttgtaaaagccacatgcatactattaagatgtatgtgaccrcttatgtgtgtacaaataactggaaaaaaaawaataaggaasttaggtgttttcgggtgagtgcagttcccattttccttgatctcatttagaaaggtgacctcagattcctgctgactttgcaatagatactctagcaggaacctgattccaaacagaaaacccrgcaatcttctcatcccaaactgatttaattatcaccagctcaagttttctttcacacaaggatttatttactgtgtgagagagatcaggaaaccattagtagctggtttttgtggttgtttttattttatgattgctactacgttattctagacaccatttatggaacacttcatgtgtatcaggtgctgtgctaaatgctttaccacattatttcatttaatcctcacaataatcctacaagatgtatattattatcatccctactttacagaggaaactaaggctcggattaagggctttgcaccagatctggtaagtgagccagctctgcccaacaccagagttcattctggaaccgtagccaaatccaaagctcataccactcgtctcacaacagccaataagacaagacatactcaactattctttccaaataaaggaaagtgactttatttcaggaagccagcaaactgagaagatggcagactggtgtcctaaaggaccatcttcaaaggtatgaatctcaagcttctttttatattgggtaaagggaacaaggagggggttaaggtcaggaggtgacaggtgaccacagacatctgggtgtcagcaagagtctgagggagtttcataacttctttttctttgttcaggtcacagcactcctacaagtctttagcataacattgttcttgggtgtatgcccttcttatctcctcaggggttagtttggggaaggccctattatcatccttgctttaaagttaagctatacactaaattcctcccatagttagctgggcctacatgcaggaatgagcaaaggcagtttgcttgggggttaga

SEQ ID NO: 9907 - DNA, 405740 bp, Homo sapiens
tggcctcctgaattggaagctttatgtgtcataaattacctcaagtaaatttcttctgttagatggtaagcaccatttagagtatgggttattgtcattgtttttgttacctttattattataatcaaggacttgaacatgtcagaagagaaaagaaatcctgtgatcctaacaagaccctgctcatttgtacctaattccaaaatctttaaattcacactgatttgggcacatttattaaaggaacagttattatagaaatcttactctaccctcattctatctccccagtgtttttctggtatttactttaaagacagtatcaaattaccagaaatgtaaagcccacatccctaatgtgtatgtgaaaccaaactacatttgattgtagttgaaggaaattaatccagcaaacagtctggatttcagtttgctgtttacaatatttgtatttctgcatcttcaattctttcagaaactgatttatcttcaataggttatgtaccatccatgatttacttctcttataacataaaaaaagaaatacaatgaggaataaagacaaaggccgggcgcagtggctcacrcytgtaatcccagcactttgggaggccagggcgggtggatcacctgaggtcaggagttcaagaccagcctggccaatatggtaaaaccctgtctctactaaaaatacaaaaattaaccaggagtgtgcccataatcccggctactggggaagctgaggcaggagaaatcacttgaacccgggaggtggaggttgcagtgaggtgagattgtgccactgcactccagcctgggcaacagagtgagaccccatctcaaacaaacaaacaaacaaaaacattaagagttggaagaataataagaaaaaaagtcagtaaggagtggagwgacaatacagatggagcaggcaatgaattaatgtggctttcagatcctttacttcagttttttggtacatttggcctgatgtagaatgtcctacgatgtaggatataattttgaacatggcaagggacctagtatgtgatatccatcatctgtcatccttgtctttcctgcagttcaggatgccacttatcccatttcctgttttcatacagtgtagggctgaagcaagatccaaacaacactgtgatacaaaagagaaacagagggcagcctgctcatcttggagggcacggaaagactagcgagacacacacaaaaaaagcaggccaggcgcggtggctcacgcctgtcatcccagcattttggtagactcttgtgggcggatcacctgaggtcaggagtttgagaccagcctggccaacatagagaaaccctgtctctactaaaagtacaaaaattagccaggyatgatggtgggcgcctgtaatcccagctaytcgggaggccgaggcagragaatcgcttgaacccgggaggcggaggttgcagtgagccaagatcgcaccattgcactccagcctaggtgacaagagtaagactctggctcaaaaaaaaaaaaaaaaaaaaaaaargaaaaaagcagatcttttttcatgtgactcttatgcctgttacaagtaatgctggcaaatccttcctgatcttttcaccaccagaaagacaggatagaaaggcagagagggatggagggagagcaagagggttaacatagcttgttcatttatttactcaccaaactaatatttattgtttgtcatgtgacaggcaccaaggttggttctgggaatttgaagatgaatgagttaccacccttgccttcaaggtgtttcagtctagcagggagaacgatgtttaaaccagtaattaagcttgatacrgcaattattttaatgctgagccacagctctgaacagaaggggcgcagatgtggagacacaagctcatccttttattgagttccctaataaagagcaagatgcttaactctgttgatctctagcttcttcattaaaatgggtgggagagcatcttctcacttgcagacagtgcatgtaaagtgcccagaagagtgcttgacacatrgtgggcattcagcaaatggtagagtgtggatgtactacaggggctatgaaggactcaagggcagtaggaccataggaggggtcctgaagtcacacgtcagatatgcaagaaagaacttcttgcacacckcaagaacactaggtaccaggattagcaaggagttgccactgatgagttggtccctatttcccaacttgccttcactaggtggaacatttcctttaaggttgcaaagggaggtcagtgcgatagctcacacctgtaatccctgcactttcagagaccaaggtgggyggatcacttgagttcaggagttcgagaccagcctggccaacatggtgaaacccccatctctactaaaaatacaaaaattagccgggtgtgatggtgcatgcctgtagtcccagctactcgggaggctgaggcaggagaatcgcttgaacccagcaggtggaggttgcagtgagcggagatcgtgccactgcactccagcctgggtgacagggccctgttccctgcactggaccccactccctctcccttgtcctccccagcctctgcctcctgctctcacttactgctctgatgaccagccagggcaggcctggaggccgaggtcagtggtttgttgggacaagggctggttcccaaaaagccccacaaaaattaaccaggtgtggtggtttgtgcctgtagtcccagctactcaggaggctgaggcyggagaatagcttgaacccgggaggcggatgttgaagtgagtcgagatctgctgcactccagcctggstgacagagtgagactctgtctcaaaaaaaaaaaaaaaaaattgtaaagggaaaagactgtaattttttcctttagtaaggataactcaggtgagaagcccattgcatttttattgcaccaatttctgacacttaaatgtctttcacatgagtcacctattggcacttagctccttgtttacgtgaagaatcccgtgtctccactaaactccttcccttctaggccttccatatattttcctgttgcctttctatcaacyctgtggtttactatatttggaagcattatgttttgaagtcatatattatatacagagaagtgaaatagaatatttggtcgttgttgccacttgtkaatgaaaagtggctactattgggtaatatttattgagctctaattatcaggcaccacacattctatgcattgtatcagtgcttcttggcttttgatggaaatacatgggatatggagatcttaaaattcaggttctggttcattcagtatgagagtagaggccaaacgtctacagtgctgacaagttcaagggtgatgctgctgtccacaggctgcattttgaatagcaagacattgtaccatttgatcctgacaacaaccctattagttagaaattacttcttatggccaggcacggcggctaaygcctgtaatcctagcattttgggaggccgaggygggcggatcacgaggtcagaagatctagaccattctggctaacacggtgaaaccctgtctgtactaaaaatacaaaaaaaattagccgggcgtggcggccggcgcctgtagtcctagctacttgggaggctgaggtaggagaatggcgtgaacccgggaagtggagcttgcagtgagctgagatcgcgccactgcactccagcctgagcgacagagcgagactccgtccaccccccaccccaaaaaaatttcttatttcgtatcatggaaactgaacygtagagaatttatccaaggtcatgttgctagaaagcagtacagctcgggctctaaatccagatttgcgtcctgggatagtgtatataatgtggattttggaaatattctccaacatccaaaggtgatctgatgctacctgaaaaaaattcatagttttagtttaaattttgacccgtttaatgaaatttctttttaatttctctttatgaaagactgtgttaaatggtgattcaaatgtgttggattttgcttctaaaggtatgtagagwttagtatgatttatttgccaaaattatggcctagraaatgtcgtgctattgatggaatccgcattgaacacaagaggaaattgctagggaaggatgcgtgtgaggaaaggaaatcctcaggctgatttattgttcagcgctgagtgtaaacagtgtgctatccttgtcacagccaaacgaaaaaggacgcaatcwctrtcctgaacagatcattcttttaaaaataatattttggcctgcttataaagcatggttcgtaataaaaaatttgggctacagaaatataatacaattaaattatccaaactcccatctttttgtttgtttgtttgttttttgagacagagtctggctctgtcgtccaggctggagtgcagtggctggatctcagctcaccgcaacctccgcctcatgggttcaagcgattctcctacctcagcctcccgagcagctgggactacaggygcgtgccaccacgcccggccaattttttgtatttttagtagagacgggttttcaccgtgttagccaggatggtctcgatctcctgacctcgtgatccgcccgcctcggcctcccaaagtgctgggattacaggcgtgagccaccgcgcccggcctattttctaattttaagtgaatgcatctcaaaagggtgacgaaggaccacattcctatcgaacagcaataattcamtgtggcaatatcttgccacaaataatttaaacattaattgtggttttgaggggcagtgtgcagtgggagtaaaaggggtagggtttagagtctccaaaagatttacttaagaaacacgaatgcactgcttgtgcactgcgcaaaagttctggggtcaagttccaactttcactaaggatcccagaacagcccggcagragctgcccagggctaacgcgctttgctctcaaacccggccgccagtcgccgacgcatgcgcagtctagcaccgtggcacaggcctttctcaagcaggtttttgtggggtcagcaaaagggccagaacagcaacggcaaacagttccgagcctgacagtgcaggggcaaaccagctccaagtgaaaatcacctcgcgaggaaayaggctcagggatcggggcggtttccgcaggcgtctccacacacgcactctcactcactttgagggtgccaaaacaccactaggggcaactaggaggaataggctgaggaatcagctatagagaatggaggggatagagctgcaaggggcgagggggcgacgatctctaaaactttcagcgccgtgctctactgatgctctrggcacttttttcattgctctggggagtctgggtgccccaattaatccgtcgctcctttgagcatttgttgtttagggggtcctgggggaccccatcgtattacagtattcagccacactccccgcaaagccgggaagccgccccgagagaagaccccaggacgccgggggctgcgtgagccccgcaaggctgcaggcgggggcgcgggatcccctttctggccgccgcccccctccgccggcccctcccccgcgccccgccctcggccacagaccccagccccggccgccggcgcgctcccacccgcgcgtctggggacttgcggaccgcagcgagaccggccggcgtgctgggcatgctcagtggcgggccgggcgctggagtcggaagcctgtgcgcggcagccgccgccgagccggccggggcgcacggagagcgcgcgggactcgctgcagcggcggccgggtcgcggcgcacccgggccgggaccggagccgagcctagcgcggcgcccgcgacccgtcagcygcggctcctgctccctcgatcccgcgcggggaaagggccggcggctgttggcgtcggcggggcgcggaggaaccgcggcggcggcggcggcggccgcatccttgccgcccgccccggcccagccgcgtcccggagccgtcgggcatggagccgtggaagcagtgcgcgcagtggctcatccattgcaaggtgctgcccaccaaccaccgggtgacctgggactcggctcaggtgttcgaccttgcgcagaccctccgcgatggagtcctgctctgccagctgcttaacaacctccgggcgcactccatcaacctgaaggagatcaacctgaggccgcagatgtcccaggtgaggaggccggcacgggcgccccgcctccagccggcagctcccattaatcatgcggctaatttctttgtgtaaatgcaaacgtctaggtgcgctgagcttgccctgcytcccagccttctgctttgggaccacttcggcaccactttggcgtttcctaccttggcttgaaatggtttagctcctcaagctgaatgcgaaagctttgcgtccggagatggtgtgaggatttcgtaaaggctttctgtgaggcgggaaagaaataagttgtcttagggtgcccttcacctactctgcgtgtgtgtggcgcgacaaagggaatttgatcaagctcttctataataacgaaggggagggacgaaacgakgtgatggggtaatttgcctttagtctcttcttttgctttgcgtcttgtactcatgttttcctaaaagaggaaccatgacatacatgaggactcgaggaagtgaagggcgtttggtcccgttatctgtccaggagtgacattggtcaaagggaagaacagggagcagaacccggaggccgcccccagggcccctgagctggtggccagccggcaagctcccgtttacagctcttcctaagccatgtgagaaggagcgagtccagcctctctcagcagcgacaggaaatgagaagtttcactagagattccgctttccttcctgcagtgccctgctcaggtgctgtggtgccggtcggctcctggggctggagctgcctctttgagggttaagccagacacctctggaaggttgggtgcaccctagagtcagctcaaaagtcacagttcagtggaagagtagtttatttgtcctgtcggaaaatttttgtacagaaggatgttaaactcggttcagagcctctttctctttcagaatgttaaaacaaaacaaaaaaccaaactgctttcaacttaaaagggagaggacagagccctctccctgacacatttcagcactaatcctctatgacgcagagcctcagctacttagcaaccagagcagcgccttttaagaaggaacggactttatatgatttaataagtatgtatttaaagttagagcacacacagtcatctgtgattcttggtgtcagtgtttcatcagggtcccctgcacttcagattctgcattccttgcctgtttgccttcaacctgctggtgggcagtccctaagaaagaacaggcatggaagtggggagagccatacgtatttaaaagtgaggtaaattattttatacccccataaacatgcatggtgattgctacctctmggtaccccttcagagttgtctcaactctggaaattcctttgaggggtttggcagacttttctattatggtgggagctgcagttagctactctcacacatccccattttccactttgcctgtagcctcaggaggcagcgtgggtcaggatgccttggcccaccagtagggagtacagtactgtgcacatttcctggaacttgtttcctggaactctcagcagttgctctcaataatcacgttttctggacagctgaagacctttttaaacctcgaagcctttatttgaatgctaacaatggatgagaatcgttttgaatgtgtttcactcttctcctcttaygttagatgtaatttaatctttctgatgaccaaagattgtcattataagcatcattaatgaaaattgagcacatacaatgctctaagagttctgttccctagtgggggtagcaaaatgagcacaccaggatacttgccctaaaggaattattacactatgctatcagatggtaaatcactgggttataataaggtaagtaggacagctaatgaccttctttgtgccgttgcacttttgagttcttaagtctgttcaaccttgaggtttctggttccaaattaagtacagtttctcctgtaatgtcctatgagagggtgcttccctcaaatgtgaatcctagaaggctagtacctgagcctggtgatgtctgtttttgctttcctcatggttcttggcctcattgcagagaggcaaggctgctgaacaagtggatgctaggccgatgagtttgtatcwtgcaggttgtcattaaatcctttaatgagacttatgaaatgattttatgaaacaacttgacgtatttaacatgcttatagtgcctagcacatgtacttaataaatgtttactattagcaaaattatgaaaaacattttttctgctattgttatattaagagtaataggttccaatagaaattttaaaacaattgtagaggcctaccggttcctttgggctgataaccctagacattttgccgctaactactcatctctttcttgggaaaggttctagctgtagtgaatacactattaacctggtacaaccctgtcatgtcccagcagaatgtattcccctggagttagagatgtcattactagtacttgtggcgttttggtatgtctgagagtcgttctgtctacttagattctgttgaagatattaatttgaaatagactattttttatagcacatgatctcctaacctgagaaataactggaagctgtcacttctgacttttgtgacatattgagactgtaaagagcagatgttgacaaaagaaattttaatttattgatgttttgtttgtagcctgtttagctttcctgaaagaggctataaaatgaccagccttttaaaatgagtgtttattccagtgagtgggatgcctttctattctctgttagccttctgccttgtttgcatttaaaaaaataaataactgcaaataatgactgctcaattataggtttgaatcttggaatcttaataagttagttgattatctttcaaaataaaagcatggatgggatcccagttttcttacttattgttctttctggctgttgacatcagtttgtttttgatcttgccatcttggtaagaggatgatcttcagttcaaaaataagtatattttttcatgctgatttagtgtttgtttttatttatgataggttaaagaggtaaacattaatcatatttagttayacatttaacatgttcctcttattatataatacagttaaataaaatgcagttggccagtgaatatctaagaaatttggtgtctgkatatgttagattttagtgtctatatttgagatttatttttcatctgaaacagtattctagccaggacacaaagcatgtgaatgattctggaagagaagagcctactggtgatagctgtaytgggtgggcggcacatgctggggttggggctgggggtgtgcctgtggaagggcatgagttattggcttgatgtcacttttagtggttaagaagatcttcatgaatgcctataaccacccctagatctatcatgaatgagagtaccttagtcttagtttgaaacttaaaattttgctttatactatgctttatagtaggggtaatacagtcaatgagtttagtggccactatggacagtgtatgtaaactttgaattgtttaaatgaataattcagacttcaaggattccttcaatgaatatttacttggtcctactatgttccaggcgctgttttagacactgtcttggacaaactcaacaaagtccctgccctaaaggggtttggattttagtagagttgaaccataaataaatgactgtataatttatttatatatttatatttttacatacaatttattgtatataattatttatatatttatctataatgtgctatgaacccatttgaagctgagttaggaactagagagaaatgtaatacaattttatagaaggtagtcaagaaagtcctctccaagggagtgacaattaggtgggacctgaagcgagtraaggaacacaggaatgtcamtgtttggaaaaaagaatattcctggtggagggaataccaagtgcaaagctcctgaggtcattaagtggcaggcatactggaggaacagcagggtcagtgtggttggaggagagtgagtgtgggaaagagtgggaaacgtgaagtcagagagaaaatggaagctcgatttttaggacttgtgggccactttaaggactttggatttcactttgagtgaaatgagaggtcaacagagggatgaggagaggagtgacatggcctgatttacctttcttttcttttctttttttttttgagacggagtcttactgtgtagcccaagttggcgtgcagtggcctgatctcagctcactgcaacctccgcctcccaggctcaagagtttctcgttcctgagcctccagagtagctgggactacaggcacgtgccactactcccggctacttttttgtattttagtagagggggtttcaccatgttgcctagagtggtctccaactcctgagctcaggcagtccacccgccttggcctcccaaagtgttaggattacaggcatgagctgccacrcccagccctgatttacctttcctacagttactttggctactgcattgagaacagactggagagcagcaaggatagaagtggccaggctaatacatcattcaggcaagagatgatggcggcttttaccaaagcaatagcagggcagatggtgggaagartaggctctgaatrtattctgaagatggagccagsaggggtttattgatggactagattagggatatgagaagagaggagtcaagtatgtctccagaattttygccctgagaaactggatgatgaagttcccatttactgaaatggagaggactagaggaagtatggtgttggggtgtatgtggggagaggggaaggaatatctggagctagttatgattgaagtgcctagtagacatctagatgkgtacgccgagcaagttggaggagttggagatgtaggtataaagtttggagtcatcaaggtgaagatggtatttaaaatcatgagactgggtgataccacacagggagtagtgaagaaagaagaaaaagtctgatgagccattggagcatgcctgttctcgagggcagagagatggggagaacctgtgaaggagttgagaggcaatggccatgaggtaggagggaaaccaagtgaacagagtatttttgggaggagcgatgacatgtcaaatgctgctgatcaagtgaaataaggactgaggatagaagatttaaacaatataagtttccttggtgaccttgacaaaaacagatttggtgatgtggtgggcaaacacctgatagtaggagagggttgagacagcaagtatagacagctctttagggagtaattttgctgcaaagagaacagaaaaatgggatagtggctactaggggaaaagaaatcaatatatgggttaattaattaattaattaattwatttattttttagacagagtcttgctccgtcacccaggctggagtgcagtggtgagatcttggctcactgcaacctctgcctcctgggttcaaccaattctcctgccttagcctcccaggtagctaggattacaggtgtgtgctaccacgcctggctaatttttgtattttagtagagacggggttttaccttgttggccaatctggtctcaaacttcagacctcaggtcatcaggccgccttggcctcccgaaagtactgggattacagctgtaagccactgtgcccggcctagatatagtttattttcttatgacacaattcttattttatacctattgaaagagctctttagatggacagattttctcatatggtactcttgtgtatatgtatttgtatgtgaaaagatatatctatataygaagaatgagaacatatgggcacagggaggggaacatcacacaccggggcctgtcgggggttggagggcaaggggagggataacattakgagaaatacctaacgtagatgacgggttgatgggtgcaggaaaccaccatggcacatgtatacctatgtaacaaacctgcacttgcttcacatgtatcccagaacttaaagtataatgataaaaaaaaataagtaaaatttaaagtgttttaaaatcttctttttgttcagattgtgactattctgaataccacttgaacttagagtcattgattgccatgtgttttcatacagtgttgccctttgaacatctagtgttggtgatgcagcattcctaaaataattcatcactattgtctgtgagatttccttctaagctgagttttgatgctgctgttattattttaaagagttagtttctgctrtacacaaccatacattgtttttaaaaactatgatttagttttagcattgaggcatgaattccaaatacatgtctacacactccctcctcccatacaaggtggtgtgacttacagatttttgggttatacaaaagggaaggaggaagaactgttatttcccaaaaagaatggtgtgcctagtaacatttttagtcagttcattcagaataatatcattccttagtcttctcagaagtcattaacctctttgccatttgttaggttattctcttggataatctgccagcataattttaaactcaataccaatcaggatcttttcatgtaaagtagttgtggcatctttaggcatcttaagcacttgttctgtctgygtgattggtggcttaacctaggttctctggaaagcagagcctggggtaaggcactgaagtactgaaaccctcttggtgaggtacaatcccatggcttgccagagtgaggaaatgagatygtgtctttttttttttttaagatggagaaaattataccatgtttgcaatacaaatggggttgatctagtatagatcaccacatattttctaattttcaaatacagtggattgtttttattatttttctcgaatccyctgtagcaattgatgttactgatcatccccttctcctaaaactctctcttccctttactctcaccacaccatattctcctgattctcttgtacctcttattattccttctcagtttttgtttgtttgtttgctggcttctctttattgaaacatatcttaaacattttagagttttctctttagttgtgttttgatttcatattcgcttccctgtagcatctcatgacatctgtggtgttacctaccttgctggatcccaaattcatactgacagcctcagtctgcctgttttacacccctgcctctataattacagtggctccataggtatgaagcctgatcattgtagaaagttcactcacaatagagaggggtggattggatgggacaaaactaggcgtgagcaggactggtactgaagtcattcaacagaagataaggccagagaaaggaggygaatagagggatagagaggaacaaaaaagattaaagtgataattatgagttgggatggctgggactttgcaaccttttagatacagagaaagagtggaaagtatctaggttgagacccaggtttcagcatcaggtgacagaagtgtcataaagaaggggcacattttagtgagaaagggaacacattctgtcttggactctgagttggaagttattaccagttaccctctctcttctcagtttcatgcatcccactctcttaatacccctttcttttgggtttgttctactaatacctaaaacccaacaatcctttgaactcattgcttctaccacctcttaacttcctgattcagttttcatttccttcctacttagcttaaatactatagccattataattccttgacgtccctcgatttgtcctgcttgtttggataaacaaaaccctggtaaaattcaacttgttacttattccctgcttacaactgagctgctgaatgtaatggaggaaaacccgcaccgtgctgactgctctcactttaagttcatgatccctaacctcaagtgggcaccttgggccatccagtcatctgattatatttctttaatgttctcaaagtatggtctggaactactggcagtccctgaagtgcttttacgggtcctacaatttcaaaactctctttatggttttatttataatcgaataataatagattatttgccctcattctcattttctaatgtgtatatagaggaattttccaaaggctgtgtgatagtgcctataccgttgctgtggctgactgtagcatatatgcttgtgtacgtttcaaaggcttatcagtttagaattctagtatgttaaacattaatagctgtgaaaccccaaacaaaagctgctgaggattctcaatcacgttttaagagtggaaaggggtcctgaggaaaaaaaagtttgagaactgcccgagaccatttactttttgactctccagatcactctgtactaccttttcttctttccttaaacttaacttaatcacccgtttctcccttctttctctcaactcgtaatcttacttcctgttccactgagagaaaagacaaaattggaggagagcttcctcaggctcccaccttcctgcatctgtgctcatagatgatgccttctctcctgcactatgagtgagttaacagtgctcctggccaaggccagtttctccttcactcttaccccgatgctcttctgcatcatcagttctcacttggatctttcccatttgcatgcatgtatgccgttgttcccttcatttgatgtgagatatattttcagagtagagatagaaacatgtggatgaacattgggtgtgatggagagcgactaaggatgcctagggtttgatctgagctactagggcagatgatcagacaacctccttataactttagtggttcctgatggaccatgggataaaatccaacctccttagtatgcaagagctcatggtcttgtgctgcttcatctctcaaagctcttctccactttgtactcctgaccttcttgcagtttcttgaagactatgctgttaaatgtctctgtgctgttgcatatacctttttgtctgcttgaagttccctttttcatttgtctacttgwagattcagttcaagagtcatctttgtattgtcttccctgacttttctcccaggtgtggctgagcacatgctgctttgtgccacagtgtctggtagaatgcagcatttcttgctgttttgcrgttttttttccttatccgtctcccttccaggctttggcttgattgaggatgccataggctagttcctttatatatggcactagaaatggacacagggagtcatacctaataggcatacataaataggcatagattaaattcatcaatgggatgaaaatggtgactctttactaccttttcaaacatctacaaattaaaaaaaaaacatagccagcactgactgtcattaaaaaccaaaaatacttaagtgccattactaataatagcaggtaacattacttcaccacttaccgagtgactctcagaaagtgamtaaacctgtctatctgtctgttctttagcttcctcatctctaaaatagaccaaataaaagaacctacctcctagggttcttgtgagggctagctgaattaattaatgtgactggcttataacaagtgcccaatagatgttaactattttttactataatgattatcactgcttctgtggaaacatacaaggcagttactaaagctttccatgcattatctcatctaattgtccaacaccgtgaggcaggcactgttatttatccccatgtggtggatactctctgaagmtaagaggggtttagtaacttacaccaacaagtggtttgtggtagagccaaacttagaataagaacattaagagcgaactgaattcttgtcagcgaggctatcggcctatctgaatgtgaactgcgatgaggactgcaatgaatttccccccctcccatggtattttcctgttgtgtggggctcccttggaggagtgttctgattggccttatggctgttgttaatagcacctccttactagtcagatattgagttaaaattttgcctcaggacaggagaatagcttgaacctgggaggtggaggttgcagtgatccaagatcatgccactgcactccagcctgggcaacagagcaagacttcatctcaaaaaaaaaaaaaaaaatttgcctcaggatactgaatctggatgatttcatacacatttatcacactattcagtataaaatgggtgttagacttttgacaggtatataatgggaaaaggaaaggaaatcaggaaaactaaggaaagttaatgaggggaagagagaaagtgagtgtagctgttcctttttrgccttttaatactgtgccttgtgacagctggtctcaagcacatggtttaatgctctgttctggagtcaggagtgcctacatttctctgggaagcaggaacactgttgtttaaaatgatgtgctttgatagggcattttttttctattataaatattctttttgtaaattcacagacaacctattgttagctattatttggagcattattttatcatgtttttcatcctctgttaacatagacccttcatggtgttaaagccagtcacaagttgacattytggttttccttaatcttgggcatttagtggatagaaccatgaacagcaaagtagttccttttgatttccatgtaaaattatttttaaattgtattttgtgctgctgtctgaatgtgctttcaaaatctgtgttacaagaagtgtattcagtttttgagttgcttgcttaacaggaagccagcagcacatgctactcacatgagagttctttaaagggtcaattaatatggaatatttaatgatacacttgatactcaccttccatggttttcagagtgcctgtcttaaaatagatctgtaacagctggtctgaataaacaagcgtcgtgcttccctatgccttttcctgggagcatgggggcagcatggtttaatgggaacacttaaggtcaggagtcaggagacctgggttctagtcccagatctgtctctgacaggctgtgtggccttcatgtttccttctctttgcctctggcttctgtacttatagcaatagcagcggatacttacatgtgcaataatatactaaatagcaactaaaatgttttacacatatcaaggcagcattatggtttcatgatcagggatcaggcagaaatgattgaatcccagctctggcacttaacaacactgaccctgggaaagttactttacttattgaatctgttttctcatctgataggcaagaaattgtggaatttctttgcaggattatggtgagaatgaaaatatttaaatgcctggtacatggtgggtacttggtaagattatttccttccttctccccactgcctccccaatcctcatgtctatgagacaggaagaataagatcttatcactgctctacagaggaggaaatggatatgtgccctggctaaagggcttttctcaaggtcacacagacaggaagtggtgaagacaggacttgagtccaactgtcctaattccagattcggtgaagtttcccgttcctgctgccaaattcagtggatagatggcaaattgcatgaggaaatgactggaaaagtgctttcaaaaaacaaggcaggccctagaaatgtaaaatgagattgtattattttgaactgaaagttgttctatttaaaatgaaacatctaaaacaacgaaatttctgttattttttagtctgattagtttgtggattatttgctttttggtaattttatagcccctctactttctgtttgcttctgttttcatgraaatttgtgcaagtgaagcaattatttaaatcatcacattgtctgctcaatgttggactttgtrgtagatgctgggtattcaaatgtgaatgaaactcaatccctgaccctgtgttgcttttagtctatacagtacgggttttacttcatattttcccttataaaacagtggatgggaagggagcygtttgggttagagtgaatgggcatggctaaagtttggtaggtgggtaatgcttttctggatacatagttaattttgctcatgtgtacattataccactaatgtcacaaaatggatttatttatgtgtgtgcatggctcaaggtatttctctcctgtctttctttttttaggttgaatttatgtatatatatatatatatatatwtatataaagttttgttataagttcggggcacatgtgcaggtttgttacataggtaaacgtgtgtcatgggggtttattgtgcagattatttcatcacccaggtattaagcctagtacccattagtgatttttcttgatcctttccctcttctcatcctgcactgtctgataggccccagtgtgtgtggttcccctccgtgtgcccatgtgatctcatcatttagccctcacttataagtgagaacatgtggcatttggttttctgttcctgcgttagtttgctaaggataatggcctccagcgctatccatgtctctgcaaaagacatgatctcattctgcatagtattccacagtgtatatgtaccacattttctgtatccagtctatcactgatggacatttaggttgattccatgcctttgctattgtgaatagtgctgtagtgaacatatgtgtacgtgtgtctttatactagaacagtttatattcctttgggtgtatatcctgcaatgggattgctgggtcaaatggyatttctgtctttaggtctttgaggcatcaccacactgtcttccacaaatgttgaactaatttacactcccaccaacagtgtataagtgtttctttttctccataatcttgtcagcatgtttttttttttgactttttgataatagccattctgactgatatgagatagtatctcattatggttttgatttgcatttctctgaagatcagtaatgttgagctttttttcatatgcttgttgactgcatgtatgtcttcttttgagaattgtctactcatgttttttgcccactttttaatggtgtttgtgtttttcttgtacatttgtttaagttccttatagatgctggatattaggcctttgtcagatgcatagtttgcaaaaattttcttccattctgtaggttgtctctttactctgttgagagtttcttttgctgtgcagaagctctttagttaattagatcccatttgtcaatttttgcktttgtatttctctctatagacatttgtacagggcacaaaggcatagagataaatcatatgaagttcccacttttagggggcgaagagaaaatggagttgatctgggagtcaggcttttgcaagaatgcagaaataaagttattggatgttataagactggtgcaaaagtacatgcagctgggtgagagagatgagaccaagaagaggacagagacatgaatggttactacagaggaagaaggtttgagaaataaaactgagtagagagagagttwtgtgagatgaagaatgtgcaaagacattgagatctcagtgatgtctctaacaaaaatctattctgaacgatgatgtaggacccttaataacattagtactggaaatttggccataccatttgcatttgtcaggaaagacattgaagtacctatctttggtggataggctggagcatgagatgatggtctattctcttgaatatcttgaaagttcagggagcaaaaactatagaatcaaaatacttaatggacatctaaagtactgaaagtaaagaggcttgctctctctcctctctctaacctctagacttgctacttctccctccctcacatctactaagccattatcctccctgtgctctttagttgactgatatctcctcctttcctggtccatctggtcttgactgtgtactctcgagtcctgtcagaatttatgatcagcctttccatttttactccaattcccttcaccttctgtaacatgagatatgccagtcacctgactcctagagcaccctccttctcaggctttgctgcccttgcccgtgagcagcagagagctgttggagaaagtggcttaccaccttgcttttactgtctgtgttcactgcaacttgcccctgctttcattcacctctttgcagtgcctcataacaacaccctcytggctttctgtcattcccctggtcatgttccaacgctccaaatcccagacaccctgaatccctaactctcgcttagtaccagcaagctcaactagtcctcatcattaccacccagtcctcctgaaccctgacttgtcctcagtctgtcccattccacacactacaatggtgactattattattgttactagaagtaacagtagcaactgtgccaaactttacaagttacatttatatgcacatttttgccttctgattcccagagagagttttgggtcttgaagtagatgtttataaaattagaatctcagagagaaccaggtgctgtgagaactttgattctgagaagttggacactatacagtagaagtacttttttttttgttttgtggtttccagaayccaggggtgtgcttggagagcrttatcgatgaaccagaagctctcaagtcacgtttttcagttcccagcagcacccaggctgtttgtcccctcttgcaaccagctcacagcatctgcttatttttgcaagcctgttttcagtaatgttatgattcagtagtacaactttcttttaatcatataggcaatacctgatagaaaaagttggtctagagtaattctgtcacttatcaatactccacaatgtaggtttagcagaaaactttcaaatatgagaaagcatttgttggctaaggaaagttagtaaacttagttcagtcagccacacaagaaatgcataagttgagattattatgacaaatagaactgtgtgtgtacatgtactttgggattctgtaaaatatagcaattaattcatcctcactaaggaggaagcaggaactgagagctctggagctcagaatgagtggtaacacaaaagatttgggtacttccagagacactgtttaagatgataatgttcaggcctataatcccagcattttgggaggctaargtgggaggattgtttgggcccaggaattgaagaccagccttggcaacatagagcttatctctacaattatttttttaattagctgggcactgtagcacatgcctgtactcccagcaacttgggaggctgacgtggaaggatctcttgagcccgcagggtcaagtctgcagtgagccatgatcatgccactgcactccagcctggrcagcaaagcaagaccctgtctcaaaacaaacaaacaaacaaaaataaacaaraagaaaaaagattgttcataagtaattgttgaaaaataaatgaattatatgtaaaaaaaaccagaatgtgacataaaatgtttcttaaactacatataaatgcaacaagctaaacttcatttatgcaaatatttggagagtttctagattctgactttgagcctaagggcttttaattaatacactattctaataagcttgtgaggcagcatggtataatagaaattgtagtttccattccttttcattaagcctgtttaagtctaaggggatataggttgtaagttaaaatgggaatgaagcatagttgaaagttaaatttgcagtagtaaacactgtaaaacatggattcagtaattaaaaaaccatattaatcttggactagaatggtcctatttgaatgaaccattgtggcaattcagtttattgtttttgtttgtttgtttattttttttttgagatggagtctctcttgcccaggctggagtgcagtggcatgatctcagctcaccgcaacctccacttcctgggtttaagcaattcttctgcctcagcctcctcctgagtagctgggattacaggcacataccaccackcctagctaattttgtatttttagtagagatgggatttcrccatgttggctaggctggtcttgaactgctgacctcaggtgatctgcccacctcggcctcccaaagtgttgagattacaggcatgagccactgcgcctggccagctttattgttgaaagagttatatacaattatagtgctgaaaaaattgttacagataattctagttcagcaacttggttttaaaaatgagcagtccaggtcctctgatatgtatacaatggtttgaccaaggtcacttggtttgccagaaccagtctaaatgcaggttttcattacagaacactaatgaccctcaagagaagtttaaatcatgtttattctcttacaatttttttttttacaatatcaggaagtacttcagaatttctcatgtgaagcacttactatgaagaccttattttctctcattcatgtatgtttttcattttttggatgcagtagtttaggggaatccgtaaaggtgagggtacagagtctcagactttggagcttagaatgttctgggagaattgaaaaagcattgaaaaatgattaatgaaaattataaaatcaaagatctgatgcttaaaggagtaaatccacagctatccaaaacttagccattcakcattactcagttcctaggagagcagttttgctattttaagccaggtaacaaaaatgtgtcccaaattcccaacggtatgagtattcatgtatgtttaggcrtcaccataagttattactcctaggttgtgagttccatgaaattagggaccatttgtttgtcagtttcctgttcttggctcagtacctggcacagggtgactgctcccatgaatggycattgagtgattatttaatgaatccttcacattggccttaatgttggttagatgagaatgctagatattttttaatcctaggatgaaaaaattataatattctgccagtagttctgcagtgggaggcagcatgttatattgaaagaatatggactttagcattggccagacctcggttcaactcatgcaccattaggtgaatggctgtgggcaaattccttaatctctcagcatattaattttctttcttatggagtggggataattcctactgcagagtattgtgaagagtaagtgaactcagatgggcaagatacctagcacagcaccagagatgtagtggacagttggtaatcatgtgagattctttccmttctcctgtcccacaccatcctctgatcttctcatggtatagggctttcctcacagttcttttgggaactcttagaactctataacttcgcttgtctatggcaaacttttcttctctgttgtagtcatctttgtgcagatgttttatttagattcattgaatataagacttggaatattgtggctttcaaaaatgatataattggcacatttgaatctgtcgatttgtctgttggcaatttcatatgtgtaacactctacccagaattgggagacctgcattccacatgactccattgctgataaactcagtgatctctaagtctccattttctctgtgatcaccagtgggtggcattttatagcaaaaaggttatagkctctagagttcaaattttggatctgctgctaattagctggatgatctagggcaggctcttttccctctgggttcccttggcttcctctggaggacaccactgtctgtgctgtaggctgctgtcatgatttgataagataaagtatgacaaattcctgcctcagagctttgaatgttgtaaactcttaataaaagagtggcaaaacaccttccactaaatactattatggttggtgttattaatgtctatttcccttgggtagttgagggatccagtaatagaacataactattatagctgaagaattttagaagacactgagcaatttcttcaaggtcacataggaagtgataatggaatagcatgtagttgtgaaaatgaggaatagtccatcttattaatatgctccttatttgtggaatcagttatttggattattttcagtccttctcttttatggatagcatgactgtccatgtccttgtgcagattattttccccctttggattttttccttcagctttgttttccaatgcgaaatttctaggtcaatggtcataaacatttttgtagctcctgttaacatattgccagatagtgtgcagagaaacagttctagtggacaaaaagcacagatttccaaagtcttggttaaaaacaaagacttgagtggcatgtagattttattccaatctcagtcacttrtttgtgaaatgactttgtayggattacttaacccctctcaatctattttctcatctgtaaaatgggataaaagtagctacctcatgatactggtcaagctattattgcagggtgtttatagtgctcagccttcattatcttgaatccatgtctgctcctctccactctccatctttcacttggaccactgcctcctaattagtctccctatgtgtattctacctcatgccaatccattatcccatctacattgtcagtaatcttgataaatagccaaaacattaatcttatcgagtgaacccctttgtaacccttagaatgcttccccatgcttggagtatggaccctgctgccctccccagcctcaactccctcctctcgctcattccataaacagccattcccagaatttatcacaccatttttttcttctggagttggaacttgccattttcttttgtttcttggtttccaaataccccttgtatacatcttatccttttaaatattatttttgtgactgtttttcttttctttcctttttttttttttttgagtcggagttttgctcttgtcrctcaagctggagtgtaatggcgcgatctcgattcactgcaacctctgcctcccaggttcaagcgattctcccgcctcagcctcttgaatagctgggattacaggtgcccrccaccacgcctggccaatttttgtatttttagtagagatggggtttcaccatgttggccaggctggtctcgagcttgacctcagrtagtccgctcrtctcaacctctcaaagtgctggaattacaggcatgagccaccgcgcctggacgtgactgatttttctactagatctaagcttcacgatggcaggggccacttatatttttattcactgttgattcctggggatcagcacaatgaccagcactagtgctcaataaatatggaggaatgtataaataactatataataactgttattagtagcagtaaacaagagggaaataattttagatatttgttaaatgcctttgtaagtttaaattgctctgaaattaaatatgtaggtgtttttcaagggcctctaaaaaattcaaatgtatcttgtaattaaataagatcttgtttttttcttatataatctttcatgttaatgagggaaagtctgaagagagggcaaataaacatagtttaatatctatcagcttttcatcttagccagcattcttcacccaagccctataataacattacctaaaccatccaggtggctgggyatagaatcatcttgagccaaatagcagaaggatttaatgatgaagctgaacattcttaaaagattagattatgcctggtacatttcctttcatccgagacctcctgccattttggtttgcatatcccaaaagtgcaagctatttcatattacactcttaacttccgcaggttcaaaactgcattttgtggctgggcacagtcgctcattcctgtaatcctagcactttgggaggccgaggcsggcggattgccagagctcaggagttcgagaccagcctggrcaacatggtgaaaccctgtctctactaaaatacaaaaaaattagctgggtgtggtagtgsacgccaatagtcccagctactcgagaggctgaggcaggagatttgcttgaacctggaagagggaggttgcagtgagctgagattgtgccactgcactccagcctgggtgacagagkgagactctgtctcataacaaacaaacaaacaaaaaactgcgttttgttcattcagaaatagagttcattctttcattcattcagcatttatttcacccctacaatattcaaagccctcattaggcactgaacatataacaaagaattcaggttataagagaggtatattttggaggatacacactctccctgtatctcatgtttacctgtggaagaacttttgttagaatattagcatatacctgggtatgtatatgtaacttagtttcttctgggtcttctctttgagacttacttacctgcaaagatggcagtggttttacagtctattctcatttttatgacaagctaagcagagtaggtcatgtctccaagggagaggcttaccacatggggagagggtaagtagaagatgagagggggtccggcatccttaagccacagtttccaatatatgttaagttttgttaataaaaacacctacatttcgatctgttttctgtatctttgctccttgggtttttcactcagtaggaaagaggagtatttattattttgaccttgggagactgtgaagcttatggcagcctagcctacaggcaaatgactgtcaaaaccaggcacagctgtttgtgatgggtgtttaggccttagcaagtgcaggatgcactggtcctggcaagtggagccatgctgggctttgtgggtgggctttttgggttttgtgggyacagcttggactcgtgttgcaggtgaggcttaggaaggggtttgacatttttagtcatttggggtggaatagcatttgctgcttttactgtatttcagtcaaggctctaggccacgacttcaaactgtaaaagccacagagttttgttttgttttgttttgttttgagacggagtctcgctctgttgccaggctggagcacagtggcaccatctcggctcactgcaacctctgcctcccaggttcaagcgattctcctgcctcagcctctcgagtagctgggactacaggtgtgtgccaccatgcccagctaatttttgtacttttagtagagatggggtttcaccatgttggccagatggtctcgatctcttgacctcgtgatgtgtgtgcctgcctcggcctcccaaagtgctgggaagttttaagagtgctattgtgtgaggttctttctttaaattgtgagagacaagccaaggaaatgataaattggcttcaccacattcacttaattttgttctaggccaaatgaaggccctggagggactaatcttatgtaattttgtagtttatctacaaatcttaataggccacctgtgatatgaccaacctcaactgactaatcaagagcagaccaagaaagcatcctctgtatacgtatatcaaaacatcactctatatcccataaatatgtaaatttattacatatgaactaaaaataaaaaggaaaaaaagatggccagaagtgactggccaccaagactctaagagtaggagatctggtgtgccaaggaaaaaggaattgaatcagaactaagtcaaaaaggaacacatcctctctgcagagaagcaggtctcaaagacaagacctgtgagaagctgaactctacactgcctagggggaagaagcattgttctaataccccaacagaagttcctctacaagaaaacgtgagttttgtttgctctggatttcataattaagttctggccattaggtcatggaactgtagctgtaaaagatgttggattttgttatttagcagataaaaaggaatgggggtggcccttaagaaatatatggcatattcttgggttgagatagacaagcaagtcagtaatcttattgcaaaccagaaagttaagaagatgattacaaaggccgggggttggtatggattctagagatcaggttttcttagaatatcaaggagaaagtagaattggtttgaaaaataagttttgttatgatcagaaaagaagcagtagtagactgaaaagactaagctaggagaaatgttcacatttcatgagaggtatgaagggagaaatgagatcttaagtcaggatacacagatataaaaaggaaaagagatcactctaatgattaccaattagaaagtgtggtgggcctgaagaagtgagacaagatctgaaatttttttaccaggttcagaaaatgttgccaagtgtccctttaaagatgtagtgagagtctgaagtatgatttgtaaggccaagggctggatatggtcttgcattttgtacactgagtaaagatttctgctagtagaggttgaaatgcaactgctgtcttctcrctgtgggatctcaccagggtttacatctgycctggaggggtactttcttctagtttgtataaaatattcatcatctcactaggctagtgttggtgaccctgggatagcaatatcaagtggttacagaaaagttgcatttgcaggggaaagcccagcgatgccagcataacatactgaagaattcactgagtttcaaggtgttaacattactgtgattgggcaggcaggtatcacttgcacgctgaaggaacattctcaaagttttttggagttcagactctaaggggaggcaggaraagatgaggggtattctaggaggagacagtctagggctggctggatgtggcctgatgagagtcacctcctgactgggattatgtaacttgggaagtgaaggttgacaagatttatttaaataatgcattttttttggtaggggagatcatattcagaaccttaaaattctctgtcatctgggagattttatgataaaacattgagraatatgttagaaaatcaaatatctgktgcaggaagttaaagagaaagtaagccatttatttctacccaacagtgatagctctaaagaggaagagacaggaagatgggaggagcctctgaagttttctcaaaagaaaatgggatcagtgtatgaaaatttaacatgagggatataccctacttctggcaaaacmaacaaaacagaagtactgaggacctggtcattaaaatgtacagaaactctaatcttttaagtgtccataaaaaggtgtagctcgtcacaggccccgaaggatgttggcctcggaaatggttctggaatcaaaagaagttctcgaatcttctagagttcacttggaaaaaatgagaggactaagagatgaccttcctcaggaagcagtttttacagcccaaagcaattacacagcaaaaagccgttgcaacagatgctgttgcccaagactaaaaatttctgcttgtaaaagattgtgaagatgatgactctactacgcagagaccacattcagtttagtcctttagtactagaaacatgggactcagaagaagtagaagataggaaatttagaatgtgcgggctgggaaagaaaggttctacaaatagggcctggagggactacggttgccaccactgcaaatttctgaactttgaaagaagtgagtgatgctccaaatgccaggctttgagggagaagacactttgcaaagtcagattttttcctgccagtatgcatggggccaaaattaacctcctgcttgaagatttcttctagttgagggttttttttttcaattgtgctaaaatatacatagtataaaacttaccattttaaccatgttgaagtatattgttctgtggcattaagtacattcacactgttgtgcaatcatcaccaccatccatctccagaaccttttcatcttccccaactgaaactctatacattaaacaacaactccccctgaagcccctggcaaccccctttctactttgtctctctgaatttgactactctagatactgcatataaatggaatcatacagtttttggccctttgtgactagcttattttatttagtttaatgtcctgaaggtttatccatgttgtagcctgtgccagaatttctttcctttctaaggctaaataatattccgttgtacagacaccactttttgtttgctttttcattcattgatggatacttgtctcccaatcgagttttaagctttagaaaattggcatagtttcgcaggcatcctggcaaggctgaaaccaggaggactttgtttttatttgtagaaccttctctatctttcaaatgtcctggagtttctgctgttgtctttggaagcaattacatggctctgggttatgccaaattctggattctgggaacactggcttgcttgttgtggtagctacttcatggcctgaggattagctttccttttaaatattgtgggtgtggggcagatgatagtcttgcctgaccttataattctttggtctctttaaaagtggaggatgtcaaagatttgagataacgttgactcaacatctgaggctctgaaggaactatactttcttcattacagcttgaagctgtttcaaaacaaacaaaaacaacaaaaacctctacaattctacccaggcatcaagagctcctccagctggtaatatagaatacgaaatttgagaggatgaatttgacctttaatattgttggactttgtattggatatctttcctccatcacttcaaaatcgtcttgcttggcctcttattgcaaccacagctgcagtagacagttccatacaagcttccaagaacttcatgggtacatctggagagcacctcacctggggccacattctctacctktcctgtcttactcttcctcctctgggcttctttctggtgcatgggggtggggggagatattaagtattccccaagagcaatggtcagtttagtaattcgtctttgtatttttcttccttccttccccrtttttaatctgctcctcaggatcacttcaccaactaaatcctgcattcaggattttgtctaaacttctactttctgggaaactcaggctaagacagactatataaagatgctccatgacttagatggggttatgtcctgagaaacccataagttaaaagcattgtaagtcaagactgggtgttttgtagacatgatgggatgsaaaaccaaaaaacactatatccaaaaaatgctggcatcacagttacattgtagagtattggttgtttaccctcatgatcacttggctgactgggaggttttgcttgctgccgctgtccagcatttcgagaaagtacggaactgcatattgttagcctggggatagatcaaaattctaagtacagtttctactgaatgtgtacctctttcacatcatcatgaagttgtaagttgaaccatagtaagcctaggaccatctgtgtaaaggcaagaaaatttgagtctagaatttaattcctttagaatttaacatttttggacttgcaaggagatttagtttctagtctttaatatcttaatggaaaactaaggtttatatttaaaattggcgctgttatcttagtgtttagaaaaaaaaactagacaaatttaacacagtttaatgaagccaagaacgatttgcaaattgggcagcccccagaaccagaataggtccacagcgattctggggctgccacatgggaggataacatttatggtcagaaaagggaaagtaacagaaaakggaagtgaggtacagaatcagctggattggatatagctcagcgtttgccttatttgaacacagtttgaacagctggccacctgagattggctgaaactctgtgattggctgaaactctgtgattggtacaagagtaggttatggtctatttacacatcccattaggttacagttcactgtgtccatatgtgcagataaatctttaggccaaaattcctttttcattgttcttttgttctgtaagtgctcattaaatgcccagtacattaggagcctttgaggtaatcaaagctacttgttgacatgagaatatttgagtacttcatgggtttagtgtcatgagataatatcacataaaccctttgggtttaccaaaacaggaaacatggagagaaaggacaaccaagtcatccactgggcacttctggattgttctgacatcctaattatgtccytaggctgcaagctcttccctccatkcctgcttcctcttccatttctgcccctttcttatctacagacctgtttctacagggaacagatatttcagtctttgggaatttatccctattccctagccccccaaaaaacccacccctgtggtcctgatagtttcctcccttgagaatctagatccctaagacactcctgcctctcgccttcttggtcccatctggcggctccttcctcctcagctttccttgagtttagggctggcccttgaccttagtgcctgaaggatagaaggtggggacatttctcgaagttggttagcctgttttctggctcggggatcgcctcctcttctgtagggtaattgtttcccattttcattcttacccttcccaccacctgtttatatatgaagggtcaagaatacctatagccctgagtccatcctccctggctccccaagaaggttaggcttgattccatgccaggcatgttgagaagactgcagacatgctctgtgtgacagagtgcattttatgatgcttcaaagcaaggaggcaaagataaaatgatttcatttttctattttcagcttttttgagttgagggttgctggcctatgaacttgatcacaagagccttatttatttggaaaaatgtattctaaattctaaggactagacatgttagtgtactacattctaaaatttttcttaaattggggcctacctatagtgtatagatattaatgcagtcattatattgtgttaataattgggactacaagccttaaccagagtcttagaattttatgaattttaatttataattttattttaagggtgccactagaaaccttgtgattaactttaagggctttttggctgtaatgactgtaattaggataattatgcatactttctttagcattgtgtcaacatgatagtgagggcataaacagccaagaagcagttataggtattccctgctcattttgcattcatcacacattcattgaatgttttgtacttatctcaaatagtagaggataccaatggtgtaagtttaagaattacatggttcttgtcctccagaaaccatggagtccagcaggaaggaaatgacatactggtatttggcaggcagagatggaagtttggtttgaagaaaaccttttgtgctgatgttacagctgctgcagtcactagccacattcattgtgcaaaggctggaggattccacagtcagcatggaagggaccaattagtcatgcgtgggtttcatccttgcctctataagaagtaacatctcaatagtcatggtggtgttttgaatttaaataatcacacattatttcttggtatgtttttcagatcgccaaatattgtggttttgtgtcacatgtgcattatttgttaaaacaggattatggtgtgaatgatggagctgtttttttggggtggcggtggagggtgttatgtttagactgtcactcttgctaggcatcctttgcctgactgtgtgtaaggtgtggcaatctcagtagtcacattggccctcccatttcccgtagtctttggaaatctgaccggcagcrttgagaagtaagtaaaaggggtgccctctcagatgtcccttccttttaaggaatgatgtgtatcaaatcacaagatcggtcggggaagragcagcgtgacacaggtgtatcttttctgtggtttgcgatgaggcataagtgcataaattccaaccaggaaaggaagtgcagggaattctactctcaggacatccttatggtcctgacaacttctttggcaatgtcagcagcccttggcattttgtcatgcattcttctccaacttgaaattcaggcttagtgcatgcagtatgccacagtcaggcttgtggctactccaggaggggagctgtgactcattcttgagtcacttggccagctttggtttcaattaagcaaatgaatgaaaacaattaaaaacagaagttgccgactaaggctaataaaagggcagcagtaatttttgtctactgtcactgttgtttctctagattgtcatatctttaaaaactyggtaagacaaatctgttagtgtttgattttagatttcttgtttataatctaaaaatcagacccagaatctgatttacctttttggttctaatctagttatattgtaattctaacactatgcacaactaatttatatattaaatatagaatttttcattggctaaatgcactttcctcaaatttgtaagaggttttccactattcaaaagtgttacatgttgcattaagtcattgttgattattcaaattattttcagatttattttccaagtactaaaaaaaattgtgggtgtattttcaggatgttttatctatcaattcatatttttgagcccctcctctcccttctcaattcacattttaaaaattattagttcatcaaatctaggaactgtaataatgtcctacgtttacttttctccccaaatcataaaatttcagtaaagtttccaaaaggggcataaatgtgtcctcatctctcacacactgaaaagcaaaattcttcaactgatggggtattttcacctctttgatgtctgtgtgcctctgtcatcggtgtagttcagagccttatctcccttccattagaccatcacctgatataccatggtttctttcatctccttgtcattgtaataggaacacctttccctttgctggttaactcctatttctctgcaaaatacagcataggtaatggccttggttggcctgtctgtttttggtgcctctcctgtgtgcctccctagcacttcccctttgtcatggtgcacaccactgcaccctattgtccctttgcctctgcctaccttgctgtgaacttattcaggtcayggatggtttcttactcatttctgtaactgcaatgagtaagtgagtgaatgaaatgttcatcctcattctgatggggaaacttatttctaattttagggactgaggaccaaatttgtgtatttgtcagacctggcttttcattttctccaaccactgaacatttcagtgctcgtaacactgtaggagagagtagaccctgtggtctctgtgcagtaggtgctgctgctcctttcttcctggagaattatatatttacttctttgatataccttatcactgtgaattttatttgctgactggcagtgtaaactctggctttctagaggtttatcttaggaagaactcaatatttattcacttgaatgaaatcaaataacatttggcttaattgctttaaaatgaaggaataattagaagcaactgctttgctttggagaactgtaggaaactgtaatcttacagctgtaattgcccccaaatggagaagaccttaggaatttatgttgaaagtagaacactgccaattgttctcattggcaaattggctgatatgaatgtttgccaaccggaaacttgccccatcagttcgcgtaatctgtgggaggtgaatatattttatgaagaaaagtgatagagggaaattagaggctattgttactagtgtgtgatgggttcatgtactaccaactcttctcctcaaagctgcagatagcctggtcgtgcaaraatttgtttcttgtagcacgtctcctctcatttgcctcgctgtgccgctatattttgtttagcatgtgcttttctcttaataacaacacagtgattcacaaaattccccagagtgtgtgttcagtctgaaattttctgaatgtgatatttgaaaatgctaaatacagcatataattaaaatttcagtggttaagttttcatcataacttatttttggaactaagagtttccttttcgagacttttgatgtgtaagaagggtacagtttttaacagagctacctgtgtttgttagaactatacttttttggttagaactatacttttcataggagccgttcctcctggagacacatctttgtctgaaatatttaggaattcttaagtaattgttgctaatactcatcttagttaaatggcttaaaaaacaattccacatatgaaggatgcacacacacatacacatagcctgttttgttctgtttctgttttcacaggaagaaaaagagtggcaaaatatatcttctgctctgttctaagggttttggtccagatcacaagtctcaggattcttagcagcagaagagtttatgattctaagtagaggtgcatctgtttcttgttgtaatattaatagatgacatccaggaaagtcttgggttttgcaatattttcatctagccatttcacagaatagagaatttatccttattctaaaggrtataattatttaaagaataaaccatagagttcttataattccaagataataagaatagaaggcacttttgaaatttccttgaataaatcctaatttcttggattagaattaaacagctttttgagtatggtcactgataatgtcagaaactgttttgcattcaacaaagctggccagagaccagtggtagtgctttcatcttttggtctgatcactattgtgagccaagctcctgctaagggccaaagaagaaactgtaacttctgtactcctcttatgactgtggaaacattgctttacctacagatagcatgctttttaaaatcgcaattttcaagtaatgagatttaattttttttttttttttttttgagaagggtctcattttgttgccctggctggcatggagtggtgcaatcatggctcactgaagccttgaattcctgggctcaagccatcctcccacctcagcctcctgaggagctggaactactgggtgtgtgtcatcatactcagctaatttttaaatttttttgtagagatggggtctcagtgcattccccaggctggtctcttaactcctgggctcaagtaatcctactgccttggcctcccaaagtgctgggragattcaattttcatatgtcaattaaatttacagaatttgcaaatccaattgcaggaaatgggtagatgagctttaactttttttctccttctaattgctaaccttgaagtgagctaattaatgtagatggactctgaggacatttatattcagaatttgaaatggtcagattttcaagagcaatgagtctaagatatcctttgcttataaagggtagaggaggaccaaatagtttctggagaaaggttatcttttgtactggaaaaaaaaaaacacaaaaaaaccaccacaccaccaccaaccaaattaaacctaaacctctggcaaatatgagtattgtaagcaaaacaagacaataaaataaccacaaaactgaataatttagaaagaaaatatttacactgtactgtcatttaggcctcggaatagtaagaggtttttaatatattcacacacgtttcattatttggcataaatttcttatacataggcatatttattggggagatatattccttaacattgggatatgtattagtttcctattgctgctgtaacaaattatgacaaatttagtggctgataataacccaaattcagtattttaacagctctggaggccaaaggttcaaaatcagtttcactgggctaaagtcaagatgttggcagaactagtttttttaagaggcttcaaggaggaaattaattttcttgctttcttcaacttccagaggccacctggattctttgccctgtggccccttctttatccttcaaatcacatcactgtaatgtctgtttccatcacaacattgctttctcctgttctgtggtcaaatcttactctgcctcctttttataaagacagttgtgattatatttaggactcacccaggtaatccagtataacctccctatctcgagatctttaattatgtctgcaaaatcccttttaccataataaagtattattcattggttccagggtttgggatgaggacatctttggaggctattattcagcctaccagcatacttacaggtccttgcagcatagaccctatggagctgtgttctgtaaatcatactgcatagttattgctttgttcccatcaaatcacctgaagtctcacatgtttctgcatagtctctttcaggttttgttcatgcaaactaatgtcactcactcctgggcagaggacttctgccagtttctccatgactgctacataaatcactgaattatagtctcttcagctaccacttctaaggtgtcattcaccttgaactcctgagaagtatgtcttaatgcccgctcttgaacttgtgtggcatctctcgtgctgtgatttgggtaccttttgttagctgttgtgatgaattaacattattaccagcacataaagtaacatcagataaagtaaatgaaccaattgacatgccactgaagccggggaaaacacaagtgtgggcaccaggaatgcccagtgcagtgtgccaggctggctcttgttgcctgtatgggtgtgagagctatcgttgtgctatgctggttggccataagaaaaacatttattagctgtactgttaagaatgtaatagatttctatattttttcatatagaactgttctcagattagtttcataaggaccatgcttaatgttcaaagcacaaatttgaaataaaatggtgaggtattgaattactgagagttagtccctttgctaaacccccaaatctgtggtttggaattagggctgcttccatagtgtaatgctagttgttgttactctcagcatgagctgactgttaataatggctgtgtaattttgagcagaccacttaagttctctggtcttcattttctttatttgttaagtaaggaataatttgactacaattctttatgacaatatttcaatcacgtgttttaatatccatggataatctaaaatatgtaaagtataatctgtatcatttgaatagtctaaaactatttatgttggaaaattttaaacatacacaaagagaatatgaactgtcatgtacccatcacctggattcaacggttatctaggttatcacatttgcttcaactatacccctttattctttaaaaatgtatattttttatttttaattggcatataataattgtgcatacttatagggtacaatgtgatattttgatacatgtattcaatgtataattattattctgcctaagtattaaagcaaatcccaggcatcatgctgtttttgtccttacacgctttgatatgcatctttaaatttttaaagattttcctaaatagtcagaatgccattatcacatctaacaaagtgagcaatttcttattataatctaacatacagtccgtattcagatttcttagattgtctcaaaatgtttcctctacacttggctccaaagaaggatccaaacaaagcccatttggatccttactgcatttgaatattacctgtgagtcacttttaatttagtggtccttttctctaggtagtaacgagatcaggaaacctggtcacttgtctcgtagactatttcacattctgtatttgttgtcttgctttctcatggtgtcattaacttgttcctctatatattataataccttaaaattgaatattagctctgaaggcatgaacagattaatattcacctatttttgctaagatacatcatagccgatgcagtgtacttcattttgttccacatcagaggtaaataatggctggttgccccacacgtagatttgctaagattgatcggtgggtttaggtggtgacagtatcatctcttcaatataaagtttttcattgacttttcatcaatcatgtcatttattattaatctttgcctaaaacaattttttaggacttgcaaaatggtggttaaaaaaatgtcattagttctttaacattttttgactggaattcttttgtaaagaagaatcttttcttatcgactaggtaaccctgaaagtgtaatacatatgggaagggcagaagtagttaggtaattattttcctttgattaccaattttcagagtatgtcatttctagtaatgactaattgatttctttttggaggggaggggcagactttctattgttttaagtctcattctgagctagtrggtctttatatatattcaatgtgttttttatcaaggtactcataattctttaaaaaaattttttagttttaatttttgtgggtacataggtatacatatttatggattacatgagatattttgatataggcatgcaatgtgtaataatcacatcagagtacatggggtatccatcatgtcaagcatttaagctttgtgttacaaacaatccagttatactcttttagttattaaatgtacaattattttttactacagtcaccctgttgtgcttgcaaatagtatatcttactctatttttttttgtacccattaaccatccctacttcccctccaaccacccactactcttcccagaatctggtaactatccttctattctctatctccatgagttcaattattttaattttttagctcccacaaataagtgagaccatgcaaagtttgtctctctgtgcctggctcatttcacttaacataatgacctccagttctgtccatgttgttgcagatgacaggatctcattttcctttatggctgagtagtactctgttgtgtataagtaccacattttctttatccattcatctattgatgggcacgtaggttgcttccaaatctactttaagctgataacaaaactgtttgcacaagcaaacaaacaagcaaaaagaaaactaataaatttctacactttttaacttcgtccctccactttttaactctttattatttctgtttatatcttattgtactgtctgtctggaaaagttgtagttattatttctgattagttcatcatttagtctttctacttaggggagtttacttactatagttacaatgttatataatattctgtatttttctgcgtacttactattaccagtgagttttgtaccttcagatgatttcttatttctcatttatgtccttttctttctgattgaagcttttaacatttcttgtaggacaggtctggtgttgatgaaattccttagcttttgtttgtatgagaaagtctttatttctccttcatgtttgaaggatattttcactgaatatactgttctagggcataawttttttttttttttttttttgagacagagtgtcactctgtcacccaggctggagtgcagtggtgtgatctcggctcactgcaagctctgcctcctgggttcacgccattctcctgcctcagcctcccaaatagctgggactacaggcgtctgccaccactcctggctaatgggcataaatttttctccttcagcactttaaatatgtcatgtcactccctcatggcctgtaaaatttccactgaaaagtctactgccggttgtactggaattccattatgtgttatttgtttcttttttctttctactttttggatcctttctttatctttgatttttgggagtttgattttcaaataccttgaggtagtcttctttgggttaaatctgcttagtgttttagaaccttattatacttggatatcgatatctttctctacattgggaagttctgttttattatccctttgaataaactttcttccttatctctttctctacctactctttaaggccaataactcttaggtttccctttcgagctgttttctacatcctctaggcatgcttcattgttgtttattcttttttttcttttgcctcctctgactgtgtattttcagctagcctgctgtcaagctcactaattctgcttaaacaattctgataaagactgttgcattcttcagtgtgtcattgcatttttaaacttcataatttcgacttaacctttgaaaattatttcaatccctttgttaaatttatctgatagaattctgaattccttctttgtgttatcttgaatttctttgaatttcctcaaaacagctattttaaattctctgtctgaaaggtcacrtatctctgtttctccaggattggtccttggtgcctaatttagttcattaggtgaggtcatgttttcctggatggtcttggtgcttgtggatgtttgtctgtggctgggtattgaagagttaggtattgtagccttcacagtatgggcttgtttgtacctatctttcttccaaaggctttccagttccaaaaggacttgggtgttgtgatctaggctgtatctgcattargaggcaccccaaacccagtaatgctgtggttcttgtagagttgtagaggcaccgccttgatggtctttgataagatctggaagcattctctggaccaccaggctgaggcttttgttctcttcccttactttatcccaaatagagtttctctttctgttctgagccacctggagctgggggtggagtgacacaagcacccctctggctaccaccaccgggactgtgctctgaagccagtatagcactgggtctcacttaagacccactgtaaccactccctggctactgctgtgttctttcaaggccctggtgtcctaccatcagcaggtggtgaagccaggcttgtatccttcccttcagggcagcaagttcccccaggycccaggtgggtccagaggtatcatctgggagccagggactggagtccaaaatcttagaagtctacctgtgttctattgtactgtggctgagctggcatacaaaccacaagacacagttcttcctactcttccctcccctttccrcaggcagaggagccttaccccatggccagcatcacaggcccacagggagtactacgggactaccaccaatgttttcttaagggccaagggctcttcagacagcttgtcattaatgctacctgacctgggactccccttacagggcagtgggctctctgttgctgggcaggtccagagctaagcctgtaattggagaccccccagagcccacttggtactatatccccctgtggctgagctggtacctaaggtacaatacaaagtcccctttgctatttcctcttcttttttcaaacagaaggcatctctctccatagccaccacagctgggaatgtcgtgagtctcaccagaagctagcaagtctcagagtctgatctgaggcccatggtgtactacctgggtattgataatggttattcagggaccaagggcactttagtcagaaggtgattggtcctgccagaactgagtccatcgcttcatggcagtgggttcccttgtggcccagggtgtgtctagaaatgttgtccaggagctagggcctggaaagggctcatgactgtgatgtcctatcctgctgtggctgagctggtatccaagatgcaagacaaggtcgtctttactcttccatcttctctgctgaagcaaagggaaggattctcttttggagctgtgagctgtgcagcatggggttaggggaggggtgtggtacaagcactcccttagttgcccagctggtgtttcagtaggttgtgttcccccacagtcccctggctctgagcccagttcaacactaggaatcacctaggagttgcaatccctgtggtctagactgcctttcaagtttatgttgggccctagagcactttagcctgtggtggtgaggcttgtgggacctcaagttctgactgctgagatggaaaattcccctctggccagggctggtttaaatactcccttcatgggcggacttcagctgagttcagcctggtttggatttctgctgtgatggggcaacactgagttaaatgcaatgcctcgcgcttgctgcactctttctctaccatgtgcacagattctctctctctaccacacagctactaccaggagatggggggaggggtggcatccatgattcaagactgtctttcctatcctcttcagtgctgctttcagtgatgaagttaaaaccaggtactgtgagtgctcacttgatttttggttcttatgaaggtgattttttgtgtagttagttgttaaattggtgtctttgaaggagacaattggtgtagccttctattccaccatcttgctctaccccctacccattattctttttgaagttcaacttgtcctatgtttggccaatgggagccccttgttgattctttttgttttgttttgtttttgtttttgagacccaagtctcgttctgccacccagactggagtgcagtggcacgatcttggctcactgcaacctccactcccgggttcaagtcattctcctacctcagcctcgcgagtagctggtattacacgcacctgccaccatgcctggctaatttttgtatttttttagtagagatggggcttcaccatgttggccaggctggtcttaaactcctgacctcaggtgatctgcccgcctcggcttcccaaagtgctgagattacaggcagccaccgcacctggccccttgttgattcttgtaacaattttttacattagtttttaaaagatgcaagagatacatctctgtttatatatacgtatgttatatatrtaacatatrtaacawatatawcatatatgttatatatttatatgtgacatatctgtttatatatacatatatggtatatatgtaacattttttctttgatttatttttaattacatagttcaatagcattaagtatgtgtccacattgttgtgcaatcatcaccacaattcatctccagagctcatcttcccaaatgtaaactgtgattctgtaacattaaacagtaatttcctattcccccttcccctagccattgacagccaccattctactttttgtacctatgcatttgactacactagatacctcatgtaagtagaatcatacatttgtgcacttgtgactagcttatttcacttagcataatgccttttaggtttatccatgttgtagcatatggcagaatttccttcctgaaatttaaggttgaataatagtccattgtatgtatacaccatattttgttcttccatttatatattgatgaatacttgagtttctttaatcttttggccatcgtgagtaatgctgctctgaatacgggtatacaaattcaacttttaaattaaagtgtaatattggtttgtaccttctttaaataattatacagcttactgaatattcacaaactgactctcctatgtagttagcataggatattaccagcaccctagaatctcactttggtccctccctcaggcctcaaaggtacttctatcttgaccktcaacgctaagattagtttttctgatttcttttttttaagtgtacgtaaatagaatcacacataatgcactcttttgtgtctggcatcttgtgttcaatatcatgttttgagacatatccacattgtcccatgcagcaatattttgttcatcttataaatgtaccatattttatccatttttctgcttccaagttttagtattacaaatatactgccttgaccatcctgtacatatcttttgctgaatgcgtacatatcttttgggacacatttctgttgtgtatagaactaagagtggcttttaactgtgtcgctctagctgtattacacagcatttgccagagtttccctaaatattcttaatatcgttgtgttgttctatgtttaatatttaatatgccaagggttctcagggaacatatggtcacmgttttttttcccccaatggtgtctgtaaagaaacaggataaacatttcaccatagcatcaactttccaaatagatatgaaggcactgtttttagctactgtcagttaaatcagtttggtcatgtatgcaatgcatttacagtttcttaaattttcttagtgtgtattgtatttgcatgatcagaaattctaaagccatagatatttttggtggtggtatgctgagaagttgacaaaagttgagaggtaaccaggaggtaatatttcctttttgctgatgtggccacttctatgtcattaaagccctgtcagccacccagaaaaccagctatttcttttaaattgagtgtttacagggttttttttttttttgtcataatatcgactggagggtaaaatttgttatcaagctgacatcatttagtaacattcaaaattctttatgtggaaacaatttataacaattgatttgtaatttaggcatggacatttagttttaaaatagcgatgacatagatttacttatttttaattctttgccttcaaaactgcaatgggttgttgacaaatttctgtcacttctcaccaatwagattctatagggaacgggagagaagaaagaggttgtatccatggccatgtcccttctccagaatatggaattacatgttctaaaaactgttctaaaagctccagagtgaaaagtccaaaacagtactgttttggttgatttgggctgctataacaaaatactgtaggctggggagcttataaacaacaggaatttatacagttcttgaggctgggaaatccaggatgaaaataccagcagatgtggtgtctggtaagggcctgtttcctgatttatagatggcaccttctcattgtgtccttacaagatggaagggcaaatgagtccccttgggccttgatatggttaggctttgtgtccccaccgaaatctcatcttgaattgtaatcctcagatgttgagggagagacctggtgggaagtgattggaacatggggcagtttcacccatgctcttctcatgatagtaagtgagttatcatgagatctgatggctttataagcatctagcatttcccctgcttgcacttatttttcctgacaccatgtaaagaaggtttttgctttcccttcaccttcctccatgattgtaagtttcctgaggcctcctcagccatgcagaactgtgagtcaattaaacttcttttctttataaattaaccagtcttaagtatttttttttaatagcagtgtgagaacggactaatacaggcctattttataaggtcactaatttcattcatgaaggctctgttcgtatgacctaatcacctcctaagaggcctcatttcctaataccatcaccttcagggttaggatttcaacttatgaatttagggtgggaggaagacacaaaccttcaaaccatagcaaattctgtgggtaggaagatcaggcctgatgcagtgggactcattattagttgggggttaagcaattccaaaacaaaacccaaacgcacagaaatataccatatgagtccatttatatacagttttagaaaaggcaatttaacttataatgacacagagcagattggtagatgctagagacaggaagggatggaagacagacatgaaaaaagagcataaaaaaactctgcaagctgttgagggtgatggaaatgttcactcccttgattgtggtggtggtttcatagatgtatacacctgagataactcatcaaattgtgctctttttttctttttcttttttttttttgagacggagtctcgctctgtcgcccaggctggagtgcagtggcgcgatctcggctcactgcaagctccgcctcccgggttcacgccattctcccgcctcagcctcccgagtagctgggactacaggcgcccgccaccaygcccggctaattttttgtatttttagtagaggcggggtttcactgtgttagccaggatggtctcgatctcctgacctcatgatccgcccgcctctgcctcccaaagtgctgggattacaggcgtgagccaccgcgcccggccaaattgtgctctttaatatgtgcaatttattgtacatgagtcacacctctgttaataaacagcaatgatgtaaaatgtttcctcttaatgttcttaaaaattaagttgatgatggttaggaaattactattttttaggccatgttgcaagaacaaaaagctcagctagtatactttatacaatataacttgyatagatatatattcatataaaactttaaaaagtgaaagtcacaatataaatctcacagtgtactcaggatattgctatttctgttagataatagactttcagtttttaactttggtaaaatatgcctaaaaatcccttctactgcctggataaactcagtgattttttttttctggatactgagacacaaaacaagacattaatttcctccttatggaggtttttttggcagtcrgttatataaatatatattatgatacagcttgatgtggacagcacttgaggtgtgtgcaaggtagagtgatagatgagcccagtggaggcaactgtcaaccctctggctggagtgaggtgatgtgatatatgagggactggttgttttcctgaatacagttttgacagatcaaggagatacataatctaattcatgcatttcacaagcactgaatcttcctcagaagaacttagtgtctattccttgggtcatgtttgtgaggcaggttgaaggcctggtttacacaaaaaagctgagaagacattaaataactaggttaaggttatcctccatgaactagtgtaatagcaaggaatagcactaacattttaatttctcatacttttaataccttttttcctggyttttacagattaagaaaatcaaaacgatatatttaatgccttcttatttgcaaattttcttagaatgttacagtagataatttcactttagaactaaagattgggaggatttttaaataataaaataatttcagatgttaagaatgtttaccaccataatttccatttaaaacattttcctctggatgctttgttgaaattaggaaatgcatctctaagggatggctggttatggagtgatgacttggctgtcaggcaggtttcatgtttgagtagaataaactttcctaccactttccagaactttactgtgtccaggccgtatgtgtagttctgggatttagctttttaggcaaacattcttacaggtggtttctagctttttatcaccaggaaccttcttacaatttagagggggaaaaatagccatgtttacctttccccagttccttaccctctgcaatatgagaagtgctgtagggaaggcataagtgaagtattatgcagtgtgtttcactaaagtatgtgatgcagtttaaagactggagtagagtgttgatacctggcaattagcctggtggatcaggtcgagagtgaaggcccagaggaaggatacatagatccttaaggccaggctttcggatatctgcagcaagcgatgagagagcggatgggattgcagtagccgtgtatgacacgcagatgaacttgcaggaagccactgaaggattttaagtaggaaaataatataattggaattttgttttggaataatcttgcaaggagcagagtgaaggtgaattgcagtagagagggaaaccagttaaaaagctttatgatagtatctgtacaaaatacaatattaattaaaatactaataagttttattttatgctatttgcttattttgtatataacacatgtgagatgtgaagagaataaagtataaataaggcttttgtctgttctcagctagcttaaaagctacaaaggagatatatatatgcctcatttatacacacacacaaataatcgtaagggaaaatgtgctgatcactgtaagaggtacaaacaaggttctaggaaattcagtagggggaggatcccctgtcactggaggagaaggaaatgtttgtattttctttgagctcactttaattttttaaaaaagtatttaagaaattacataaaacaattttgcaataaaatataaggaataggtggggagctttttcatcaaagaagtggtttggagagttcaaactagttgggtagaatttcctgatttggaaacagattatccagagatatacacatttgtgagatatcatcatttcatattgttttagatgagcaaaatgccctgtctctccctccaaggcaatatttggtggaccacccgtaagtttttgtttggtttggtttggttttagcctcatcatttaggggagaagaattttgtccctatttgccccgaagtttcattagtggatggccgtatttataccctgtgtgtggtaatgatgaactcctatgcattttatctagcttttcaactattaagtgaagcttggtttaagcaaatctttagatggtagcattgtgccagtactgttcccrttttatcacatgctatacgttagtctagttcagcagagcattatgctacattcccttctcagtgagttatagatcttgaagttttcacacactatgttctggaaagaaagtataactgtttcctgtgtggttgaaatgcaaactaaagatatttcaactgcttctgtaataaggagataaggtcagacattatgaaagaaaagattaccaccgatttttttccccttttattcaagtgatttcaaggaattattttgtaagaaagtcacctcaactgatgaaaaccagtgttaattttctctttcattttttttaagttacctttattaaggtaatgttttttatgtttctgagttctgtttctgggacattgattcttttytttaattaattttctttctgttcttattaagataccacatggtttatggtgatttcataagatagtttaactgttaagaaattgtttttacatatttatggaaatattctataggtctttatataacatgttagtatttatatgtttacctgtataactrtaataaaatataatgcttacaatggtttataatacttagaggaaattatgcataatatatatattcccctctctatcctcctaccggtccctccatccaaagttcaggtgtgtcagcttgggcaagccatttaacttctcctggccttactttctcatatttaaaacaatagtcttgtagaagataaattcttagactttttgtacttgtctgatttatccagggttttagacaactttccagtttatattaagaataggctaaaacgtaaaccatcagaacttawcagccacatggaaatttcattaaaataggctcactggagccatgtaatagaattagtccagattcaatacatttatattactttcctctaaatgtaatcacatgcttaaattgatgagcagtagtataatagttccatagtgaatttgattcaagcaatagttatattaaatttctccacaaaaatttataaccattcaataaagctttaatatattgtcatctaaaggtaaatgtaagttttgtttttagaataactattgagtatatttcaagtcattgatttgttttttaattataaatttataaccaatgactaatttattaattttatgaatggtaaataaaacatacattggagaataacttgagtggtaaaatatgccttggtccagcggggtggctcgtgcctgtaatcccaacactttgggaggctgaggcgggcggatcacctgaggtcaggagttcaagaccagcctgggcaacatggtgaaaccctgtctctactaaaaatacaaaaaattagctgggcatggtggtggrtgtctgtaatcccagctacttgggaggctgaggcaagagaattgcttgaactcrggaggcagaggttgcggtgagctgagatcgcaccattgcactccagcctgggcaacaagagcaaaactccatctctcaaaaaaaaaawaawatatatatatatatatatgccttaaaaatatatatatatatgccttaaaactactttttactttatggttcattttcatggagtggtttattttttccatcaaaatacccaattaatttggatacagtgagcaaatgcttctgaaatagaatgtgtcaaaatattcttggtttctttggcctctttcatcatttacccacagcccctccccattcccctaccttcattgacctcggcttggtttgcaayaatccaggtttacatttttgaaacattaaatactctgagagagttaaagacttgtctgtgttgtgttcagatttgtagggacctcctgagctccacagtcccatttaccaggtctgctgttggtaaaataattgccacctgcactctggtttttagttccattgctttgttgaaatcatgatatttgggtttttcatctcattctgtaatattttcatttccagcatgtccctttcttactgtgctatctttcccaaccctgcctgtgtgtgttcctgttccccaaaggtgcttttcacactgtatgttcggacctggacatacatgaatacccttccttttggccagtctgaaagctattggagagcaraaactttgttttatttccttctgaagttagctttgtggttcccataggaaaggtattcacagaatatttgtcgattaaataattaactgttattctattctattactaccctttttcagttaattcctgggtctgtgcatctcagtccttaattcatacaggttgagcattcctcatctgaaaatactccaaaatctgaaacttcttgagtaccaatatgtggctcaaaggaaatgctcatcaaagtattctggatttcagatttttggattagggaagcccatgcagtatgtaatttgaaagtattccaaaattgaaaaaaaaaattcaaaatttgaaacatttctggcctaagcatttcagatcagggatactcagcctatattccaactttgatcttagrctttttcatttttgactgtctgctgggcaattctccttgactgttcttctgtaacttcaaacatagcatgtttgagactcaatgtctttcttgtgttctgtttttaccagtggtatcatcattcttttagtcaatcaggtttgaaaatgtctagtatttttttaaaagttgtggtgcccctttatgatccaggagtatggtgggtcagatctgtaagctgagtcagatagaccaatggctagaattctggcagttacctaacttgttgaatcttagttcccttatctataaaattcctacttcttggacttgttttgaggattgtgtcagaatgtccatgaaagtgcttagcgtggtccctggtatgtggtgaatgctgagtgagctgtctgtaatttccagtgtgtcatgaggggcttctgtgatgcttttcagctgcctcactactttggtgaggccgctgctgatgcttgagtacaggttctcatctcttgcgtgggttcttgcagcagtggcctctgctctggcccatgcaggactctaccagtagattttgattatttccttctcttcagaaaccrtgatgactttctgcacccagcttgatcaggcctgtgcacacctcagtttgatatttaaatttttggacaatctgatcrtcaccaacatttctagccttagtttggtctcctctgccygaatttccagtcactgccttcacactttacatcccctcaacttgtcttgtrcgtcacacagttttctcccctctcctttgtgtctagttttccctaaccatcatttgtggcccctgattcttgctgtccatgatgtttctcctgaatccttcttgtgacattgttcttcctacttaatccatgaatcgtattaattcattyattcactcactgccttgtaaggtagtgattctagacacttgttctagttataggtacttgaatacactggtgatcaaaaaagagacactccaaccatcccagaacttatgttatttatcagtatttattttacagggaatcatgtkttgtgacatctttgtataatttgcatttatttattgaactcctgtaaaattttttccctgtacaaattgtaaattacttgataggtattttaaagcttttaatatttcctttaatgtcttatttgatattttacacagagaaggaactcaaatattagttaactttagagggtcacattcagggcttgaggtttgaaactacaccttcaaaataaaatattacttgcaatatatttgaaaccagatttgtacgttatgcttcaggtatatgtttctttttaagaaaggtctgtaacagcatagattgattgtagtaattcatatttttctgataaaaatttgaccatgagtgaacagtatgcttctattcttaccagtggtaggtagaacacatttgatgtcacttgaacttaccaggaagtttttttcttcttttcatatatatatttttttgtgtgcaacactccccttcccttttaatgtgatgtctggatcaatgtttgaaaaaattctatatttagagcaacaggcagttaagtattaatagtttttgttactgtggacaataatagaagtaattgatgattgtcacttgcatggcttgaaggccttctctgaacttctacgctgagttaaatgctcccctcattgctctcaacatgcacatcccctgtgcttccttttttttttgtgatgctttccagtgttgttattatttgtatagtgtctaattttcctactagaccacatgcttcatgaggkcaggagctctttctgttttcttcacaactcaattgcccggacctagtaagtccacagcacatataatgagtgctcactaaagatgcattgcagtaaatttgacattcattcactaatcaaagacttactggattcctgtagatgtcagggactgagctaggctctgggtttgcactggagaataaaacacagcccctgtccacagggtgctcatcaactagcaaaatgtgctaaatttgccttatttaactgacatttatatatggcttaaagtttctagattttttttaagcctcaaaataactctgtgaagaggtattgtttccctctatagatgaggacatcgaggaacagatcaagtaacttactcagtttcacataggattgggacctgcctctgtctggtctccaaatccttcacctgagacctgtgctacttccagccagtaaatcacatgggggtgatagtcataacttgcacctggtttatcagaaattaaatttgtttctcttggctcatgtgtttttgggtttgcattaaaagctggggcaaggaattatgatgtggaaatgagcccactactgattgaggcttttgcatctcattaaacctttaatagtcttattttctttgagactcttttcccattaccacaatttttcatggtgataattttgtttgactttggaaactgactagtctacattttgggcctattggattaagtttaaaaatcttttcttggtatttgggttctccatagtctgaaaaacttctgctccttttaacccctcactattcaagtgagtccctagttgggcctacagatacattcctacctttatacctgtctttaggctgtctctctctstaatgccttccacaaacttttggccaattaaaataaaaaatgagttcttccctttagttttcaaagtaagttccacctgcagggtttgcccttcagtcctgtgctagcctccaggccttgctgctgctttatgtgtgctggttttgttccctagtgagacttttaatttctggagcaaaaggaccaaatcttgtttttcttttctgtctcccacagtatttagtacagtgctggctataggaccatgcctactaagtaagcactaaaatgagcccrttactgattgaggcttgaagtaaatttaattatagagtttgtacttcctaattataactgaaaacctcagtgttttccaaacattatggcacactggagaaaggcagatggaggaggcacagtcttttataagaacagagatacttcccrtttgtatttgtgcawgacaggttacggattgctttcatgggcattagctcacttaatcctcaagctaattttatgggagagaaattgtttaatcctcactggggagtgatggcattaggactcaaataattcacctataaatcacatggctgaagctaggacttggtgccaactcgtgtgactctagtgccctgccacaggagagacaggagcaaccaggctgcgagctccagaaggcagggcccagtaatgtttattgcacgtcactgttgcgagataaaactgaggttcttgcgtcagctgccctttgaattttctcatgggtacatttctgtctggctctgctggcacagttgagtttgtcccctctattgctgggatttctgtactcattagccatttacattcatctgtctgtcatctatctgcctatcatctctgtatgtttgtatataaacaataagacatttgcagttatataaaaaccaaccatctgaagtcttaaaaataatttgtgcactttgggaggccaaggcgggcagatcacctgaggtcaggagtttgagacctgcctggccaacatggtgaaaccccgtctctactaaaaatacaaaaattagctgggcgtggtggcaggtgcctgtaatcccagctacttgggaggctgaggcggaagaatcgcttgaacctgaaggcgatggttgcagtgagctgagatcatgccacttcactccagcctgggcaacagagtgagactccacctcaaaataataataattaaaaaaaataataatttgtgaagttgtaaattaaaatttttgttagtgcctccttaatactccactctgccaaggttgatgattcctgtgtataggttggtgcataactgtattgacagcattgggctggagaatgcaaatattatgattttgagaaagagagattattttgtgtacttatgtatttcatgattgtttcaaagccctgatcatctttggaatttgtccttggaaatttgtgaatacttttaaggtcaatgcatttccttccttttgcctcatgaattgagttcttgctatgggaaaggaacatatttttccagttatctgattataatttagagcatttaaartttttattgctgttgctgtgagcgattagcagtgtactttcaattttgtactcttggttgtgtatacactctgggcacaatgrcatgccagaggatcatcaaactggatagttcacacttaaattgactacatcttccaaatgggcattttatgtctgtggccttctgacatttctctggcaaacattagcttgtggaattcatcttaaacatttcctttgctttttgtctgtataatctgatgccagaaccatttaaaatatgattaaaaatttaaaacattaaatatagatatggattgctgtcgacagtatggactctataaagaaaagacagtcttatatttgtgctcttgataggataaaatctatatagtttttaaaaaacctacatgaaaaagattacaatagcttagtttagaggtagtataaacatgagattgccatcttcatattagacctggagagaaataaacgagaaataggcatgttgacttccttgatcctaaggatatgaccactgtaccaagtggttttgatgctgtggaaagtgtggttgtggaaaaagtgtctgagatttttctttcagttcaaccagagatgagtagttgagacttctttttcataaaggaatctgctagagagatgtggttcctaagggtcaaccaagtttgcagttgcctagtagtgcacctgctgttccagaagaggtgcagatgcaggtatctagtccctgacctggaggagctagttaatattttggtaagaaaaaacttaagaaaattagatctaacttacatggtgcttaatatttgtgaagtgagagatcagagaagggagagagtagtgtaggtggagaagccagaatgataggttgggaaatcggatctcaggcttttctctctaccatttgtcccagcaggccagagtcctggggtcctgtccactctcaacacatgcctttaatactcttacaattttattttctaagacctttttaaaaatcagaggataagcctttaagttgctggtatagggttgttagggaaaaaatcagtgatgcaaatattaaatattaatcactatctgcccttggtggtgttttcttatgcatttttaaaacctgagcttattggaggtttcttcctcaaaattacaaagcaacaaagcattagttttgtttagtattttttaactgatagattctcttttgaaaacattagtctgcctttgaagttgttatttttttgtgtcagaaagagatttttgtcaaatgtctgctttttagaaaatgatagtcataggtgtgttttctgtatgtgctacaaatttcacaaagctttcattcttcataggaaactaacgtaaacacgcacacacacacamaaacaaacaaacaaaaaacacttggtatttactttcttttaaacttccaagtcatgtagtccctgcctggctgytctgtgtcattactacatcatggcacttgacacctttatctatattcactacatttttgtttaaatcagcgctgtttgcagtaagtctattgtgtttgcctctagataatgtaattgatggacagaggaatctaaaggacctgtccaattgtctgtgctaaatttgtgggtcagagtgtttaaacacaggctgatacgaactctcatttttacattccccttgatgttatatcccagttgagaacctgtttctttctcacttggccagtttgctaacagttaattctcccctggcagataatagtgctacttttcttgctctagcagcagtctctatggtggcccattttcccatagaacattttttctttaaaatagaatgaaaatactgagcatacctttaaatgacttgatttatgttttatttatctgtcttaatkattctgtagatttaaaaatgatttaaatcattttcagagtgggttaataccctgctatataacacattcaaaatttatctgcctccagttgtgtttatgggagacacagcatttttattctattaggcatcactacatgggtgacctactatcattttgaatttttctcctgtgttgaactcataatttctttgtctgcaarttacttgtattaagcttatgttttatacatagctcataagaaagaaaaaacaaaggaatacaatacacagatatatacatgttaakgttagtaaggttgcaggtaacttttattttctaatttatgcttctttgtattttccagcttttagaagcttggaaatactcttttcgtaataggaaataactgtttaaaatttctaaccttatgtgctattagaagttgggaggcgaagggagtctgctttatttttaggataataagcaattgagtaacattttatttgtctggtggtgttgaatagagagagattatgactcaagcctaccttgctttttttttcttttttttttcttttaatgagactgagtcttgctcttcagatgrcccagcccagagtgcaatggtgtgataccggcccactgcaacttccgcctcctaggtttaagcggttctcccatctcagcctcctgagtagctgggattgcaggcatgtgccattatgcccggctaattttagtatttttagtagagatggggttttgctatgttgcccaggctgatctcaaactcctgacatcgggtgatttgcctgccttggcctcccaaagttctgggattacaggcatgagccaccacgcatggcctcaagcctaccctttaaaagctgagattttaaagttttcaaacttgagaagaaaaccttatgttattagtattacatgttttaaaatccattgtgatgaaatacagcatactgaattgattttgaccttatcctggaatcagggtcattactgtgaccttcaattattgtacttttggcctttcccttgctgtcagctgtcactgcagcaatgctaattggggcttttaatcatgtagcttagtgaaaacaaatagcatataatattttatgtagatagacttactaaattctgaagaatcgtctgaaagcttccttcttggagtgaaaagtatgtgattgtcttcttcaggacacggaagaggggattttatcacttatgttcctgtatttgttttaataactgatgacccatggcagatgtttatttttgcttttatgttcttatccgtgtatggaaaagcttagattgggtattggtaaggccttggaattagataggcctggatacaaattccactgatatctcttagtagctgtgtaatcttgggcattcagaataacctcttcaagttcatttcctcttctgtaaaatgaggataatcatgctttcatcgtagagttgttgtgaggattaaatgaagaattcatgcagtgtgctagcatagtgtctgcacatagtaattgctcaatattatcaataatgataactattttcattactaatttggatttgactgatgtctgccacttcttaatttcattgttcaaataacctgtaaccgatttggaatgtgaagctgagcaagcttgatagttgaaagaaaatattattatgaaatatttaatgtattcttcactgattagaaagattttctcaccttcccataaagaagataacacaattaaagaacatctatacatggcagagtctggatacctgcattacattatgatatttaaaggaatcattgcaaactacctcaaagaatcctgagaggttaaaactgagtttataattatatagacttggtaatttgttaaatgcagcaagaaaaataagattacaccataagtttttyggaaatttcccattttaaataaaattgtcaattctatgctgtatgtgatgggtatggaatttgtgattaatctgtaccaattggattaaaatgggttcagcaggtttttaaacttattgttgataatggaaatataaagctcgggaaaaattgtgaccatttttttttccattgtctactcatctttcatttaacttttattgatttaaaatcctttagtgcagttaactgctattataaagtctattgaagtaaatactcatataacatttttttacttatatgacagttgcttttggagtagctggaagagctgtgaggtactcatatttcatttttaaccatttggagaatagttttctatgtgtgaaatgtccacttaatcagcaccatagctctttttgctaagagtcttagaaatgaacaagatagtataaccactgaatgaaaaattttaaagatgttactcagtgaaaagtttctaaaataaaaggcaacacatgaattactctgaaaaagttatttttagatagcarataaatatttttctttcagttatttgtaggaacatcaatctatcaaaacttttccctcatgtctttaacaggatgtaaagtatataatttaatggaataattaatatgaatagcagttgttgtacttatgtagcaagtatttgttattttgctgaggtagagaagtttctccctatactgaatgcttccagaatatgttttatattgtgtgtgtgtgtgtgtgtgtgtgtgtgtgtgtgtgtgtgtgtgtgtgtttgagtggggcgggggtgttgggtgatggtgatgtaaattttaaaaaacaactgctttttcttactccttttctatcagctgtcacatcttacccctgttgttacattttcttcagtagtcctttccttttaacatggaaaacaagtaatgaaggtttttaaaattgtgcaagaaaagtatgcataatttagttctcaccaaaggcccgaagagtgaactaaaaatctcaaaacctcctctcatgttacaaatgcagtacacatttattttaaaaagccagaaaatgttaataagaataaaaaggtcacttatcatctcacatactagagatcatttcttttttaagctaaaacaggaaaagataaattgctacaggtattttagcaggaagagcattgatatagggaaggaagattggtaataaccgatcttactttgaggatatcaagaaatgagagaatcataggaagccaccacctatgatatcagccacctatagccctacagtgggtgattatcaggagctttacccagaagccatgtatacatcaccctaacatctatccccacttctaccagccactgctgggggaagaatatggttgcttctctccagtgttcttactttcacatgagtgcctttcatccacagaacctaagccaaaatcctgcctacaagggatctgggaaatgtagtttccaggcttccaggcactgtgaaagagcttgaaagtatagggatgatgttgaaaattctgtcatcaacagataatataccctgcagcatccttccgaattcattcctcaacacacgyatgctacttacaactgaacacttaatcaggaccatagctagatatatgctgtttggtaatttgcttttatcacttgatttagtataacgcatatctttctaaactctgttactgtctatgtttgttttctgctgctgtaacagaatacatagactgggtaattgttaaagaacagaaatttatttcttatagtctagagactgagaagcccaagatcaaagggctgcatctggtgaggaccttcttgctgcatcataccatggtggaaggtggaaggtggaagggcaagagagtaagaatgagagagagagagagagcgcgtgtgtgtgtgagagagagagagaacgcacgcacacgagagcaagaggggtcagatttgcttttatgacaactactgtcgtggtaatgaatccactcctttgataacagctttaatccatccatgaaggcaaagcattcatgacctaatcacctcctaaagttcctacttttcagtactgttgcattggggattaagttctcaatacgtgaactttgggggacacatttaaatgatagcagttatacatatatcttaaaatttttgtgttaaaaaggaatatattaatatttttggtaagctgcttttatcacttacgatattgtcaacatctttttgaatggctctttagaattctgttgttggatttattaaataagcacccagtgctagacaatttagatagtttccaacttcttgctcttatatcagtgatttgctstgcatctttttgactaaaactttgtatatgaccatttattcttcagggaaaattccaagaaatgtaatttccragtccgattgtgtggtccatggccttttctgacttgtattttgcttcttcctaaattctttttgcttacttccatttctctggtaactggatgccagaaagttgttgtggagatataaaaattcaggatggttttaacacttaggcccttttgcattgagagtccttaatcctcaatcatataagatacttggacctccacccatgcttcatataaacactaaatgtgctttaaactaagaaagcctaagaacttctgctaaagattaattctaactttccaagccagggaacagtaggttggaccaagggtctctagagactttacctctttcattttacacttccttctttccttcttccttctcaccctgcttttctccctttttcattccattctattgtgatcataaaaartcattaaggtatttagtatttagagatgatctgttattttatttttattttattttatgtattgtattgtattgtattttaatttttttgaaatggagtcttgctttgtcacccaggctggagtgcagtggcgcgatcttggctcactgcaagctctgcctcttgggttcacgccattctccygcctcagcctcccgagtagctgggactacaggtgcctgccaccacgcccggctaattttttgtgtgtttttagtagagacggggtttcacggtgttagccaggatggtctcgatctcctgacctcatgatccgcccacctcggcctcccaaagtgctgggattacaggcgtgagccaccgtgcccagcccgatttgttattttatacaagacttcccagttgtgaagcttatgttgacatgtgttccttgctggccatttcagcctgggtgacagaatgaaaccctctctcttaaaaacaaaacaaaacaaarcaaaacaaaacaagccttggcttagggttgtggcttctggctacagttacaagccttctgcatttctgtaagtggctgtgataaacagggaatgctggaagatctcctccttgggggctcatcagtggatctgccagtaataaggatttcatcactggcaggaagaccttaggtaattggaaaatgatgagcaactttaaatttaggagatttttcttttacaatataggcacagttccttggtaatctcaacattctggtggtgmcctttgcttctgaccttatttaatagactcttcacttgtgttgaaagcaattctacaaataccagcttttatctagtgtttacatgggcagtcctgcttgactttgaatttatttgttagttttttgattattacatgtatctttaacattttctaactagaatagaatacttttttcttttagaaatggcttagttttattaggaagataaaatattctatgtcttagaaagcaatattgaagccagcagcaaaacttaattatctgaaatgaaatacagatgattaaattatttcctaaaatcaataaaattgaatcaactgaaaaaatcaatgtgctatataaataatgccttttaaartatttcccatgtctttgtggaatattggctcagaggtttgcaatctgggcrgcaatgtaaagtttcattcataaaaagtattctagattttttttttaagatgtcagaggtctttagcaktggcttccatgaacagttaccatgggtctactatgtatagggcatgttgacaggcactggggaagcattatggctctagagagatttccaatttggtcagatatacaaggaagacacatagctagaaagaacaaatacatgtaaatatatggtcgcatataccagtctttaaccatgtgcaaacaggagtttagagaatttgatgatggccatgatttgggatgggaaatcttccttgagaaagtgttgtatgaagtgaagggcaacctaaggcaagtatggaggagcaggaattctaggtaaggctgacttatcaggttgtgcaatacacaaaggtcctgtataaaatatggaaatgttctcattcttgccagatgccatagacttgtatacattttataacagtttcggatagataatctgacttctcaagccaccttggctccttgatattccttgattatccgaggaagatttcttccttaaggctttgcactgggttgttcttctatctggaatgcttatccctcagatatttcctatttacttcaagcatttgcttaaatgtcaccttcatgatgaaacttaactagtgtaccctatttaaaataactatttccctcacctgcatataaccatgctatagcatttatcaatattgaatataatgataattacatgtaattaataagttcattattgtgtgcctctctctccaccctcttaccccaaaagagaaagtctcatgatggtagagaaatttttcttctatgcatttttagtttactgatctatatcccaagtgcctagaatatcaccttgctatgtagtaggtactcagatatttgctgaatgaataaaggtgygcatgaatgaagttgagtaacatttatagaacagaaagggcaggaggcaaaactgttacacagtggttgggggcagaaataaatgcaggagaaaatattatctgaagactgtggaaaaagacagtgaccacagtgcagaaacatggagcagtcaaataagaaaagaaataaaaaaattcagtcatcagatttggcagttgagaggtcgttggtgatttttgtttcagttggataatgtagatggtgagatgcatactagaaaagaaccaaggaaatgaagacatcattcttatgtaagactgttcatgtttggtacccgcctgctggacatcattcagtcacatcatacgtatacatttatctagagtgacagcttggcatctagcagtaacatggcattctttaacaaaatcagcattttaactcaattgaggaaggaaggaagggtgccttttctgattgataccaaagggtcatttggccagtgtctacktagtggccctgagtggaggcaattccacaagctcttttgggaactgatgtttgatggaggaggaagaggaaatgatggagcacgtaaggtggaaagttatagaacaggtaatgggtaggataggttagccaggaagaagccaaggacagagagaccaagtgttagagtatccagctgcagatcgatgagggcatgggagtggtaggcaaaggagtagtatgaggcaggcggcagagggttgagaggagctgctgatggattgggtgtgaccaagagaacaaggggtcaagaatgacttcaaggccataagtgtgggaggtgaggcagattaatttatttacacaaatggaggtgtcagttctcagaaaatataaatttagttttagccatgcttaatttaagatggctggggaatgttaagataggaatttctggtagatggagtttttcaacaaatataaaggggaggactcagttttgttagtttttagtgaaaatcctgcagtggggataaagatgcatactcagcttctgtagtgagtatcttaggtgaatgcccttattactgtctttgccacactttgagaatggtattcttatcatttctacctgaagttagagagattttatcatttatctggcatcttgcagcttatgaatgatagagttggaggtcaaatgcaggtctctctgctgccacagccctcatattccattctactttctgcttgtaccctcagaggtcacatttggggatgcctaggaagtctgggattgagtagcgcatttctggcaaatatgatattttttatagctgtgttttacattcattacttcaaagattatttggtctacttggatcaaatgtttgttacagctgcagaagcttcctgctctctgaatcctttttggaggtgctggttttcttctgaaagttttaaggtgcttttttcttatgaaccaactgctcagattttttwaaaaaattaaatatcctgctacctcattttttctctatagcacattcccatgtcttaacttcgatttttttcttttctttttgtgtcacctgactttgttgagaaggctggagatacatttcaagcccttcctagtccttaaaattatttctttcacactagcagattatctcatttcaattctgcctttatggtttaacgaaaacctggtttaataatccagcaatgttagccattgggattcatcctttggtataataacatcagtatccatggctgggaaattattaggttctstatgtgttatggcaaatacgggtatggatatagataaatgagttgccttatatcaagagactgcacaaataagtctgtaagctttttttttaattctttaattttatttgtatcctactggccttygctctccttcccctctcttgttgatacatagatatgatttatatcctcatggcaggtgtcatactttgtataacttcataaatattttcttaaaggtttaaacatgtaggacctcaggttattctaaaatacgtaaaagaacaaaacaaaatcataaatcaatgtaaagaataaatgcatattatggagaaaattacctaaaaaactcctacataagactatctagcggtacttaggtgcatggcaatagtgaaagggcagaaaacaggggatggtaccaaaaatagatgcgttattcttccagaatgtgaaacattatataattgcttacaaagcaatcatcatatgtagacaaatgacacagaatggaagatgaataaagtcaatgtaagattaaaaaaaattgaaacaattacatctccatctgttacactgataatgtaaaaagatattgtacattcaatcacagatggccttttaatcactttagaaacttagcacagaaaactaggcaaagtctgtagagacccttggtctagcctcctgtcctttagcttggaaagttagaattcatctttagcagaagttcttaagctttcttagtttaaggcatgcttaatatttctctgaatttttttttatttttttattttgcaggccaaaacaataacagtttttgttgttgttttttttgtttttttttttgagatggagttttgttcttgtagtcaaggccagagtgcagtggcacaatcttggctaactgcaacctccgcctcctgggttcaagcgattctcctccctcagcctcccgagtagctgggattacaggtgcatgccaccatgcgtggctaatttttgtatttttagtagagacggggtttcaccatgttggccaggctgatctcgaactgctgacctcaggtgatccacccgcctyggcctcccaaagtgctgggattacaggcgtgaaccaccctctccagcccagttttgtttttaagtagttatctctaagcaatttaataaatatttatgtcccaacaacatagtagttggttgaaagaaaataatacaagtacattgaaaggaaaaatatttttatttttattttattcttaaatacccacaattattactaatgggatgtgtgtgcctgttgggcactacataacttctcaaatcttggaataagattacacaccaccacaccctcattttttgttttacattgattgttgtaccatgtttagttgttaaccactgcatctgctgaatatcyagcttcacaaagatacaccattaaaaggaacttagtgggatctaatgttaaaactacacagtaatttgagctagtaattcatgcagtatcagatgctgaatattcttgtgatttttttggtgaaaatttaaaatatcctgcagtgtctctgagtttgctgtggtgttccaggataccttggtgtataatttaggaaccaccaaccaataatcttaaactagtaggttatgggacacaggccagaaattatttgcttcctagtgctttttaatcacataggtaaattgtcagctacaatacctgggacatagcagctccccagctggtgtaaattatttttcccttgctatactgtcagcatttatagccatatctttccatggtggtccgatttatatttacagtccagtaatctttagtaagtacagtctggcwtatcttattgccaattgtttgattttatgtggaagtgggtgacacagttattactgagtctctttataaaaatcttatttacgtaaaayatacaaggtaaggaaatgcattcattaacaactgaagactgagtgagtaaaaaaataacttgtggacactattttcttgtataattgaaaattatgcaccactaccaccactaccacaaatagttttgtataagatatgtctgttaagttcmgagaccacaaagtccctattgtgatgcartaacctcggttaactgagcatatcttctccatgtcctggtgaggatagctatttcagaagatcatttataggaccatttacaaaaatacagtatcaatcacactgcttattttagcatgcttcagttgtggtttacaggcagtgatccctctgtaaatggactgcacttatcaacatgctctcatggtttacaatgatcttgacagcagatttagtggattgaatatgggtctgatatggtatggccttctcaaagtctagactttataaggtgtaacatttcactttgcacgtggaagagaaacttctcatgttctccctgttaagagttgaaggcctaaaaacaatttgcaagtactgtgttgatgatttagttattagcacattttccaaaagcatgtagagaaaatatcaaatttgcatgcagtggtraggggtgcataaaggtaacttcctcctgacgtgtggctacaaagtatactatggatatactttgcggctacactgtaccacgttttcacttctcatatcctgttaattttcagtaggtttcctaagtgtcgaagcttgtagtctatgtagcaaatgtatttctatccatgtgtaactgtttcaaattatggaaaatatcacaccttgagccttgagctttactttgtaatgtgtttagtgcaggattgagttccttgaaaagtgaagaagaagagataattttagtgagctacaaatgcctgctgatatatattaagtatgctgaaagtgtatgaatataaaaaaaggaattttatggagaaagaatagttgaaagacctaaggagattcttgaaggggtcaggtttcaggaaactaaagagccacccagctaagatacrgatcaaagtaagccttatgtttattgcttatctgttctgggaaaagcagaggcagccaagtaagacttctgatctgctttcaaaacctaattcaccagttattattagtttggctttaggcatgttacttcattctctaaccacacgtacctcacctagaacaatacccaggcgggaatgggaacaatacctatttcataaaataatcctgaagattagatgaagtaacactgcaaaggacttcactcagccttgatacatcattctgccttagaaaattccaatgaattcattctctttcctgtcctacggagctcacatgtggctggctccttgtttcttaaaccttccctcaatgtgtagttaactgtgccatcatctgtgcctttgtagcccttcacaatgcatcccattatagcacgtatcaaattgtattatttattcctgcttctctttgctagtgggctgtaaggtcgttgaacatgagggaccacatcttattcagcacyttgygcagaacctaataagtgctcaaaaatgacatgcagtgaatgagatgattggatggccgcttaccgctgttggctcagcccagacwtttttttattaatatatctctatgactgtgcccttgacactctcttctatatttctagatgcttagtaaaagaaatagatactttcataatttatttttaggaaataataactgcattgtgaaaaaagtcatctaggaaacttttctgcccccacccttgtaggtaggacaaccatttttattctttgtgccctctcagaaccacatacatactttcatcatcttcatcatatacttgaaccatttattgaactcatttgtttgtttttctaatgtatagtaagcttttggagagaaggcattgcatctagttcatctctacatccttagtactcagagggtatttgttgacaaatggactgagtgtatccctttcttagactgagacattattatttttttagaatgaagaaccttcccattacttaaaatactttgtttttaaatggaactacattgcttagaatagtttaaaagrtgttttgttttttatgttcatgtatagtatataatctgttgcatgaatattttacttacatattttatgggatatgtgttttcagtagatatatttttataggagatacatttttaaatacctacaaaaatcccagtactgtgaagtatctgtgtcattaagtgtaataaaacatattacagtaacagtaatctgctgaatgcttcctattaccctgcagggaccctagagattgaaagctttattttggaaaagtcatctttatggtaataatgtaaatggatgtattaagtaacagagcacttataaagagatccttgtctaaaggcttggtatgtagggcagaaaaccatgcttcactcagaaggccactggctgtggtggaaacttgctgtttcttcatggagttgataacaaatattttttcatgttattttttctcacatttatttttcaaagtaaaaacatttatttttcatatttgtagaattcttctatttataaaagtaatttctacttatgaagagagcagaaataagaggaactctcactacccagaaataaccattgttaaatttgttgtgtgtaattccctacatgtatacatgcattatatatatgtattcacgtgatgatactcgttcccccatattttccaaaatgaggtcrtagaacaggtgctgagttttgwtctgcttccttttttttttaatttaataatgacattctttgcccaaaggagtaataaaacctatttttatctaaaatctctggagaacaaaacattttacctaatagttttcaagttaggtaagggttttcatactcatattttaaactttttagcttttcataaaaaatcttttaagatgtggcacactctagtggttatgagactttgggttttattgaacagtgtagggaaaagagcaagaggggattttagaaagtaaggtacagcaataaaatttcataaaatatgtcttaatgtgtactatccctttcatttcataaaggagaggaccgattctagcaccatacatgaaggaagagtataatctcagaatgccaggctgccattcaggaagtaccagcatgctgtctcagataagcggttctgaggaactgcagtctatggtttatgcacttactgagttaccgtggtgtcatgggcaggrtgaatgcacmtgaggtggtgcaggacgccaaatagtgtaactagaagtcccagaggaggctaaagccttcttgactaaactgcgaccctggtgctgtgtgggtagctcctttcctgcctcacttcctccttttccttccctcgtggcattctcagctttccatatgccctttcygggtcctggttgctcctgttccctcccctgttgctcctgatactcacctcttcttgtcttttctctctttctccctctactttttcaattctcatggttttctctgtagagaaaagctgatcttttaagacacagtggtctttttgtatgaagtatgtaaatgcctttgactactacatacatatgcctacatatgaaagtagtagtaggcatatgtatgtagtagtcaaaaggcatttattaatttagttgttcaatatatatttactgctgtgtctctaggcaacagagatgcaaggccaagccaaacctcctcccttgggaattctcaggacagtggcagttactttgggtctttagcacttatggcaggtgtcagtgctgctccggctccttgtgttgccatctgggtactgtttaaaccttattgtggactgtggatttctttgggtgaaagtctgtttttctcacccttctatctgttgagtgctgtgcagtgtcttgtacagaatagakttattttcctgtctatttctggagaggggctttttttgaagatctgatcaatgattggagtcaaactctttagtcccacatgtgatccattgtaaactaactggcaaatgtttcatatttcccctctaatacataacaaaaacagtttaagtctgaaaagtggtataaatggaacggaacatgacattcctgtagccatttttttaatacagattatatccctgattaataacaaaattgccagtctttttaaatataaaattacaacaaccatatagaatcacacacctccaacctctgctgatcttgatcttagtacatgaggcttgggttgcgattagatttattgtggcaggaggttttgtgtttgaggaactaaaggactttctagtaaacatagatgcaggagagcaaatttgtgagtaaataccttaaagtctttatataagttttttgtagttaaagtcactaacacagaacaataataacagtacaataaatacagagaatgtacgtggcattttagatatcaagttggtaataatggctgctgtgcgattaatttgatgaaagaggacagtgatgatcctgattggaagattgatagctcttgggtggggtggggatggggagaggcactccacttgcttttcttaaggacttgctcaaagtaagtctgtgtctctaagtggagagctttatcaattgatttctttttaacatttgatatatgtccagtatgttctgccaaatgcaggttgccaaccagtaagttacagaaatggctccatggttctgcagtgctctggctgcctaaattgaacattatgtatctgtgttgttctgatggaattagaatcctgcaggtgcttgtggccaygggagaaagtgtgtggcagcacctctggcacggagagttacttcctgcaagaagtccaagctgaaaatggatcccygctgggccacatttctggtgccacttcattgagcactttctgtgtagcagcagtttcctggtgttactgctgaattgtttcaggggtaatttcctgtgagttcagtatgcatagtaacaataaagaattttcatattgctatgtgattaatgtttattaagtataaaatttcacagttgtgtaaaaatatgcaaaatttataamtaattcatttttgagcaaggacacatgattggggtgggattactatttaataaaaatgctactctattatttattgtaagtcttttacaagtgtacagaaatcagtgacgtggccaataataccagtttttctttcctgtgtcactgggtagtctaaaggcatagtgaggtgtttagtaacttcatagtttagtaactgtgaagccaggctgcctcagtttgawtcctacctcctctaactattggctgtatgacattgggcaactatttaacatctctctacctctgtttcctcatctgtaaaatgggggtagctgtgagaactggataagattgcttaggatagtgtctgacagagtaagacctttgtaagtgttagttctactaattattatttttcagattcctgcattatttttataacagcagatgacaagcartgtgaaaaagtaccattataagtacaatgtaagtggaatacaaatgttagccatggttttctacacctttgaggaaataatattgatttttgttccccactcacgtcccatgggtgagagtccgattccttctccaacaagtttctgaagccttggggcttaagttctcatgatcattgcagccctgtgttcctgctcctgcttcccatagctcttttttttttcctcttcgtcccaaactgacttggacaagaaactcagtcccttcctcttgatttctcctcattcccccagcttctctcattaagcatttgggtgggcaacagacttcatgggaggctttggcagtggaggtgagaggggctgagatctgttgtaaacaatttatagcamcttttgtgttaaagcaaacatgactgcctgatagaatagaaagcagaatttacatatgataaagaaattctagctgtgtggtagactgggccacttcaggcaaccagaacaccaggaatgtgcatttattctcctctgtcattaggggtacttctatgggggaaatgtttggggaagtacatttgataattgcatcatatagtgagcaaacagtttgaaatttgtctttcagtcactgttctacagtttgcaggtaacaccctataatatttatatctgccgtttttaaaagttaagaattattaggaaagcatttattgtctttaattatagagagagtaatgtaaccatattgtctctttatctttttctttttgggagctgcctgccaagatttaggaatcattttgtttttctaaacacttaatttcatcataatgaaatttcttgtctaatgagatttatatcactttccttattatgagagttcagcttgttttaattgtgatgtctgagaacttatactgaaacttgccgtagtcaggaagacacctgtcctaataggaagacattttacttaatgagttgatgccagtttaaatttctgccttgttttacttctaccttttcttctttgagtagtgaaaattgcatttttatctagctttaaaatttgctctctgcagtgagatctactacatgaaatcttttctcaaagtgatctgtgtgaaaatttaaattaataaacatataccattatttggaatatgagctttaatgaaaattcttgcccgagtaaacagtgtccatttacagtcaactataggaaataatttaactatttacaaggatgcttttgagggatgacattggtagtcattgattgttgcagccccaatcagtattctgtgtgtgctttgactggtttggtgctacttaccttcacatgccaggggtctttctttacagaaccgatgtgttgatggtgaatcatgatgcactgttcttgcacagaggtrgccctgacatttatttcatgaaagagttttcctattttgggatcttgtggggatattcatgaacataatagcctacccaggaaaaaagttagatatggtgaagaagaacaatgccatatttaatgcttgatctttaaaaaataagtttcttataactttggtcagaagaacactgatatagtttggctgtgtccccacccaaatctcatcttgaattcccacatgttgtgggagtgacctgktgggaggtaattgaatcatgagggcaggtctttcctgtgctgttctcatgtgagtgaataagtctcaygagatctgatggttttataaaggagagtttccctccggaagctttttttgcctgctgccatccatgtaagacatgacttgctcttcctcaccttccgccmtgattatgakgcctccccagccacttggaactgtaagtccattaaactcttcttcctgyataaattacccagtctcaggtatttctttatcagcagcatgaaaatgggctaatacaaacacacaggcttgtaaaagtagattacttttaagtaaacacttttaccctgtgatttttattataaagttggagatgggtacttttgggaaaagtattttcctagatgtgtaaaaatcaaactttaaaaaggagcaaatgtttaaaattgagtctagtaaagtatttatagaaataattttaaatgttattatataatcttgctgaaaaataagtcactaaataaagttatactactaaaaatgaaaatgttcgtgacagaataactggctgtaggaacatctcactgaggattattatttttgtaagttgacactggagctttagcaacttgaccaagttttttactckawtttttaattctttcattctctgattttagttgacctcttttagctgtttccagaatcatctagaagatcttttgtattagtcatgagctggaggccaggtagtgctcagcctaatgttaaacctcatacaaatgggcacatgagaaaggagtgggcagttattgttgaaatattattgctgacatttaaaatggttatagggatgggggaaatctaggccaagaaaaaggttatctttgtcttcttcagacttgagggcatggagagtatgacatgagcaaacctaatacttgattttcagaaattcaggggaaaatattcactgacaaaataattttagaatgtctataatttttagtgaatatatattgatgtagcaaatttattgtagtctttatatatagatagagaggagtccacatcattttttttttgtaactaattttttggtttttgcctaaattcaggtagcaaagatgaaatgttggttaaagaaactaaaaataaaaaaatagaaaaaaggggaaggagaattagaaaaatcagaaaaggaaatttacaggggagtgaagagatggcagtgatacstgcatttgtacaactccttcaggttaaaagctgctccttggactgtgaactccttgggaaaaggcctgtcttctctttgtatctttagcatctaatcttgtactcagcgtgtgcttaaagtggtacctagtacgtaatgggcactcagtcagtgcttaatgaatgaaatcaattaatgaaacttagatttctcatgggttatttcacctgatacaagtcctttaaggaaaacgtaattttccccatattataaaaggacaaaccaagactctcatgggttaaatgattgccaaataatgacaattctgctaacaatgacatgccattatgacatattaatcacataaaattagggatatatttgtatttcatgatttataatttcattattattagcagtaagtaatatttagtgaaagcttattgcttcctaaaattatgcttgacatgcaaatttcactagactaaatactatcctgtaaggaagatagaatcatctacattttatagtctggagtttaaagggataggttacctttcaagtttacctagctagtggatgggtgacttgaaagcagcctggtctgacccctgagctcttttttttttttttttttttttttttgagacggagtcttgctgtgtcccccaggctggactgcaatggcgcggtctccgcacactgcaacctctgcctcccgggttcaagcgattctcctgcctcaacctcccaagtagctgggattacagrcatacaccaccacatctggctaatttttgtatttttagtagagacggggtttcaccatgttggccaggctggtcttgaactcctgacctcaggtgatccacccgcttcggcctcccaaagtgctgggtttacaggcatgarctaccgtgcccaccccaactgagccctttcttaatgactacactaagttacctccttctagtcacacagttcttgatggcagarccaggatttgcatccaggtcttttgttcctagttttcttcccctgtatatcgtgcgtgtgtgtgtatttcatttgccttgtagtaggccatgatcagggcatataataatgaccaaaaacctgaattctgttagtatagaatttggtagattttctgaaagatatttgattaaaatgatataacatctgagaggagagaatgactatcactacctggagttgccatgcaaggcttgacacagaaatgtaatggmgtgaagaatgaggaatactccaggtagaggaaaaagatgaatgactatgcaatttattgtccaaatcagatttttttttttttttaaagaaagggacactagcaataattgtggtaggacatcagggcttgaaccaggaccatctgtggaaaccargccagtggtctttgtacagaaattctgttttaggcagaaggagctatatatacaagtggctatttaaaattcacataatatttcaaacagtgttagattaaaaaaaccaaaataataaaaccctacaccacatctgccttataggagtaaagtggcaatgaataactactgaagaaacagcttataaatacctaattagggagaagagagttctagaatgatctagcacagtctattcaggaagttgtatgatctgaaagtgtcttccatttttggtagaaaaatggctaagtttggtgcagatttgcagagcacagaaattaaggtatttactagagttgggggtaaagaargataaaacatttaattcattgaaattaatttcactgtgaacatwtgactcaaagaaggcagactaaaggtgtctggttgtgggaattaacagaattcgagttagtctatccatttatgtttccttgttagatttttctcttcccactggaagtgaaacactgttaattcactattgagccccagacagaaatagtgtgtatggtgagaatgtggtgaggggtaatrgagattgtttggattagcaagtttctgaacagaatacaaactccttttgatttagagatggcagtgtttatgggaaggctaagacaaggtgggaaaaagaaaagaccaagaagtactttgtatacttaattggatatacttcaacctggttagtattctatatggctaatattttcagaagaaatactacatagaagtagtggtatttattaagaaaattacatatgtttgtatgtgtaaacatacagataacaatatatatgatatatgtacatgagccatagtgtaatggttagcactgtggactccgatatatgtacacaaatctgactcacaatttactacttcttgctgatacggtgattttagtgcaaaacctaagcattgatactaagaaagaataaaattttatttttataaaattaagattgtgaaatagtgagcagagctaaaatctggagtataagccgtaaataagtttctcaggtaataaaatcaaaagcaggtaatacaataaagaaaaaggatagattatctcaaattctgttaatttccacagccagatgcctttagtcttacttctttgagacaaatgttcacagtgaaatcgatttcaatgaattaaatgttttatctttatccccaagtttagtaaataccgtaatctctgtgttctccaaatctgcacctaacttagtcatttttctgccaaaaatggaagacactttctgatcatacagcttcctgaatagactgtgctacatcattctagactctcacctctctaagtaggtatttataggctatttcttcagtagttatttattgccactctactcttgtaaggcagatgtggtgtagggttttatttgtttatgtaaaatctaacactgaaatgttatgtgatttttaaacagccataatagtatatatagctctttctgcctaaaccagttttttttttctgtaggaagaccattgtcctggttcaccacagatggtcctggatcaagccctgttgtcttaccacaattattgctagtgtccctttctttaaaaaacatctgttttggacaataaattatatattcattcttcatttctgtctacctggagtattcctcattcttcatgccattacatttctgtgttaaaccttgcgtggcaactctgggtagtgatagtcattctctcctctcagatgtttactatttttatcaaacatctttaataaaatctacccaattgtatagtattatacaataacagaatttggaggtttttgggcattgttatatgccctgaaaatagcctgctacatggcaagtgacacacacacacacacacacacacacacacacacacacacamtctacacaggagaacttggaacaaaagtcctggatgcaaatcctggctctgccatcaagaattgtgggccataaggagataatttactgtagtcattaagaatgggcccaggagtcagacccacccactggtgctgggtaggtgaatttaggaaggttacttaccttctctaagccgccgattgtaaaatgtagatgggcctatctttaaatttatgtaaaatttggagatgatgctaaattcagaggagtgtgcgtgccgagaragaatatcaattaggtagaaatatagacagaaaatagaatgtaatttagtacagagaaacagtgactgatrtatatgagaataattttgtttcaaagtgagtcagggtaggcccggcycagtggctcatatctgtaatcccagcactttgggaggccgaggcggggggatcacttgaggtcagaagttsgagaccagcctggccaacatactgaaaccctgtctctactaaaaatacaaaaattagccaggcgtgttggcgggcacctgtcatcccagctacttgggagtctgaggcaggagaatcgcatgaacctgggaggtggaggttgcagtgagcctagattgcaccattgtactccagcctgcgcagcaagagagaaagtccatctccaacaacacaaacaaacaaaaagtgtctcagggtagagaagaagcctgctgaaaggcattgagaaagaaagtggtgttctcctttgtagttggggaaaggaagaggggagagtaggttgcctagtctagcgctacgtgttttgctgatctgagctrcagtttaaacactgggtttgttggttattgctacatagaaattatataggccaactttttctgaagttgaagtcacttgtggggaatgttgcactttgtttttagttgcactacagattacctctttcaataaagaagatatcacagtgtggggttaataacagtgttctctgatgtattttattatgccagtaagaataataatacaagattataaagtaaccattaatcctttctttttactttatgtagaagaattaacacactattcttaagtctgatcttaaagatactttacaaaataacccccccccccaaatttttggatagaaccaaaacagcctggttggaggccagaaaaattgttattttgtaaaattaataattatttcaagtttaatgatgcatatttcctacttaattgtcacaaaaatgacaaagcagaaaatgaactggaaaaattaaagaggtgccagaaaaattattatgtatttagtttgggtaaggagatcaaagcacctgtgggtcatgaaacatcagagagggccaaatatctgagcagggggttgtgttggtgtatgggttggggtatcgtagtggtaccattcagaagtggcacttatacaccctggctttctgtgaacagtaaccaagggtttagaactgaaaattaagacgcatgcattgtaaaagatttttaaaaactttctgaatatgaaaggcaatatgagggatgtaatttggatattcaaatatgggtattctggggacatttatcacggagatagaaggacaaaatagtggaatttacatttcatagaagattcataaaaagccagaatgaatggttgcagattttatgtgttgggcagatttctatcccaaagaataattcttgtgatatttgatacaattgtgatacaatgatttaaaatcagattacatttatttatgagagtattattgatattgctgtttttaacaacatgcactggtgggtcactgtagycaaaggaaaatactaaattcaatccgtgattgaagccattaagatcaaagctgacttcctggagtttgactgaagtgtgtctgccatgcgggtaagagcgcagtcctcatggctactgctcgctgccaggttggacggagcattggtgggtaaagggtgcrgcctggggcttgggttggcccagagccttagggttgaagcaaaccatggagaagttctctttgactagtaaaaacatactaacaagtgtttcatctatttctagtttaacttaataacttatgtttactttcttgttttactttacagactttctttgtttccttgcttttgaatagaaatacaattggtagaacatttgttaatgtaatgcttttggatgtgtttttgttgtattttttttaaacttaatttttctratagtttttctttcccatggcaaatgcaggtttttttttcatttttattttgtaaatttgagtttatactaaccactgcagagcagcagcagatataaaagcatgatctcctgggtgggggtgtgctgcttgggagagcaaagggtgaggaatggagcagtttgatggaagtttccagcatgggtggaattgaaggaagaaagtacaagtttgtacaaacctagatgaataagattcataagaagaggaaagctattttggaaactacccactatacaaaacctatccacttagatttcttgaagctttgggggtaaaaccaaatgaaggaagtcctcaactttgtttgttccaacaatttaagttggttgtagtatgttttcctgaggaatgacatcctgccaggcattccttagaatggaacacaagtctagataagtggcaggtgcctgcagtccagtcctaaggctgctgtagaacccctccccgagaggctgcgtagcatggaggggaagggtgctggcaggggcttcagatttgactctatacttgttagctaccatagctttggttatttgtggcrtctcagtttcaytatggatagaatggaataatggcatcttcttcatcgggttatgtgtatwaactgagatactccatggcaagttcttagtgtcatacctgggacatatgtcaatattgtaagttgtttgtaggaggcagggtcatggccgtgaggcattaycttgtccttatggagaaattaattstgacttccagttgaattcctgcatttcctccaaaattttggccaggccttttcatatgctagtccccttgcttctcaccatactgtttctcatgacctttttgttcatccttggatgttcagttcagccacttccttggagatatgaatctcccttcrttggaactaaacctagtgggattgacatgtcctgttcatgtgtttctctctttctcaagattatcatccccttcaggaaagaacctgtagctcccagctccctagtttgggacagtctgccatataagagacagaatattatggttgttaaaggcatggtttgggagccaacagtgtgggttagaaccttgcaccatcacttactggctatgtgaggtagggccagttgttttacctgtctgtgccccagtggctttgtctgtaaatgggaattgtaacagtacttacctgtatcaggtaagtactgttacaagtcaagggcaggttaaatgaggaggaagagacttaggcttgaagaggtgggtaggcaggtaaatgtacctcctacatttgtagataattatctttctgtaggtttgttatgcttgactattccatgttctcccagtgatgattttccaattacttatcaatttactcctggggaattaaaatgtaatgttttttgactgtatttttcttttcttttttttttaactgttggtacttttaaaataagttgtggtgaggagagttcaaattacagcataacagaattcatttagtgaattgatgtaacattagcattagtctgccattagcatatcatatagcagtattatccaggtaaggaaaaatatgccatctcaaaaawataaaaataaaagaaataaaagcgacagacttatgtgtcaccttttccctcattttgaatgttgtactctaatgaggaaaaaccccagctcccctccttctggggcaaggcaagcatggcgattcttgttccctgcttcacagggagctgttttcttggctggtgtgccgttctgaagctcctctgccttggaagggcaggcagtccatttctagcctagataccctccatgcttgtgttagcagctgctacgaccaccactgctattccaattattaccactacttctattccactgttatttttactgctgacattactattgctaaaccaccactatttccattgataccaaaatcctgactttagttactgtattctactacttctttatcatgtgtgcagaaagaaatgcttattttccatgccctaagtagagaaccttgcaagctttctttggaatgtagattgtgccatatttttaaaaatttttatattttaaaaaattgtttaatttttttttgggccaggcatgatgcttatgcttataatcccagcactttgggaggttaaggtgggaggatcatttgaacctaggagttcaagaccagactgggaaacatagtgagacctcatctctacaaaaaaataaaaaataaatttgtgaggcatggtggtgcctgcctgtagtcccagctagtctagaggctgaggtgggaggatcacttgagcacatgagatcagattgaggctgcagtgaactgagattgcaccactgcactccagcctgggtgacagagcaagaaagamcctgtctcaaaataataataataataatratrataataataataataataataataaataatttatttttaattttgggggtacatagtaggtgtatatatttatggggtacatgagctattttggtacaggcatgtagtgtgtaataatcacattatggaaaattaggtatctgtcccctcaracatttatcctttgtgatataaacaacccaattgtactcttctagttattttaatatgtacagttaaattattattgactatagtcygcctgttgtacaaatactaggtcttattctttttaactttttttttttttttaaactgggscccatctctrggttgctttgagctagctgtcttctggctaacaaaatagttgagtgctactttctttcacyaaaggcagygacatgcaccactttcrttagcaggttaattaacttaggaaaatagatgatccaggctaactttgacctctgcacttccmaggtattcagttttttagtgcaaagactaaaaacacaaaaggaggagtaaagatgctgcttgtcttccttttgtatgtccagggactaatgcaggtgttgacagaaaaacctttgaaactgagtttctaagtctaagtttctgccaagggagaggggtgcagtgcttcctcttataaggacaagagctgttgaaagcagcagagggcttgtgtgtgtgtgttatggtgactgctggccaagggcccctgaaaatcagttggcagcttcccattgaacacacaccagaggcaggaaacacagactaaagatcatgcttaagaatgtaattgcctaataatttaaaatctttattgatattatttataaatattaatataacttctaaaaatgttcttaggtaagtttaaaaagacacattgctacattaacattgaaataagaagatatgatgacaatttaatgtaaaattttactgagttccctgactactaaggaatcgttgcatttaatttttcctagagataaactgcatcaggattcattcatcaatttatttgaaaacatgtatgtgctataaaagctttgggatacaaagacaatatagatgtattctttactctcaaatatttactatttcttagggcactaggtagtcagacagatatattatagttaagcacagttattaccataacagatgtgagccgggtgctgcagagcaaagagggtgcatgtgtttttacaatttagccctgcatttatgagcttagccatttcaatataattacatataactcatgaaagtacattatcattgaatactgtgaaaaaaaacctgttaactttaaatggtaaattactgtatttttgaacgaatgacttaaaaaattacccattagaaatgagttgtggcctggacaataatcaaaacagaaatattggcttttaawttgctgagaatagggaggttttggtttagtgaactgatgacaagattacagctaaggaacaacccttctccatttatgtcctctctgcatgtcctttagggtcatcatttactgtgatattagcatcagtatgaaaataatttgaagcttcatattgtgcagtcctaaactgatacyacatgtagcatacttattttgtaattcaggggatatttgaaggtatgatttcttagaatgaggatgatgatgccccttctgttgggacccactgatacacgggggaaaaggacaaataaggtcctcatacaaataaaaattattcttttattaaatttctaggagatgtaagatttagctcacctaattttaaaagagagatatagagaagatatggtgaaagggacaraaatagggaactccagtaagagagaagcttgatattattatattccttacacctcttcctccttaccagttaaaaaaaaggatgatctgagacctttggagaggtatagaggaggagttatgatgagaagagaaggagaattcttctygtaccttaatgtttgtaaatcggtttcatggtygtctcttctgtgcctttcgaaactgccaatcatcttattataatggccactcataatttgaattatgccagaccctcaaattcagggccgatctttcaatagcaagtgtcctactgagaacttctttattctgagatgctgagagcttctttcttcaacacacaggttggctctgggtggtccttgcctcatcaaatataagttagaaaatctacattgtgtgaaggtctattagcactcaccgaccttctcatgaaatgtcatttctcatttgggaytgaaataactcatctcacaataagytgtagagrtttttcctcttccattgcctcagttaacaccactagtccattattcctagcaactttggagaagtcggtgtttattttttcaaataaaaagggaagccatcctgtttgcattcatatctttgagaaaagtcaagatggcttttacacatagagaaaaaggaaaccatacacttttaaggggtagaggaaaaggagcgattcagagttttgtagtgaactttagcagtttgaccttcaaatgtttccttttttaagcgtcaatattgctaacattaaagtggtaacaggagkctgcaccttgaaaagccactcatgccttgtctgttgtggtagctacctggttatgaaacattttctaatccagagagctttggcctgatttataattttaggatgttttagaccttgatggtgttaaactttcttcttcggaagttatgtgcattgatattgagtgcttttctaccattttccttcctcaccttgaaataagcgagctattcatgcccttctgaagagggagagaggctacgcatggttgttgaagacacatggctttgttgttagaatacatcacttttcactggatatacctgagagagaggctaggcagcatctaattactgggagtttttatatgtgaagacaagaattaactgactccctggcctccttttcacatactatgtcccccaatttgctaagttaccattttcagtgaatgccctgctatccttccagtgcccaaggcagagagaggtacagttataattctgaggtcttctcttttctctcccmctgcgtccccacacacagtcaatcaattaccaaatatttcttttccatgtaatctcctggagttcttcccatctctccttctactatcctagtctaaatcccattatttcttgttaaattatatgataatgtcctggttgtccttgtcttgtcttcctatgccacatcatctctctagtaagaagaaaaacatttaattctataagctgcaaaaatggagttaatataacatagtagttaaggatatgggccctgtagccagaatgtctggatttgaatcctgactccattgctttggcaaaagcagttatgtaaatgttggtaaatctctaagcctcagtatgtgtttaaaaaaaaattaaaacttttctgattggattgttgtgaggattgaatggcataaacatttagcatagagcttgacacatagcaagcaccgaaacatcactacaacaccaataatcataaatgcaaagctgagtattccgctttcctttggtgcttttttttcttttcttttttttttttggagacagaatctcactttgttgcccaggctggagtacagtggggtgatctcagctcactgcaacctccatttcccaggttcaagggattatcatgcctcagcctccccagtaactgggaccataggtgtgtgccaccacagccagctaatctttgtatttttagcagagatgaggttttgccatgttggccaggctggtctcgagctcctgacctcaggtgatctgcccacctcrgcctcctgaagtgttgggattacagacatgagccaccgcayctggcctccagttttctaattaagaccttttaacctcatcacttctaggacaaagccaagatctctttggcatgccatggacatcccagctcccctcttctgttccttctgtcagcgctcttgtccagagaagtgtccatctcaaccgcttccactgccccaagtggtccatgctttcatgcacattctttgccgtttgactggagcatcctctcactgcaagtctggaaattgcctttctgccttctaaacaccaaccactccttctctttatgtaggtgactcccactcatcctttcttacctcatgtatcagttattccagaaagctgtccctgataccctagggctctcaaggagcatctgaatgtattcttcattgcacttgccaaactattgtgcaaccgtggactcacttgtctgtatgttctgtctcactataataagcctttgagtatagagtctggatcatgtttgcttttcttgtacccagctcttggcatttttattcagttaacatttgtttaatatattaataaatcactacccaattggggatttgttttatggagtttcattatgcctagtgcataagaggcacctcatgaatatttgttaaatgaggatgcatggctatttaaacttttgtgtatccttamttggcaactcttatatggatacactgaatatttaaagaaatttaaagttatttaattctaagtcctgaaattctaaattctaacaaattgttaagttaacttatgtaaataagttagatgatttagcaaagttgtacaattttttttttgtcaaaaataggtatggttatgaaacagtgagctggatttgcccttctgactcataaaatatctctgaaggcagtatatttgaagctgcttcagatgattcaaaggtctagcagataacttctaatctcaaagaatgaatagactgggaaaaaaaaacactcaagtaatgttgtgccaaaacaccctatctctagccataaaatcatacattcatcagttttcttcagttatctcaattttctttttgtctgaacacagtgagataagaattggcttattatgcactccacaaagaaaattatagaattttctgagaggaacattagaggccagttaggccaatcctgtgtatatgagccgttctgttgcaagtgatagattgcttaagcaaatggtggaggtatttgttcttctcatgtaattggctcttgtattctaggagcagcatggtggtttccaaatactatttattgtataaatgaaaataagacttatttggagaaatggctgattccagagctacagcagtgaaaatgtgagatggacctgggacaacttgatataagaaagcaatgaaacaaatattattgtaattattaattatgttgaaaggaaacatgaaccaatttgaagggactcccagtggccaaacgtgggacaatatgagcattaaaaaaataatgatggcaattgattattacaaaaatagaaaaaaagggaggtcaggggaagctttttttctgttttttgacaaaagaatactagcgtgtaagtaagaaaagaatgatagagttagaaaaatcactattttaaagtctcatatggaataattaaagcaaggatgatcaaggaatactaatcccattgtgaaaaattattgggaaataggacagccacwtggtaccacatcttcacccctgggttacttactgctataaaggggggacatgtacctttacagtagagagatgtggcagtaaccatcttaactaaatgattgagtttagcctcagtaatgatgggacaccctaacattttgtgtcttctgatgtgatgaaatatgaagttcacagtatgaagtacttttatcagaactgtttaatttgaatctagatttagctttcagttcacaggaaatacaagtgaaagaataataggtttaatgataccatgaagaaacaaccaaacaaatgcagaatttaggacattttgtaagacaaccagcctggactcttcaaaaagtcaatgtcattaaagaagaataaaggcaaaagkatttttagattaaaagatactgactaaaagataaaactgccaaatgcagtgggtaaaacatgactggatcctagtactaaaagtgggcaattgaggaaatttgaatatggaatggatattagataatatgaaattattgttaattttcttagatataatggtattgttgatctgtaggaaaaatgtccttattcctgggagttgcaggtagagtcagagtatttaggagtcaagtgttatctgtaattcattttcaaatagctgaacataatacatttataaatatataaagggtataggtgcaaaagcatatatggcactatgttgcaattgttgcatgtagatggaatgttcattgtattctttcaacttttgttctgaaattcaaaaaaataaaataaataaactggaaaaaaaatcagtttggtaaaagcaaagcaaaagtcctggagtggactgctggcaggctggcagcctcacttcctctattcctcagctctgttcctatatgtgcacagagccacacacttgtgagcattgagtgaagtgtgagcctagtgaataacactaggctcgcactagactcagcactaatttagtcaaattttggagcagtgggaaaatctcctgataaatttaacagagaagcttgaggaagagctttgtcttgttcatttttaacatttccagtatgtgtaatgttgtaggaattcaaaaactgaaaaatacataaataaaggggtgaccaaatttgaggattgcctggaaaagtgagagtatataagtgactttcaaattcagtaaatatttgtggaatttagtagatctgaactagttaagggacaagtaagtttaagatgaattccagaagtaaggggaaggcctctttttaaatcttctgtgcatgcaatatttcatattgttttaacttttagtaataatacttgcttttctgaattagtgatcaaagcactttatggaagtcttctgcagctttccctacaggtggggaaagtttgagtttggtgggaaatcttcagagcgtggtgtgtgcaattatgctttgttccttggtgagctatgagtcaggcacttaattatgtaaacgatattgcaagagagcagttgcataatccccaagagagtaattattatctgtcttggtagaatacaaggcttttaatctgtaaataagcaattctatgtggaagagctacatgcagagtgattctgtgtcttaaaggtctcttatgaattttttaaagtgaaagcagtaactgcatgtgctgattacctgctgcctttgtgtttcaaagggtttatgatgcttcccttgtggttttaatccctcctgaaatatttaagcctctgagaatgattcccgtgaagggtaaagtgtgtctaagttaagcctatgaataatccaaatgtttcaaatgtattaatagatgaagtaaaaaaagatatgctttctgcaaattaaaaaaacaaaccaagataaacaaaacaatgaattaagacattggcaacacttttaaaaaagcaaagatacaataattagctaatacgttgctcactttttgatggttagtaggtttttttccatttttttaaactttattttggtataacttacatataataaaatgcatctatttaaagttttcacatgtatatttttwaaaaaatatgtgccactgcagttagggtatgtgtgtattttgcttaggtggatctgagtcttttagacactgaaagcaaattttaacttttgtttttttaagtagtcagtagtgtctgccttccctcctatctccctgttatagtgtggatgagttgaccatgctcttctctaaggtcagctgctgcacttaaacacttgatctctccccacttcacctaatcaggactacatttggggaactgtccttctctgctttgttaccagctttcccctctctatcaggttattcccatcaaaacagaaacatgtctcgacatcttctgctgtttcttaaaactcttgaccatttctctgttctcctctgcagcaaaactcaggagtctatattctgtcttcacttccttttctctctttgtctctgaaaccaactccaagaggcctttcatcccactcctccatataragcctgcttttgtcaaggtacccgtgactttcacactgccagaatccatgggcagtgttgaccaatccgttggtctaaatcctatttggccgtctgcagcatctgatatagtttttcactcccttcatctagaaacacattctttacttggcttcaggaaaaccctatctcctggttttcctacttcctaactggtcactcttactaagactcctttgtgagctcctcctcttttcctgatcctttaaagtttcctggctcaggtactctcctcttctttgctctattccacagtcatttcagccagtgtcatggttaacagtcctctgtacactaaagactcccatatttctgtctgwagtacacacctatcccctggactccacacttattggatgactaataggcctctcagatttaacacagtcaaaaagtraccacactctggtcttcccacagttgtctctcacctgggttattgcaagagccttatgtctggttttcctgcctccaccctagctccggcccctttcactctatattcagcacaacaggccaaaaagacctttttaaaccatcagattatgtcctccttttggccaaggcctccartgacctcccatatcagtcagagtaaaaactgtcccataaagatcttcatcatctgaccccactagctttccatctttcctccttttccccccattactcactctgccttgctgcactgacccctttctcagacacgctcagaggcctctatgtcagggccttggtatggaacacttctttagtctgggctgttgtgtgctrcggttctccatggcttgctccttttgcacctcagatctctgctccaccatcctcttctctgtgagaccttctctaaccatcctgtttaagttcccccacccagccccaccaactctcctgatccctcctccaggttttatttttctctattgcacttaccaccatatgaaagtaaaaatacttgcttatttgtgtttgttgctttgtctgttttgtctgtcttttcatattagaatgtaagtttcatgagggtagaaattgccttggtcacagctgtatcacctgtgcctgagagagactgcaggctcggtcagtactgctgaatgagtaattgaaaagcaacttcaaaggctgcttgatgctttcttgtcatttttagagcagtcttgagtgttacagagggtggatagcattcagaataattaactwtatgctaacagctcttttccattcctcagtttctctgtttgaagaacataaggacatttctcacggcctgttgtgagacgtttggaatgaggaaaagtgaacttttcgaggcatttgacytgtttgatgttcgtgactttggaaaggtaattatacttcatttttaacactactttttaactggaaagcatttaagcaaattgtttcaaatcttgaagtagggcatgtgacttaagtggtttatgtatctgcattatatagttaaatttcacatgtagatggcttagcaaaaccaaaaaccaaaaaacaacaacaacaaaaaagaaaccccacacatacaacaacamcaccaaaaaattagcatcaactttccaaatgagattagaattattttgtaattaaaatagtatacagggagggaatcttttctccagagataattttttttctgctggtcacctcagaggttagggttactattatctgccctttaggttgatcactgggcactcaggcctgaggaccagtattcttttcctccagtcttctctatatctgaaagctgctaatttttggaagttgagaatgttctgttgtccttttctctattttgatacttggttgggtractcagagaagacatgaatcacaagtgttcaagattgttgaataatttctgttgcttgaatttcagcagatatttgttggatttcaaggacatttttcacatggaaattgttttaatatttactgttatccgtatgcacactaaacacatgtataataagtgaaacaaatcatcatttcaaaaattatggtcatttattatgaagtgagtggacataaacctctcacaagtaactagccataaaagagtcaggtaattaaggtgacaggactttagcttatgctgatgtaattgcattatgaaaataagcaaataaggaggaaaaaactaatgctattgagaagtttgtccttattcttgtaattcaggtgctagtatcttatcaaaaggctgtttgagagtatacattgttttaactctgagatataatattttcattagaaaataaccaatggattgctctttgctaaacagcataaacttgagacagaaatataggaaatttgatgctgaaatacagcgcatatggggaagccactctacctggggtgggggaaggccctggttctctctccggtcttaacccatggtcattttgtgatctagaaggcaccagccttctyrggcatcaggctgcctgccagcttggaaagctgtacmaaaggaaggggggataagaaggtggtttctaagattcctttaatctctggaaagctgtgatttaactgtcttgaggtccaaaaagtgatggaggataaaagatgataatttgtacaacgaactgaaagccaagcccctagtaaggaaatgggagcgcatttgtctgtggccatgaatcacaggtgaggtggacacttctctaagctgttggccctgaaaaacaccagagatatttctggttttatttttcttttatccttccgcctrttcctcctgcacctttaaaaaaatcttccttgatttttctttattttcaccctctcttttggggaaatgaaaaatgaaaatgaattggggaaatgaaaaatgaaaaagtcttgactttttaaagctcattaaggaactatttatttttcatttaagtttgcaagaaatggtgttgataaatgttggaaaaatatataaatactttaaaatgcatggtggtgttctactggaatgagattgcatgctagattgattagacaacggaagctttgtrggagagttgatactacaaaaaattgaatgtgaaagcataaactgtatgcttctcaaggataaatgtatttttgactgcttaaaatattttagcagtggtagatctgaaacagaattaaacatgagattgtggtttagaacttgaacctacattatagtcacttacattttgctactgccaagattggagtagctatctctttagaactgtatgatctaaagaaaacactgaaagttaaagaatttgtgatatagcttcataatttaccagtactaatagtattaagcattatatactctaagtaaaaactgccaataccaccagtagttgaacacttaaaatatgcagtctgttcagtcttcatgtataatttgtaaaattgtaacaacgttaagaggttaggtactacatttttctcttctgcatcccaaatcacatatctattwgagattgaagcagcagtttgaactcaggtctagctgattgtccactactgtaccatagtgcaaacattcacatagcacataaygtgtactttgcatatattgagggaatcagcrcatcaatcccaacatgtggatactattatttttcccatttataggtcctagcttgtgggtaatggaactgaaataattcttgtagttttaagttgaaaaaatgtgartagtgttaattcagaaacaaaataatttctgatgtcgtgaatatatacattttaacaggatgtggataggttgttttcctccattccgtaggatttaattaaatgttctgttaacttaaaatgaataatatctatgtgtgctctcctgtctgcctcatttcctacattggtgaatctggaattcatgtgtatttggcatctttttgccaaagaatgtattaattatgatagcagcacctagtgtttttatagcctttgaagttttcagagtgcttaatattactgacttcatttgattgtcataatactcttgtgaagacattcttcagatgaggaagctaagacatggggaggtgcttggatagtgattctagggtctccttgcttgggaagaggaacaagatctggagctcaggcctctggcttctcagtcctgtttttcttgtccactgtctgtgttttgggtctcactgctctgtggatggtcagggaaaaggatgaacttatagaagaaaattaaaggaatttataaaattaaaaaacacaggtgatgtgttacttggcatctacttatactttagaaagaaaggaaagatttaggatactgcatgagtctgcagcccagtggtggttaaagttgtttactctaaataggcatgtgattcactgattgtacacatgcagtcaattcttagctatactctcttaccccttttctcattgtggtgttttctgctcactaaactttgtccaagctctccctctgtttggggtttaggagatttattttgaatcttaggcttgatatggatgtgttttcttttggaaaatcctggaaacagtgttaacacaaatgataatttgtattttgtgagatggtgaagagcatctatttgggcttctctagaagggcttatgataattctgcctttcagtgctacctttrttcttagaattgagctctttcctcagtagtaattcacttcaaactccaccaacatcaacaaaaattagaacagtttgaaacgctttctacacttttttttttaatcacacaggaaagaggagtgagtttagtaacttgaactcatttaagagtcagcagaggccttcaggttagatatgactctcactcttcaggkttgttaaatactgaaaaaagctcctgaaagagggagatttcttttctaagactgctgaggtctggtsgggggagagggggggaatgggggacgttgagggtttatgttttgaaaaaccatttactttcttacttttgaaaaaagatgaatctctttctggctttctgataataaaaataagtaaaatcttgttagttaacttctttgcttaagaaatgtaattaaaatgtttcccctggcataatattagaaattactatattattttttgacatcatgacagtatctgtaactttgttcgtttccgtactgtatrtaaagaattttccataactgtttcaatcgtcagtttatgattaactcactctttggaaatgtttcctactgagctgtctgttggcacattgacagtgcagaagcacatgggattttttctttaatgagacaatttctagagcgtaatagaagtcaggctgccactgtccagatgagtgactaaagtcatctccttaccctgcctctgggtgagtgtgaagggcctgcttcccatgacacacagtgtaaagtgatatgttttcttaaagagtatccatacctggccagtggtaggtccagttgatttgaattgcaataggatagtttcatcatgttcaggttcaggacaggcaccgtcaaaaggaattcagagcatcagcttaggggtgagtcagggatacaggtaagaacattattgggagagagagagagaaagagttgtattttagttaagaattaaactaaagagcttcttcacagcaaaatgaacagtcagcagagaaaacagacaacccacagagtaggagaaattcttcacaatctatacaccaaacaaaggactaatatcaagaatctacaaggaactcaaattagcaagaaaaataaaacaaacagtcccatcaaaaagtgggctaaggacatgaatagacaattctcaaaagaagacatacaaatggccaacaaacatatgaaaaaatgttcaatatcactaatgatcagggaaatgcaaatcaaaaccacaatggaataccaccttactcctgcaagaatggccataattaagaaaccaaaaaataataaatgttgacatggatgcagtgatcagggaacacttctacgctgctggtgggaatgtaaactagtacaaccactatagaaaacagtgtggaaattccttaaagaactaaatgtagaactaccatttgatccagcagtcccactactgggtatctacccagaggaaaataagttattatacgaaaaagatacttgcacacccatgtttatagcagcacaattcacaattgcaaaaatgtggaatcagcccaaatgcccgtcaatcaatgtggataaagaaattgtatatatgacggaatactactcagccatacaaaggaatgaattaatggcatttgcagcaacctggatggaactggagactattattctaagtgaagtaactcaagaagggaaaatcaaacattgtgtgttctcactcatatgtgggagctaagctatgaggatgcaaatgaataagaatgatacagtggacttgggactcaggggaaagtgtgaaaaggaggtgagggataaaagactgcaaattgggtttagtgtrtactgctcgggtgatkggtgcaccaaaatctcagatcaccactaaataacttactyatgtaaccaaataccacctgttcccacagaacctatgtaaataaaaaattgaaaaacaaaacaatacatggtttctgagttagatcttggtttggattccagttaagctccctattagtatacagtcttgggcaagtaacttgacttctttgagcttcagtttcctcatccatgtattgagtttaggtgagtattaaatgaaattgtgtatgtcaagtgcttaacagagtgtcaaggtccaaggtaagtactcttattgttaatgttattatcactattattatttttaatgattgtgggattcattggtaaacataggtgtcgaattttgaattaagtgcaagagaactaatgatattaaaagggtgagataagaaataaaattcattctttctaatgttgtatagcactattttattttattttgcacagccatcgtttctctttccttctgtggccttggatctcctttgagaaaccacactttcctctttcttaattacagagtttggatggtttcatcaattatrtcccatgcctttgaccacatagtgatggttcaggaatggggttagtcactcagttgggaccaataagacatttgcaagggtagttttatttttctctcttcctgayacagaagagtgtagatgtgagtctacacaaggagctataaccatctgggtaccacatggagtttcaaaatggacccagttcagagggaatagagttgaagatgaacctagtgacaccctgtgaagtgggaatcagtgctgtgcccaaagctaaatgtatatctataggtttttccatgaaccaatacattcctccttttctcttttttgagccagttttcactagttctttcaaccaagagtaagagaaatctaagtgattcactgtgtttcaccagttaaatgatttcaggtttgtagatgtgttaatctttattaccgaagttccaagcaatttggagaccatttgttaagcctctacatctcctatcgtatatgcaagaggagatataaagacaaagtcccagaacctatyttgcagcatgtaaataataaaatagaagtacagtcccagcttcatagtcaatgctttcttttccttgccagtgattccagaaatatcatcgatcttgaggtttagaaggtcaccacaggcatcccgacaacctacttgagagcctgcaatggtttactactacctgtctatctttgtgaaattctgcctggctttccctgtcacaagaaaaccctcccaagcaaaggcttctgagcctttcttggctataggtggccccagggacctcaccttggcatggcttgaaagagccttattatctagtgcatacacgttaatcaacacctgaaaacattttttcatatatacatatgtaaacaggaagaattattttagggtgtaaatctttttaggtacttgtttgacataaaacacgtttgatgtttctctcttgaagtatttcccactcaaattatccagaaatctttgggctttatgtcatccatgggacttaaatcagccttgcttcaaagccccacaggagcttgatctctctgtctgctagtgtggtgctattgcacaagactggttctgtgtggttcctgggacagctttagtgctctgatgctagcaatgcccttgtattttcagcccttctcaaccccatactacccacacaagtttccttcatccctatagcattttagcttttgcattgagcctggccaggccatatctccctaactttgtgatgaattcttttcaggggctccttgtattctgtcagcaagcctgggtcacatcctcctcattcagcccttacagggtaccaacttccagtctcagagcggcatttgggatcctgagtatttttcctccctcaagggtctggaattttcccacaaattagccagcttccagcctagagctggctcagcctggcaaggagtactgtcaggagtcaacctccactcaccaaggccgcgtttgctttgtccccctgagcagtaggaggcttgcctgtaattacataactaagggggagctctgcagtgattcctccctgaacaaagatagcttgttccaaggctacctttttttaggcaaaggaggagggaacagcttctagccttccctaatgtatgtgtctggctggctgttaacacaattcccagatcattagcactattgccctcctttgtttttggatggagttgacctgtttaacaaccttctcatctttttcccttttgtaggggtatttaatgcttggcagatttttccattcctacctcctcttatagaactttagtacccgagccatgcaaacacattttttacaccttagtgattattcaagtccagtttttagtctgctcctaattatttttgagtcagttcaataaactctttactcttctgtaaactaaagactgttgaaaacttctggaataatatttcccaaataactttgcaaagaatcccattgtcctaagaaatgttaataggaagactggagaaaaatattcttgttccaatgagtttggtaaacactgcatattgtatttatgagatatagcatagtaaaggaactgaaaagtcctgcagtgaggaaaacaaacttttgttkactccagaatttctcatatttgcacatgatattaggtatttagatatcatgctatttaggtatcacacaattgcttcaaactcattatgtataaaactgaagtacttttttttttcctttggagacatttctattttggtaatgtttcttgttttgttcaccctgccaggagctaaatggttacaaatgccctatttttttttttttttttttttttttkgagatggagtctcgctcttttgcccaggctggagtacagtgacacaatctcggctcaatgcagcctccaccttccaggttcaagtgattctcctgcctcagcctcccgagtagctggggctgcaagtgtgcaccatcatgcctgggtaattttttgtattttttagtagagatggggtttcgccatgttggcccagctggtcttgcttgaactcctgacctcaggtgatccacccgcctctccctcccaaactgctgggattataggcatgagacaccatgccaagccaaaatgccttttctttaaccctccttgcttttgcctttagttgaggtactcatcactgggattattgaaattgtctyctaggtgttttcttgccatcagttttgaatcgtttcaagctmatcttcaacataatcttccaaaaatgtagatctgatcattttactcatgggtttrtcaccaggggaaggtatctgagttaccagtggcgaatctgtacaggtctacaggaatctcaattcttgcctcctcagaagaaagaattcgactgaggggcataaggcagaaaaagagaccgaggcaaatttcagagcaggagtggaagtttattttaaaagcctttagaacaggaaagaaaggaaagtatgcttggaagagacccaagcagacactgaggtcaagtgcagtgtttaaccttgatcctaggactttagaagctggcccctttcccatgattcttcctttagggtgggttgcctgcaagcccagtaccctccttatccttgggaagtgagcacacacagtgtgtttagtatgttgtatgcatgcctatctgagactttttccctttttctggtggagtgcccctggaaactcatactctgccattttgtctcttactgtgtactcccaggaaattgcttatctctggtgcctgcattcagttaacacttyagtgcaacaggtgtggaccatcaggaagtggcttttcccttgcatcagctgccaagttatcacttttagagaggcagtgtgataattgccaaaccttcacctgacagtcctagtggctgggagaaccctttcctgtccactcttgcctatctaactagctgtaacaggtttaaaacttgatagtggatccctgttgtttataagagaataacatctaaactcttttacaagccgcacaagattcttcatgatcaggcctctgcctacctttctaaccttatttctcactttcctactcccataaactccctcgcttaagtccttccaaattataaatcatcatgactcaccagattaatattgattaatattgtttcctttgcctggaatgccttttcttttcattccctttagtcccttgtcygcggtgactcaattcaagatcacatacactcattacactcatacacacactgcttaaaatctgaaatyatgtgctttatccagagctctggacttagttggttcttggatatattgagtcttctgggcctggctttgctacttgtctctgcacattccctcagtttcaactgggaccttccccctgcttctctgccccacagaaattggaccttgacacattacattggctcttttcttcagctcatcctgagactttgagatcaagtaaaactgactttcaccctaccctgcccccagccacctgtgtgcaggaaagttgctcagcctctcagarccttcatgttttgatctgtaaaatggccctgatgaggatccctactgcatggaattgtggtgaagagtgtgaattgaattctgagggaaaagcaaccagtgcagtgtggggcagggggtaaggctcagccagaggtaactcctgagtaattcacccatcatttactcattgggaagtatttgtatgccatgtgctcgtttatcagggtggaggagcaggtagtcaagaccccctgctctcaaggcactgtcactgtccatcactatccaagttaaggaaacaaattggtaaagcataaacaaacaagataattacaaccagtgataagtgccactgaggaaagaaacagagaacaatgatgagcagctggaggaagccactttagacagactgggaaggaaacccatttgaaatagtgacagcccagtgagaaggggatgctagtactcacacatttacttatttatttattattttttgagacagggtttcaccctccatgcctaggctggagtgcagtggtgcartcttggctcactgcaacctccttctctctgactgaagcaatccttccacctcagcctcccgagtagctgggactacaggtgcatgccaccacagccagctaatttttgcatttttttgtagagacagggttttgccatgttgcccagactggcctcaaactcttgagctcaagtgatccacccacctcagcctcccaaagtgcttggattataggcatgagccaccacgactggcccttgccctcttatttaaattaagttttatataagttataaagcacattttaactagattctatcctacctctttcagtagatccccttgggctactccttcaacttggcctcagtttgttcaactctgatattctyctgattctaaaatgccacttattggtagatgtaatatgtatacattgcattttgtaaagtaatgttttgctttgatgattcttagttgtgtaatcctctctgaaaacatcaaggcttaggctctctcataccttttgtttatatataagctcttctgcagaggcttttaaacctgggtatacttcatttttggtaatattgacattcccttaaaattttaaacttttagagagaaaacttgactgtacatacacttctggagagagaaaggcattataaagagctaaaagcatgataaagatatcacctagattttacgtctgcatttggcatagctactgagaatgtttccaaaactggaaatctggtttgagaactgaaatcaaacttctctttgctgtttcaaggattcctctatagatcaaacagtgaatctttcgggtagttttttwaaaaaactctatttccttcctaatatacatgtaaatatgcacacagaggtttacagacataccaagatatacgtatctatatacgtaagtagagggaaagttatttaggaaggtgccgaagtggtaatccacatggaatttttggatttcgctgatagtcctcacagcttgagtgtaagatgcaacaggggcaagctggatcttgaggtccagcagagattggggccagagtatgagggcccttgagatcttgcagggtctgcactgattctgacaaagggccagtgagtactttttaacagatagacaggagatgaccatagacaggagatgacctgctaagtgcttgagctaagcattctgtcagtgggggaggctgtagtggataattgtaatgccagtggtaggaggagcagrcttgaaactgaggcagtctggttaaaaaatgatgcagacctttactagagcaactgtaaaagaggcccagagtttgagagatttgggatgtttaagaattgaagtgagtggtcagaggatgagaagagagaatagtgagccttggaaacctggcgaggggaaaagtagggtttattgcaagggaaataatggagcaagagcaaatataacttacagtgggtttcaaattaatgtaggagaattctaatggcatttacccttaatttatgtatattttacaaccgagtagatatgttttatttttctatgatttttgctatattgtgccatcctaaattttccctttgttcctttttttgatgttcagttggttgcttggttgggtttttttggtatttactgattatctagtggaagcttggtccctggtagaacacttagaaatttggggtttatcatttctattaaaaatggaaaatattttctttctgtgtaataggaaaccttctaggaatatttgtctgtatttccaaggctatggcacatatatgctcactaatgcacgtattctaattcctagccttagttgttgggccgtatcctatctgagctgtgttcagaaatccttgaccttgtcacattggcttaagggtaagatgtagtttatccaagttacatatggaggtcattgagtcttcatttgcttacaataaattgtaaatatgatggatgagaaatmtgtaaggagaattggttaattccagtgggtgatatattaatagtcaatttacttgtctacacaaacaacagtgaggcagaactcttggcctttgactgttgtgcctgtgtatttcctatcaacaagatctcctagaaaaggaggatggcactttccatgtttattttctgtgtcttcttttttttaatggcttatgcacatctgtaggaataaaggaggctggtgtttgcttcccatgctcagtgagaggggtagtgtgggggtggaactggctgaatgctctcatttgcacaggattaggcagaggaagtgtgcaccagtagtggtatgagcaccaaacaactacaggaaacaatgcttggcagtcactgcagctgtgtggagtccggctgcgcaggcttcctctggatagagtttagtttctgagtcacttgttttccacttaaagcacctgtgtctttggagaactccattgaagaaatattagttgaatatgggcctttctctggtttgcctcaatgccaattataatgctctttggacatgaaaagttctgctaaatcaacatagtgtctgaggaccagtggtgtcaggacaggccagtgcgtagagcagtcagaaatcattaggttagaaaaatgaatggtttttaaatctttcagaacactccccactgaagtatgtatgcatgtgtatacacaattaattttgcacagagatgtgcttggtgaccttaggtataggctttaccttgctactctcattctttgtttctgtgtagaggaaatgaaggatgctgcttgctgcttctgagtaagcaggtgccttatagattgtgtgctgaatcatttacactctttgagttgtcttttaaagtagctgcatatttataattcatcttagacaagatgatcaatctagaatggttatattcggatatgggtggacactggacactatttttattggtcagtctaggtcaaattttaatgatgattgatagcattggatatggattgggtagagtaataaaaacatacatagaaggctagattcatgttagaattagctatgcatctgctccttatatctataaagtttaacaaggattctttaccaaaatcactgctgatttttcctaatagccttaggcttttgggaagaagcagcagaaaaaytagaatttattggctgccagatgataaagtacagtttcttggggagatagcaatttagaattttagcaaagttactatgaagtataatgatgaaagggagatgatattaattagcgttggcttttacaaaaaaattgttgaagtatttttagctttgtttacttggaatttggtcagttgactgcacccaagattctccaaatacatagacgtgtagaaagataagcaatcaaaagcatatattcctttttttctatactgttttggattcatggttggaatcccttctgcagtatttgaacaattcctagagatgtaacagaaatttcttaagtagcaacagttccaattatggatccagttatggataatgaattatctagagattcatcactaataataaagcataatctatctttctaaattttcttccattggttttagagcagcacagaattaatttctacaccttctgtaggacaatcgttcaaatatttgaagattgttatgtttctgtaagtcttttcttctttgttgtcttctttttttgtaaaagatagggtctcactgtgttgcccaggctggactcaaagtcctgggcacaagcagtccttgtgcctcagcctcctgagtagccgggactgcaagtgcacgccactgtgcttggcttctcttcttaaaatgaaataaacgtcgtctcctcagttctttcttttttgattatttctttctaacttctgtgggtaatttgaaatgtctgattaggataacacatatgaaacagcacagttaaaggttaagaaatttaaaatcgaaggagagaatagaagccatttaaagaaagggacactatcatcataccaagtggtttgaggattacagtgatctctcagcagccctgaagtcaagtaaaaaagaaacccaataggttaatacagaaatgagttcatgaactagcttaaagcctttgttcccagtggtaatttggaaaatgctaaattaaaagcccaagaacttaaattattatagagataaccaaacatataaaacctagaaaactactacaatcaccgctcatatatctactattgaaaaattatcatttctgtctctacaaaaaaatacaaaaattagccaggtgtggtgccatgcatgtgtagtcccaggtacttggaagattgaggtaggaggatggcttgagtcaagaatgtggaggctgcagtgagtcgagatcatgccactgcattctcgcctgggtgatagagtgagactccctgtcaaaaacaaaaactaacatttgaccatatttgattcatctactatctattataaatacttatataccgctatttttgctgaacaatttaaaagtaaatatagataggcatcatgacatttgtcccctaaatacttcaaatggtacagccgtcaaaataaggatatttttctatataaccataatatctttatcacatataacaaagtgaataatacttccctggtattatttaatatccagatatttaaaatatcaaattttactagttttctccacaatggattttatagctagtttctttgaatttgacatgattgaataaaggttcagacattacttttggttgtcatgtcttcatgagtctaagaaaaatgttttctttagcagttttataaatatcttgatttgaatttaattttctgatgatctaccaaaggtgattatcatttttgatgtatttatattgaatttatactgctcctctttgagtttgaataaagctttagttttctgtaatttaggggatttttaaaagccttggcttgcattcagtgtggaagggactcagtaaatatttttgttaagatttaaataagtagtataatgttaaacagtttacaagtattttaggactattatcagctaagcactaaatcartcatcgagaattattccatgtttttatkcagagtttaaatacaaggaatgtactcttttagataaatagatcctaaagcatgttttctaatcaagaaatgtctcarggggctaggtgtgctggctcaacgtctataatcttagcactttgggaaacagagggtggagaatcactggagccccaggagttcaagaccagcctgggtaacatagtgaggtttcatctctacaaaaaataaaataatgaactgggcttggtggtgtgcaccagtagtcccagctattcaggaggctgaggtgggaggaggtcaaggttgcagtgagctgtgatggtgccactctactccagcctgagtgacacaacaagactctgtctccaaaaaccaaaaaatgaaaaaaaaaaaaaaactcctcaagaatctttcagagttttggagtcttagttgcttgaatgctaagatttttatctggctaaacaacaacaaaaaagagaaaacaaaaacacccaaaccccaaattatttagacagtatttaagccatttacactttgtcaaaaatgttagaattctgatttatccctgcctaaaacaactgtatagtttcaagaacatttgaagaatgagatgtcatattcttgcccatgggatttcatttctatggagcatttacccaaatatttgctgtgactcacacttccaggatactctcatctagagcatcagtccccaaccttttaggtaccagggactggtttcatggaagaaaatttttccatggaccgagtactgggggaatggtttgggggtgaaaccgttccacttcagatcatcagacattagattcttacaaggagtgcacaacctagwtccctcgcttgcacagttcacagtaggcttcatgcttctatgagaatcgaatgcccttgctgatctgactctaggcagagctcaggcagtaatgctcactcacgcactgctcacctcctgctgtgtaccagactggtactggtctgggggttggggacctctgttctagaagtttcactcctttttaaaattttcttagatggtatctgacttaaatttttcttagattttggttctaagaaatataatagttaaaatttcaaaagcaatagttttgaaggaaggtttagaagagaagaaactgtttttagaaaatcttgtataatttcagtgctgtcaatatgttaatctcaaaatgaagatcacatttttaatcttagccctctaatagcaaagaaatgggaagaaagcaaggaaattttcttgtagttaagtggattttcctcctttagtttaaattctggtggtggtatatctttaagagtggttaactcacttaagagtgaaaagaattccctaaactcaaaaagtataaaatgtataagcatattctttattacatttattattgccagagtggttgtagtttgttcaggattaacattttctttacctatgttgttactatatattacttgttacataaataaaatctgcaccaaagttgggtcttataaataatataacatttgtatcctctttttaatgaaaaatttcccatgtagtccatatacctttcttccacattttttctctctcgaactccagctgatctaaaaggaatctaggaagcattcttcattcaacctttaagaggcccagcaaagtcttttggtaaagttgacaattctttttctgagacaggaatcaggcacagtcagtcgataacttccccccctttcattctgcattcattctgaatattttatgacaaaagcttttagttttgttacagaaaaaaaatacaaagcccagatttgtccaaaagaacatacccgcaagaaggtctacggcagtgaaacagaaattgaaaagagttgaaatggaatttttttccatgtttcatatcctccattgttcctaaacctgtaccattcattgtcatggaaaatgttactacagtctaaaaagttataacaaagttcaaaatttatagttaacttaggatttttartaagaatagaatatatatcatatatatgagaatttattaggtagttttaattcacaccaccacaaggtcccacaataggctgtctgcaagctgaggagcaaggaagctagtctgaatgccaaagctgaaaagcttggagtctgatgtttgagggcaggaagcatccagcatgggagaaagatgtgggcaagaggctaagccagtgtagccttttcgtgtttttctgcctgctttatatcctggccatgctggcagctgattagttggtgcccacccagattaagggtaggtctgcctttcccagcccactgagtcaaatgttaaccttctttggcaacaccctcacagacacacccatgaggaaaactttgcatccttcaatccaatcacattgatattcagtattaaccatcacaccatgtcatccacagtggagtgaaatggtgcaatcctaactcactgtaacctcaaactcttgggctcaagcgaccctcctgcctcagcctgccaagtaactaggactataggcacacacaacaccacacccagctaattttaaaagtttttrtagagatgaggtctcaccatgtagctcaggttggtcttgaactcctgtgctcaagtgatcctccagcctccgcctcccaaagtgctgggattacaggtgtgagccaccatgcctggccttccttcatacttagaaattgcatgaatcattagatttttgtagtaaaaaacaaaaatctcatatttgctctattagataggtttcagccaattttcgagaagctggttactaaacaagagaattaaacttgagaacaaaataaagtgctatcaattagttatcataactttgataggcaatttaaattaactattataacagtaatgttgattttttttttaatatttcggtcctgggggaaaagtaccatttaaaatttcatgtgtcttttgatcagtaaatcagcatattggatagaaatttcagctatctactcataaaaaatgttatattctggtttgactttggctcaaatcagaaaattgctatgtaaaaatttacagaataatgcaatatcctctactcaatagctcccaactactaagaatattataaatgtaagcagttttcaggaacatagcaatgtgggatatttcactggaatgatgtaaaccgtaattaatcacatttctgtgactgccatcagtaccatcaccttccttcagtgtctctccttgtatttgggaatcccagatttcatgtcggcttttgagtagtcctgctgctgaccataggcttttctctcatcttgcttctcacccactccacctgtgtcacagtgtcatttgtgagcttgcttatgagtgtgcatggggtggtctcctactcagaacatgcccrgctgtgcttctgttgcttcctagctgcctctgcagcttctgtgagggaagactgttgggcaccaatggtagtgaagcctttggacctcaagcactgcactgttttctgggtagaagtggaaggagcctgtgctctcagctttctccacacattttcctttctctggactcagcaggtatttttctagagttgacacaaaggaagagctgtgagacatcttcctgtatcttgcctttgagtcctcttttattccccctggcygctttgttattaggctgaattttttttcattaggttttgtagtcctcatactattagatttattgtgggtcaccctaccagtcctaacaaggacatcagtcatgtttgaaactcatagatttggggtaagctccagttgttacacaattcctgcccctgctcttaacaaatttaacatataaatgaagttaacaggcctggtggggtggctcacacctgtaatcttagcactttgggaggcccagtcctgttgatcccttgagctcaggagctagagaccagcctgggcaacatggcaaaaccacatctctacaaaaaaatacaaaaattatctgtgcatggtggcatgcagctgtagttgcagctactcaggaggctgaggtgggaggatcgcttgaatccaggaagttgaggccgcagtgagccatgattgtgccactgcactttagcctgggtgacagagcaagactctgtctcaaaaaaataaaataaaataaatagagttaaataccagagatttcttgaagagccttttttgtgacagacagtagaatgctgttcaccaaacccatttcttcttgttttggggtacataggcagattatatttccaagcctccttgcagttagacttagccatgtgaccaagttttagccagtggattgtgtgcagcagtaatgtgtaccattcccagacctggcccataaaaacattcgatgtgctatcttccatgcttttgtttttgtgtgttttctctaaacaccaactgagtacagaggttttggctttagaagatggcaaargcacaaagggatggatgctcggtcgctatgtaggggaaagtcatctgctaagcaggaacaccattgtgggattattatgtgaatgaaattaaactttagcatgttaaaatacagaattttagggtttgttacagcagttactgttatgctttcacatcatttttcagcagttctcaacctttttcaccttcacatacctgagagaagagaccctcccatcatattcgtgattcactatggcagggaaagatagtctcaaggtcagggaggtcattatgacatactgcaaaagtggtcgagcaggaaaattgcagagaaatgtcattagatttagcaacatctagagcactgttaaacaatttcagtagagtggaagtagcaggagatgagattgcagaagcatgagaaataaatggtagatgaacacatggagtcagtgaatgaagttatctaatatattagattccatcaacataatcataagattgcaaaatttgtggaaaacaagggaattgttttttgttgaagccatttgttaaaagattttaaggtgaagatcttcagcaaggtagtaataaggtaaatatgtatctgtttgcccagggtggtgtcggcttatgtctgttaacctagcataattttattttattttatttttttaggcagagtcttgctctgttgcccaagttggaatgcagtggtacaatctcggctaactgcaacctctgcctcccaggttcaagtgattctcatgtcccatcctccagagtaactgggattacaggcgcacgctaccatgcctggctaatttttgtattttttagcagagatggggatttgccatgttggccaggctggcctcgaacccctggcctcaagttatctgctggtgtcagcctcccaaagtggtgggattacaggcgtgagctgccatgcctggcccctagcataattattcatagtgacctttcactcttagcaatatcccaacttagaaaaaaaaaatacagttaccctacactgtgacaacctaatcggcatacacagggggttcagatctgaaagagtggctgttaaacacatagaaagttagctcataaataagttgtctgtggaatattctttagttacctcttataaaggagttaaaatactgtttcttggtttacttaaggacattgtcaaattagccctaatataggattgtgtttaggaaatagaatgttggataaccttcattgatctgggttctcttttgatctatttttgtttctctggcttttctctttctgtgatggtctttctgtgtcctgctttgtcatcaaaaataacttttttttttaaagacattaaaagaacttgcagcactataaatgaattttttttttttggttcttgagggatgggggaggatctttctgagtatagaaacaagaacttgtacagaaggtgatacattttcatttatgaaaatggaaaacttgtgtatctcaaaaagtacccccaagtaaaaggcacatatggcaaactctgacaaaacacatattatttatggaaaatatagtgttgaaagttttattctccataaagggtaaataatggattacaatggaaaacacttgtctcctatgttgcagcatagatgattgcatttaatattcccagctccattctgttattatcttggtttcacagatgatggttaggtaacttgccatagccacatgactaataagtggtagagaagggattttgaacccatggggtcggattccagagcacgagctcttaactgctgctctcctagatcaatacataaatggaaaactcaaaagaagaatgctcaaaaaacagttttcacccacatccatgtgcacatacttgcatacacttattaatatgagtgaccagtaaacatgctttcaaacctgttggaaatgatggcaaaaatcaatacaaattaaaaaaaaaacctacaagccttcatttttgtctattagataggcaaatcttttctttcctatgaaaatactgagaattgataaaggtggtgtgaaatgttggtgatcctatcctttgaatagcatttgcctggtgaaatgcactcttttagatagagtggttgctgataaaccatttttggttaggatttgtcatggtctatctaaaatcttaaaattgtttatggtctttgacctagtaaatatacttttaagacattaataaaaataaatattcagagagtcttacatacttaagataccagttgatatacataatgttaatttaataatttggaataaaaactaacamccattcaatagaagaaagttggttaaatgagttttcagaacttcataaaatggagaactctgcagccatttaaatattttagaagaaaaatggaatgaaataaatcctcacaattaatgaaaagtatctaataaaacagtatgtaaaccatgatccccagttttattaagattatatatgtaagcctggaaggaagcttgccaaaatgttaactgtgtttgtttttcagtggctagatttgaggtggtttttattccttttctattttacaaatttttgtatgcaatgactttgtcttccttaattggagactcattttcttttaaaaatacttaagactttgaagagtcctttaggaacatacctgagtcttcaaattatttttttggaaggttgagaattatgcatagagaggaacagggaaactaaaaagggaatttcatcatcctcataagggaaaaatatatagtcccattgaaaacgtttattaaaggtataggtacagtcttagttccattttaataaacaattcaaacttctagtagtcattcctctggcctcagttgcttagcaccagaatccttagttggaggtatgataacttaattgtacctctgaacatagcctttccaggaatcagttctgcctcaatgaggattacagattaaaagcaatctcactgtattgtacttgaaattgagaattatgtttccattttattgtatctagtaaaacctgaaactcttgaaaaactttttwaaaaaaatcagcaaactcgtaaaatagcatcagttactgtattttctcaaatataaacaaggcgctatactgaatcgatcacaaatttttctaagtgggtagattcatatatttgctgaaacacatttagctgatgctgcctaatggtgacattagatgcatcttaaaaaatcttctctattatatgtttatttccagcaacatcctgatttggcaagaattatttttcagagcctgttccctttggggacagcatcctgtgggagcacttctgtttccctttgacttcctgtgtatttaaagagctcttaacaagtgtagggtatgtggtgacttttttatcttgcaaataaatatgaaaatcttgttctgtggctcagtataaaatgaataaaggctttccagcttaataggcaagaacatttaagattaaaggtaaaatgaaaataaaatgaaaattcactattgaaacaaaaatttgcttttttttttttttttttctgagtgtttttctagttcaagtrtgctgggtgttagcagccaaattaaaactgaatagatatgacagtgacccttttataacacatttgtttaaggccagatgatacagatgatgacaaatgcttgtaagccaagtgatagctcttctcctttccctcttctcatgagtccccttcctctagctttgggaatgagggccggcttctttttttttttttttttttgagacggagtctcactctttctcccaagctggactgcagtggcgctatcccggctcactgcaagctccggagggccggcttctttgttcatgtggcagttgcttctctgcacttcttctcagctctgtcttgttcccagccttaccttgggcccctgctgctctttctgcttattgccacctagaattcaggawaacttttcttccttcaagttctgttgctgtggagggcaatgccaagggcacacttacctgtactgttgcttggtttcccactatgcagccatacgaaaggaaatatatatatatatgtgtggtarcctttattagatgtttgcagataatagggaggaatgacaattaggaagagaaaccttaaaaatagktgatcagtctggctctacaaattaaaaggaagaaaactttattttttctttcttttttttwaaaaaattatactttaagttctgggatacatgtgcagaatgtgcaggtttgttacataggtatacatgtgccatggtggtttgcttcaccaatcaacccatcatctacactaggtacttctcctaatgcaatccctccccttgccccccacccctcracaggccctgatgtgtgatgttcccctccctgtgcccatctgttctcactgttcagctcacatttataagtgagaacatgccrtgtttgtttatctgttcctgtgttagtttgctgataatgatggtttccagcttcaaccatgtccctgcaaaggacatgaactcattcttttttatgggtgcacagtatcccatggtgtatatgtgccacattttctttatccrgtctatcattgatgggcatttaggttggtttgaagtctttgctattgtgaatagtgctgcaataaacatacgtgggcatgtgtctttatagtagaatgatttataatcctttgggtatatacccagtaatgggattgctgggtcaaatggtatttctagttctagatccttgaggaattgccacactgtcttccacattagttgaacctaatttacactcccaccaatggtgtaaaagtgttcctatttctccatatcctctccagcatctgttgtttcctgactttttaatgattgccattctaactggcatgagatggtatctcatggttttgatctgaatttctctaatgaccagtgatgatcagcttttcttcatatgtgtgttggccacataaatgtcttcttttgagaagtgtctgttcatatcctttgcacactttttgatggggttgttygtttgttttttcttgtaaatgtgtttaagttccttgtagattctggatattagccctttgtcagatggatagattgcaaaaattttctcctattctgtaggttgcctgttcactctgttgatagtttcttttgctgtgtagaagatctttaattagatcccatgtgtcaattttgtcttttgttgccattgcttttggtgttatagtcatgaagtctttgcctctgcctgtgtcctgagtggtattgcctaggttttctactagggtttttatggttttaggtcttatgtttaagtctttaatccatcttaatttttgtataaggtataaggaaggggtccagtttcagtgttctgcatatggttagccagttttcccaacaccatttattaaatagggaatcctttccccattgtttttttttgttaggtttgtcaaagatcagatggctgtagatgtgtggtgttatttctgaggcctctattctgttccattggtcaatatatctgttttggtatcagtaccatgctgttttggttactgtagccttgtagtatagtttgaagtcaggtagtgtgatgcttccagctttgttctttttgcctaggattgtcttggctatgcagacttttttttttttttggttgcatatgaaatttaaagtagttttttctaattctgtgaagaaagtcaatggtagcttaataggggtagcattgaatctacaaattactttgggcggtatggccattttcacgatattgattctttctatccatgagcatgggatgttcttccatttgtttgtgtcctcttttatttcgttgagcagaggtttgtagttctccttgaagaggtccttcacatcccttgtaagttggattcctaggtattttattctctttgtagcaattgtgaatggaagttcacttatgatttgtctctctgtttgtctgattggtgtataggaatgtttatgatttttgcacattgattttgtatcctgagactttgttaaagttgcttatcaccttaaggagattttggactgagacgatggaattttctaaatatacgatcatatcatctgcaaacagagacaatttgacttcctctcttcctatttgaatgccctttatttctttatctttcctgattgccctgtccaggacttccaatattgckttgaataggagtggtgagagagggcatccttgtcttgtgctgattttcaaagggaatgcttccaggttttgcccattcagtatgatattggctgtgggtttgtcataaatacctcttattattttgcgatatgttccatcagtacctactttattgagagtttttgaggtgttgaattttatcaaaggccttttctacatctattgagataatcatgtggttggttgttttgtcattggttctgtttatgtgatggattatgtttattgattttcatatgttgaaccagccttgcatcccagggatgaaactgacttgatcgtgatggacaagctttttcatgtgctgctggattcagtttgccactatttttttttttttttttttgagacggagtcttgctctgttgcccaggttggagtgcagtggcatgatcttggctcactgcaagctccgcctccagggttcacgccattctcctgcctaagcctcccaattagctgggactacaggcacctgccaccatgcccaactaattttttgtgtttttagtagagacagggtttcaccgtgttagccaggatggtcttgatctcctcaccttgcaattcaccctcctcagcctcccaaagtgctggcattacagacgtgagacaccacacctggctggtttgccagtattttattgaggatttttgcattgatgttcatcagagatattggcctgaagttttctgttttttgttgtgtctctgccaggtgttggtatcaggactggcctcaaaatgagttaggaggagtctctctttttctattatttggaatagcttcagaatgaatggtacaaactcctctttgtacctctggtagaattcagctgtgaatctctctggtcctgggctttttttagttggtcagctattaattactgcctcagtttcagaacttgttattggtctatgcagggatttgaattattcctggtttagtcttgggagggtgtatgtttccagaaatttacccatttcttcttcattttctagtttatttgcgtagaggtgtttatagtattctctgatggtagtttgtatttctgtggaatcagtggtgatatcccctttatcattttttattatgtctatttgattcttctctcttttcatctttattagtgtggctagcggtctattttgttaatcttttcaaaaaaccagctcctggattcactgatttttttgaagggttttttgtatctctatctccttcatttctgctctgatcttagttatttcttgccttctgctagcttttgaatttctttgctcttgcttctctagttcttttaaccgtgatattagggtggcgattttagatctttcccactttctcctgtgggcatttagtgctataaatttccttctcaacactgctttagctgtgtcccagagattctggcacattgtttctttgttcttattggtttcaaagaacttatttattttggccttaatttcgttatttacccagtagtcgttcaggagcaggttgtttggtttccttgtagtcgtgtggttttgagtgagtttcttaatcctgagtcctgatttgagtgcactgtggtctgagagactgttttttatgatttccattattttacatttgctgaggagtgttttacttccaattatgtggtcaatttagaataagtgcaatgtggtgctgagaagattatatattctgttgattatagggtggagagttctgtagatgtctattaggtccagttggtccagagctgattttaagtcctgaatatccttgttaattttctgtttcgttgatctgtctaatattgacagtggggtgttaaagtctcccactattattgtgtgggagtctaagtctctctgtaggtctctaaggacttgctttatgaatctgggtgctcctgtattgggtacatatatatttagggtagttagctcttgttgcatttatccctttaccattatgtaatgcccttttttgtcttttttgatctttgttggtttaaagtctgttttgtcagagactcagagactaggattgcaaccgctcctttatttttggtttccatttgtttggtaaatattcctccatccctttattttgagcctatgtgtgtctttgcatgtgagatgggtctcctgaatacagcacaccaatgggtcttgactctttatccaatttgccagtctgtgtcttttaattggggcatttagtccatttgcatttaaggttaatattgttatgtgtaaatttgatcctgtcattatgcagtttcttcacagtgttgatggtctttacaatttggtatgtttttgcagtggctggtactggcttttcctttccgtatttagtccttccttcaggagctcttggaaggcaggcctggtggtgataaaatctctcagcatttgcttgtttgtaaaggattttgtttctcctttgcttatgaagcttagtttggctggatatgaaattctggttgaaaattcttttctttaagaatgttgaatattggcccccactctcttctggtttctagagtttctgcagagagatccactgttagtctgatgggcttccctttgtgggtaacctgacctttctctctgactgcccttaacattttttccttcatttctgccttggggatctgataattatttgtcttggggttgctcttctcgtggagtatcttagtggtattgtctgtatttcctgaatttgaatgttggcctgtgttgctagtttggggaagttctcctggataatatcctgaagtgtggttttgaacttgkttccattctccctgtcactttcaggtacaccaatcaaatgtaggtttggtcttttcacgtagtttcatatttgttggagtctttgtttgttccttttcattcttttttctctaatcttgtgttcatgctttatttcattaagttgatcttcaatctctgatatcctttcttctgtttgatctatttggctgttgatacttgtgtatgcttcatgaagttctcgtgctgtgtttttcagctttatcaggtcgtttatgttcttctcaaaactggttattcttgttagcaattcctctaactttttaaaagtttcttagcttccttgcatwtggttataacatacttctttagttcgcaggagttttttattacccaccttctgaagcctacttctgtcaattcgtcaaactcattctctttccagttttgttcccttgctggcaaggagttgtgatcctttggaggatgagaggcattctggtttttggtattttcagcctttttgtgctggtttttcctcatctttgtggatttatctacctttgatctttgatgttggtgatctttgaatggggtttttgtgtggacgtccttttcgttgatgttgacgctattcctttctgtttgttagttttctttctcacagtcaggcctctctgctgcaggtctggctggaggtctactccagattctgtttgcctgggtatcaccagtggatgctgcagaagagcaaagattgctgcctgttcctttctctggaagcttcgtcccagaggggcacccaccagatgccagccggagctctccagtaagaggtgtctgtcgacccctgctgggaggtgtctcccactcaggaggcacaggggtcagggacccacttgaggaggcagtctgtcccttagcagagctcaaacgctgtgctgagagatctaccactctcttcagagccagcaggcaggaagctttaagtctgctgaagctgcgtccacagctgcaccttcccccaggtgctctgtcccagggagatgggagttttatctataagcccctgactttgggggctgcctttctttcagaggatgccctccacagacaggaggaatctagagaggaagtgtggttacaggggctttgctgagctgtggtgggctccacccagtccgaacttcctggaggctttgtttataytgtgaggggaaaactgcctactcaagcctccctcccccaccaagctggagcatcccaggtcgacttcagactgctgtgctggcaaggagaatttcaagccagtggatcttagcttatggggctccatgggcaggggatctgatgagcaagaccactcggcttcctggcttcagccccctttccaggagagtgaatgtttccgtctcgctggtgttccaggaaccactggggtacggaaaaaaaacttctgcagctaactcagtgtctgcccaaatggccacccagttttgtgcttgaaacccagggccctggtggtgtaggcaccagatggaatctcctgttctttgggttgcgaagatagtgggaaaaacatagtatctgggccggatagcaccgtccctcgtggcacagtccctcaaggcttcccttggctaggggagggagttccctgacctcttgcacttcctgggtgaggaatgccccaccctgcttctgcttgccctcggtgggctgtacccactgtctaagcagccccaatgaaatgagctgggtacctcagttagaaatgcagaaatcacccgccttctgcattggtttcactggttgctgcagactggaactgttcctattcagccatcttgcccagaatccaggaagaaaactttaaaagttaaagtctcttataggttagttaaagttatgtcttatataagatagtttcatcatgaatacttctcagtttccagttttgtttctttgtcatgaagttcattctcttctcccttttccaggaagaatcatcttctttgaacccccacagtggaaagctccccgctctgtaggggtacgttttatcctaggattatctgtcacaactgaacaggcamaagactcccccaaaaatgcatttttccgtgtctgattttatcagtctggaataaccccatggggggagagggtgaaaaaacttggtgcagacagtgtgggatgaagtttggctttctatgttccagccccttctgaatattcctcggtaatgtggaggtttaaatacgcctgctcatacttcagcagatggctagtgaattgaaccaccttcctcatatatatatatataaatatatatatayacacacacacacacgcacacatacatttttaatctcaacagtgtaattctaagacaaaagtctatagatgattagtgaacatttagagttgtgatagaaatccaatttgagctaccactagaactgataataactaatgtttattaactatatatatatatatatatatatatttgtgttgtgctaagggcttcacatatctagtcaaattctaatgacaattttattagtaggtactcttatcatccttattttatatatacaaaaactgaagyaccaaaggtttataggaaacttactcaggatgtgtgtttaagagtcaggatttaaatccaagtagcctgattccagagctgtcagttataatgcycacccaggagcattatgccttaggttgagcataatgtggagaatttgactcataggtttcacgataaattggaacagccaaactattgggaagggyggagtaaaggtggacttcaggaacaagtggaaccaggaattcaaatagcattctctctgtctgtcttttttctctacttttttctcagtaggtctgcttctgctctcatcatagataaagttcctcatgataggaatatgaacacttgatgttaatatttccatattaatgaaattaaccatcattaatttccatattatgttaatatttctctcattggagagactgtttcttagctatggttataaaaatcgggagaaatttctagacagataacgatatctgcctaagtctgtgccccctcccaaaatatcctacatatgatagagaacaagaagaaaaattaaaatgcgtaaaaatgacaccccctgcataaccagaaaaccaaggacacccaaacttcaaattaactaagttttaaaaaaaagaagaatgaaatctcattgagctatctctcataccttgcctcaaacctttgctgtgaacaagaacagtttaaaaagctgcatgggagagaaaagagatgccaaagattaaagtgaaactactgccacagaagttcaccagatgggtrgaagtaccgaaacaatttccagtttggctcacaaaggcccaactatacactgtttataagagacacacctgaaacaaaatgattcagaggtactaaaaatcagtgggaaggactgcagttgcctcaccttgagtcagctgttcactcctgggccactcaactgtggccaacagtgcagagtgctttttatttttagctattcatctcgcaactcccttcccttgccattcagctatgtccaaggtagtggactcattttagaatttgggaactaaatgtttaaagcaatgtcttaaagaagaggggttccacactcagaagagggaggtactaggtagacaatataagtatgaaggtaaacatttgctagaaattgtttttcagtattctctttaatattcttattaaattgatttttgtttttgagtaatttggggcatgagcaatggtagtatagaaaaatttattactasgtagtgaaactagaataatgctgtctaatagaaatatgagagccataaatgcaagccatgtaattttaaattttctagttgctacatttaaaaagtgaaaaattaattttaataatacattttatttaacccaacgcaccccaattatcatttaaacatgtaatcaatacacaaagtataatgagatattttctgttttttttccttattcttccaaacccagtttgtatttacacttacagcacatagcaatttagactagcctcatttcaagtgtctaaagtgatggacagctcagacctagagagaggaacagtcatttagtcattttagcataataaatgaaaaataatacttgaatcctaaaatgtgttttatttctacttcccatcgcagttaaagtgtgccctatctaatgcttttactttgtgtttttgtatgttaatgatacctattttaaattggggcatgtttatagcttgatctatggcacccacaagcagtgatggagtggagaaagattgttttctcacctcctttagatctctgtttaaatatccttgttatagatgccttttctgaacatttgaaacaaaatagcaaccgctactgtttctcctcagccttctgacaatttctgtgccctttatattgctttagtttttttccccatatttcttattacagctgatataccatttatacttttaaaattgtttctttttctacccccccctttcccctaaatacaccagaatatgaactttgttgaggacaagaactttgtgctgtattcactgctatgttaccatatcctagaacagtactgcacatagaagatgcttagtattttctgagtgtatgaatgaatgaatttaagaccatatggcattcactattggtgtatataatggaactcccatcatcattcccctgagtggtctccctttggtactggccaactctgccctaccacactgctgtcagtcagcttaaacctcagttcttctagctaagaccatggcagtagtctcattgtggtctcactgcctccagccttcccgtataagctatttgattgccagatgaattttttttttttttaaaagcatctctgaacatgttgatcccttgctcagagttttcacttccttccagtggtttatagttcttcacacttgcttttaggagtctctgaaatatgctgtacttatatcttggtctgttgccaactagacagtttgccttttatttttaaaatgctttcagtgctttctcctcttcttttcctttgtatcaactactttttgttcctagtcactttttttcctttcctgccttgaccagaacccctgacttaacttttgttgcttcctttacgtttctttagggcacgttaagaacgttaactttgagcacttcctgatggattgatcatagaaaggctgtgaaatatgaatagacaatgaaatgtcatcaaagcaagacccttggcatgtgtgccaatggttaaatgctctggaatggagcatttgtggctgagagggaaatgtttatatctgttaaagtgcagggactgtctagaataaggcactttattaatgaacatcctttgataacctattcctttactaccttgtctttaagtggtgccaatcaagaaaggtctttgcacaactttaaaatatacatgttgttttgtagcaagtaaaaagtgacctaaatgctttctagcatattgaagcaccaactttttatgtattgaatttaaagcagtgatttacactgctaacastgtaacatttacaacatttacaacaytacatttacaacattacaacatttacaggctaacagcaaaacatttacaagtttctatagagaactttaggaagtattctttctattttctggaagaaattgtggattatattttccttgaacgtttggtagaattcactagtgaaaccatctgggcttgatgttttcttttggaaggttattaattaytaattcgacttctttagctgatacaggtctgttggtattatctatttctcctgtgtgagtttgtgtctttcaaggaattggcctgtttcacctaagttatcaaatttgtgggcatagtgttgttcattgtattcccttgttatcgtttcagtgtccatggaattagtagtaatgatctctcctttatttctgatattagcaattwgtgtcatctttcttttttcttggtttgcttagctggaagtttatcagttttattgatcttttcaaagaaccatcttttggttttattggttcctcctattgtttacctgtttccaattttgttgattcctgctctaatttttagtatttcttttattctgtctgctctaagcttaagttgttctttctctagtttcctagggtggaagctttagattattaattttagatattttttctggtttaatatatgcatttaatgctataaatttttctctaaggaccaatttttgctgcatctcatgcatttagacaacttgtagcttgattttcatgtagttaaaatatttcaaagttcatttgtgaatttttcgactcataagttacttgagtgtgttctttaattaacagatatctagacattttctagctatctttctgttgttgatttctagtttagttccatattgtctgagaacatactttatatgatttctattctgttaaggtatgttttattcagtaattatttttataataaaataggttatcagttttgtatttggtcataagcttgaagaagacaaagtcagtttacatgatgaattaaatcagcctctgccctataaagctgagcaaattggcaagaaatgctaacttatgcatttgactactacagtattcttttaatttttccttttctttcaaacttttattttagatttgggggtacatgtgcaggtttgttacagaggtatattgtgtgataccaagatttagagtacaaaggaatctgtcacccaggtagtgagcatagtactcaataggtagtttttcagcccttgcctctctcctctccttgctctagtagtcctcagtgcctattgttcccatctttatgtccacatatacctcatgtttagctcctacttgtaagtgagaacatgcattatttgattttctgtttctgtgttagttcacctaggctaatacgctccagcaccatctatgctgctgcaaaggacatgattttattctttttattttagggctgcacagtatcccatggtgtacaatttcttatctggtctaccgttgttgggcacttgggttgatttcatgtctttgctattgtgaatagtgctgcaatgaatgtacggatgcatgtgtctctaggtagaatgatttattttcctttggttgtatacccagtaattggattgctggattgaatggtagttcaacttgactctttagttctttgagaaatctccaaactgctctccacagtggctgggctagtttgcatttccatcaacagtgtaaaagtgttctcttttctccacagccttgccaacatttgttattttttgtctttttaataaaagccaccctgaccagatgtgagtttgtatctcattctggttttgatgtgcatttctctgattagtgatgttgaacatttatgtttgttggaracttgtgtgttctcttttgagaagggtctgttcatgtcctttgctcacttttcaatggagttcctgttttgtgcttgatttatttaagttcctgatagcttctggctattagagctttgtcggatgcatagtttgcgaatatattcttcttgattcatttaagttcctgatagattctggttattagamctttgtcggatgcatagtttgcgaatatattcttccattctgtagtttgtttactctgttgatagtttctcctactgtgcagaagctctttaggttaattaggtcctatttgtcaatttctgtttttgtcacaattgcttttgagaacttgaccatgaattatttgccaggtcccatgttgagaagagtatttcctaggttttcttctaggatttttacagtttgaggtcttasatttaagtcttcaatccatctcgagttgatttttgtatatggtgataggtaggagtccagttccattctcctgtgtatggctagccagtaatgccagtaccatttattgaaaagggattctttcccccttttctgattttcactgactttgtcaaagatcagatagttgtaggtgtgcagctttatttattggttctgtattctgtttcattggtctatgtgtcactttttgtatcagtaccatgctgttttggttactrtagccttgtagtgtagtttcaagttgggtaatgtgatgcctttggctttgttccttttgcttaagattgctttggctatttgggctcttttttggttccatatgaatttcagggtagtttttatctaattctgtgaaaaatgacattgctagtttgataggagtagtgttgaatctgtaaattgctttggacagtatggccattttaatgatactgatttttccaatcaggaaatgttccttcaatgcctagtctattgagagtttttatcataaaaggatgttagattttattcaaagtttttttctgtgtctattgagatgatcgtatggtttttgattttagttctatttatgtggtgaatcacatttattgatttgcatatgttgaaccaacattgcatcccaggaataaggcctccttcatcatggtaaactaactttttgatgtgcttctagagttggtttgctagtattttgttaaggatttctgcatctatattcatcagggatatcagcttgaagttttgtttygttttgtttttttttgcccattgtttctctgccaggttttggtattaggatgatgytggctttgtagagtcagttagggaggagtccttcctctttgattttttgggaayagcttcagcaggactggtaccagtttttctttgtacatcaggaagaatttggctgtgaatccacctgtttttttttgttggtaggtttcttattactgattcawtttcagaatgtgttactgatctgttcaggttttcaatttctttctggttcaatcttggaggttgtgttattctaggagtttatatatttcctctagcttttctaatttgtatgcatagaggtattcataatagtctgaggttcttttatgttttggtaggatcagtggtaatgtcatctgccatttttgatcatgcttatctgtatcttttctgtttttgttcatctagacagtggtctaacaatcttatttattctttcaaagaaccaacttttgtttttgttgactttttagatgtgtatttgcatctcagtttcatttagttcttcgctgattttatttcttttcttctgctagttttgagcttgttttgttcttgtttttccagttcctgtaggtgcagtgttagattgttaatttgagaacttttaaactttttgatgtaggcatttagtgctataaactttcctcttaaaactactytcattatatcccaagtattttggtatgttgtaattctgtttcattaatttcaaagattttttgatttccaccttcattttgttgtttaccttaaaatcattcaggagtaagttgtttgaatttattgagacttgctttatggctaaacatatggtcaatcttagattatgttttgtgtgtagatgagaagattgtatattctgtgattgttgggttgagtattctgtcaatgtctattaggtccaatttgtcaagtgttaagtttaagtccataatttctttgttaggtttctgcctcgatgatctgtctaatgctgtcagtkgagtgttgacatctttcactattattttgtgcctgtcttttcgtgggtctctaaaaacttgttttatgaatctggatgctccagtgttaggtgtatatatatttaggcaccatgcctgtgtttccctagccctaaggaatgtcctaatgggctgtgcttccccttcccttaggggcagcctgagctgaaggttagattgccagaaacctgcagaattccggaggtctgctggtcctctgtgcttggcacagtcagaatgggttgtggagtatgtccataggtggtctgttgatgtaagaggtcaagggtgggggatctttgggcagagcagtgatgctgtggctgtgcagatggtatggtgcctatgggccggggttttttgccctgcagacagctgtggggacctccagcttgctctccattgactgatctccttctggtggctactgtagaatctgtccctacctgctagttttttcccaaactttctttgcccagatcattgggctgttaagtgttctaggccatgaggctacattgggcagaggctgcagctagcagatagaccacactgttcccagaccagccccgcagagggaggcatgcccagctctcacactggcccacaaaccgcacatctcactcttctcagtgttcagagtgggtgctctttccctgcttgaggaccagccatagatctcagcttgtcactcctgagccatctgctctaacctggggggttgccacaagcctgaggctttgtcctttagctgcttggcaccagctgtgctagggtagccatagtgctcctaggcctccaggaaagcactcatgtggggccatggcaaggcactgaggctgggtaatggaacctgtgcggtgtgcatgctcttgtgggagcagccaggcaggggccttgatagcggctggtggacaggggagcatgcagtacagatgtgccccagtcctgcagaaaatatagccctactctctcctggcctagcagtcagcaggggttacagctacttggaggaagatggagagccttgaatgatgggtgcttattagagcattttgctgtagctgccctatgtgtaaaacccctgggttccatgcaggctggagctctgtctctttctactctctggacagatgcccctgtcagttcagaagcctgtgggggtcatgggatctcctgtagctaggatcccagaggtccatggtgagagtaggttgtcccacagtcacttcactcacttcttccttaggagctgttcaaggccaggaactagtcctggcattcagcaaccccatgcagagttcccagcttccttcctcatcagccctggtgtttgcattgcctctctattgactctcattgctttctctccaaagatctgttcaaagtatgttggtttactcaatattttggtctctcttggtgggagaggggcttcctggctgcatctagttggccatcttgtccccattcctcccattaaggtatgttttgtggcctggaatgtggtctgtcatgatgactattccatgtgagcttgatcagaatgcgtattctgctattgtgtagagttatcaaataacttgatctaattgacagtactccagattgtcaattgaatattccaatttcctgtagttattttcctgtgtccttactgattttatgcaatggaacatttttaaaattcctgccttagagcactgcatggggcccagtggtttaagagttatgagagctaatcctgaagggggctaatttatgacttgacaacagcagagacattgggtactaaagacattcagaacaggtatatgtggttttggaataatttacgggtgtatcatgcatttatttccctttaagagatgtttcttctgtgtgtgtccrtaagggtgcaatttttaaatgtaaaatgggtttatatatggccacacaaaattgcataatgagaaaacaagaattatttacagcaaattgttgactgtagttaaaacacctggttctgctttacagttctctatagtttctaaatatcttaaagtgagtgaaagtgttttacttttgaaaaagaactaaaagtatgttatggtttattgagatctgatactgtctcatgtgagcaatgaacctaaggagtggacactgtgaacaaaattgcatgcgagtaagcattgccatggctagtgcttgattacttgtagtagtcaaggaagaacttgaatggaattattaattacgattcatgtaataattttagcaccatttttgaagccacccttgtcatccaagtgactccctagacctttgctagcttcacaataacaagaacatttcactattgcttggtggggttacagggagtgaaataggcactgaccacacgtcataaacacacygtataattgattcctgaatattcagaactcatcccttgaaaaagagtatgaacttttggaaaagataaacctagaatgttgtaggtaagtatagacatacataagtaaaaattagaaaaaaaaatttctaaaattttgttagtctcagttataagtgaaaaagtatagaagagagatttgaacaaatacgtgataatattttctttaaaaaggattggtctaacatcattttaaaattatgttatgaagatgacttctttcttaaaaccttatgaaccaacctctgttagcttcaaacttttcttctacagtttcctcacctttctcagccttcacagaatggaagagagttagggccttgagttatgttttggcttaagggaatgttgtggctgatctgatctatccagaccacgaaaactttcactgtgtcagtaataaagctgtttcactttcttatcatttgtgtatttactggagtagcagctttaatttccttcaataacttttcctttacattcactacttgtctaactggcacaagaggcctagtttttgacttgcctcagcttttgacatgccttcctcgctaagcttaatgtaaatgttaatgcttgatcttcataattattttatctttatgattttttgctatgattttctagttgcraaaaaaatcatgtatttctcattagattttcactgttatatcaaactttttaaaacttttgatagtgaaaattccaagcacacaaaatagaatagtatggttctttgaatcatagacctttttctagcatgaatgcattcaattaacaatgtgtgtatgttatttgctcttcctaacttatgattcagcagtttacattttgtacaatgtaatcaatggcttacattttctacagcgttactgtttttaaaatttccatagcttaaatatgaatattgaagcatcaacactttggaaaacataaattaattgcaaggtagacacaaggggagccatttctaccgaggtgttaaagacacctattatactacatcctggatattagacagttggaagagttcataaattaaaaaataagctttagtaatttggagtttgtgttttaaattattttataaaagactcagatagaaatgaaaatgatgattttgaaaatgctgccatgaagaaatagaaggcagtcagtgggactgccttttggattgctgtgagactcgcaggtcattgttcagactgttaaagacccggtccacgaattccaaacattttcgaaggttcttcctgttcttatcattgtaactgctctgccgatgcatttgctgactctccaggcacctgcttgttcacagtgagtctatatgcttcctccggcattatatttagaagctgaaggagagagacatctttaattaccatsttctaatttccaagaggagagaactaaggtccattagtccattagatcattagcaacgtttccctggccatgtttgtgttgctcttataaccagatcagtccccatggctgccaagtccttgccatcccttcactgccacttccatggttacttgccagatgagactgactttacttcacacctggatgattgcatttgcttccaagctcatgctcatcttgttgttttaagtcaatcctgtgatccaattcagtaagttcttatgggttgaatagatgttgtaggcaaggctgtggtttaggttctgtatcagtgactggtcaagattcctcaaggagcttttccaaatgtggtgcaattttacatacctaatctcagcagaacctttctactgaattgtggaaaaaaattctggtttttactatggttacatgagaatatgtctaaaacgaatgtaaagctattaagtgtatattgagtctattatatactagcatgatgctgggagccagaatatcccaaaaatagaggtttaaaacataagctctgctctgaacaagtgtacattctcattgtggataaaatatactcataaatgtgcaaggaaggatatatccaaatactcaaatgagcaacatgaacaaaagggcagaaaatcaatggagagaaaactagttaagagattaaagatgaagtaaagcttgagatgaactattaaggttaaatatgaattgtgaggagagaaaagatcattccagagaataatattgggaataaacattgcaatatatatggaagaaaaatttctacttatttgaatttgcctgtaaaactatgcttatctttgctcattttgcatttccctgtcaattttgatagccttttcttttctgaaatgacacgaaaacagttttaattcactcagttccattaaccttgagttggtaatatcaaattggtattattgtatagagatatatgtcatatattattttaaagtattttccacatattttttcatgtattgtttataaaaacaatttaaaagactatactgaaaagtcctaatattcttttttttttaaactcacaaaacccgaaaatttttgctatcatttacctactgttttagcaagatcttattactggttgagcatctgaaatagaaaatctggaatctaaaacacttctggtcccaagcatttcagataagggatactcaacctgtagaagtatttgtggttattccccacatctgagctttacttatagtgagtgaagattttaagtggaagtcactatcacaagttttggaataatcagctagttttaaactaatacagatataacacgatatacaaattaaacttaatttttataagccagctgcggtggctcacacttgtaatcccagtactttgggatcctcccaaggtaggaggattgcttgaagccaggakttcaaggccagcctggtaacatagttgtcaccctgtgattgcctggggccagcattgcagatggtaaagaatttaccaagacaatcgtaggtaaagaaaggcagatttattagagaatgagcaaagatatgttggaagggtgtgacaggcagcacagcagagaaggggatgtctgcaaagaggcaggggctggagggatgttttatagggtcatgctggagggggctatgtgcagaatgaggtcatgctgctggggctacctgtgaagtgagaggtagttgtgccagcgggttgtttgtgataagttgtctctcagagcaattgttctcccccacctggaacccctacctcatttttgcttacttacattatcaggactccacaatagtgagacccatctctacaaaaaattttaaaacaaattggctgatcttggtggtccatgcctgtagtcccagcttctcaggaggctgaggcacgaggatctcttgaggccaggaactggaggctgtagtgggctatgattgcatcactgccctccaccctgggtgatagagcaagactttgtctcaaaawaaaaaaaagtgtgtaattatgtcttattcactaaatagtgcatgatcttatgtgcatgagaaactcatagtttctagaacctgttttctggttctcagacttttctgacaatggcctttaaagcctgctgaattttaaaaggtgaaaggaacttttcttcaaaggggaatctaaatctttggttaaggagttttaagtagttttgctcattaacatggagtgcttctatatactgtttcacttaaatttagttctttaaatgaaataaaacttgtatatactgagtaaaatagcagatatcttatctctcggttgcttgtgggaaaaatcattccaaagggatgtatgaaaggctccttgtttgttctgattaaatgatatggagcaaatctgcgatctcttttgacattgaacatgttccataattaaaagcaatgtaagctagactgacattgtaaatattgtttttaagatttaaaaattgaagtttcacattttttagttctcatatatgcatttgagtttctaggtggatgtcttaggctaaagtaaataaagtcaactttgttaagctacttgtgactgcagctgccaaatgcccccattatgagaaaaaaaatactgtggttattttacaggaaatactgtacaggactgtggtctgtgcaaaggaagtgcccacacagaaactaaaatactgttagtacttaatggtgtactttatgcttgaagtaaaaatgagttggtataaataaactttaatctcctaggttttatgttcagaattaattctaatacactttaatgtagagcatggtaatgactttgtatttttacatggcttgctgacagaatgcagctaggagaggagcccacataaaagctatataaatcaggggaacagatggttgagggacaattgtttgactttaacaatatcatacagtgagtcaacccagatttaaaatacaatartgctgtagtaagcagcactatcatcccctttcatttgctctggagactagcagtagatttgtaattgtcctattgtaattcttttcacaaatcatttagtttattttactaacatctctctgtgtaattggctcatcatggcaaatggaccaatttacatggctggaaaggaaagcagagtgtgcatgctgctttccagcatccgtaatttgttatgtgagaagcttcttgttagaattcttgacatttactcacctgcataaaatagggctgaaaggggctttgcaaatgatgtagttcagacttctcattttgcaggtgttatcacagaggtaagttgatgttttcaagattgatcatttgtagacaggataatggcctccctaagatgtccatatcttaaccttgaaactgatgaatatgttaccttacatggcaaaaaggactttgcagatgtgataaagacaaggaccttgagatgagtagattatcttggattatctgggtgggcccaatgtaatcatatgggtcctgaaaagcagagaaccttttccaactggcttggagagagatgctccactgcaggctttgaagatggaggaagagggctatgtgtccataatatctggattgtgggcagtctctggaaggtggaacaggcatagaaaagaattatccgatagaatctccagaaagggatactaccctgccaaccccgtgatttttgtaagtcaaaaattcaacatgcgtctcactggcttaagtgagatgcatgttgattttctgacttacagaaatataagataataagagttgatttaggccatacatttgtggtaatttgttacagcagtatagaaaactaatatactcactatgttagaggataagccaggcctagacctcaggccttctgccttacagcctaggtcttttttcaggtggtaagtgccctttatatcactgaatcttgtacgcttgaaaggcagaaacaacttgactcttcttcctcgatatttaacgcaagaacaggtaaagagagccacccagagagagctttttaactgatgtctgagcaccagatgttccagagaggagctaaatgccagaatgaatctcgctgtgtactatttagcccttcaaattcactcaccaaaactgtcttgattcaggagtatccagaatgctgcccagaatgcttagcaattttgtgactgcatgtcttggggtgtgttgagtctggtcttgactcccatgtcccagatcatctgtgggtggatgtatagttgataggcccttccaagtaattctcaagcctctagttggtctagaataggaattgaccattaactagtatgaaataaattcaagatactaataaaatattttagctcccatttgaattttgattctgacttctcataaggtcctttattaaaaattttaatcactcacagaaataagactgtttcaaataaaatcaatggttaaaaaacctcaaattggataaaagcaaggacataattcctcagaaaacctaatccaggaacttcagatatgtttgatgtcatctgccaatgctatttgttggtaatagctttctggaacattattggaaaggattctgtggccaggtccttgatcgagttaaatgagttctttgatcatgtctgacttgggcagctggggcaatgctaatctacttcctagagttttctctccttgtatcaatcaattgttaatcactgtttcttgggtgtgatatttcagccagttataaatccatctaaatgaactatatcccactcacatttcttcataggatctaggtgggagagatacaccctgatgagtgtgatgagagtttgaaaatgtgaagtacaaggaacagtgacctcatttgtaagttgttctttaaactcacacctggagaataaggaaggaagagggatttgagagaagggaagaactaagtgtcaaatagtgctgtcctttccattccttaatagtagtaagtagttctttcatgttacctctgtctggcttagtcacagaaaattttatttagctcagaggacccttgactgaatgtcgtcataggtagttcagggtagaaaacaggtagataaaactaaaaatacatgcatattaaaattttgtggagaagacaaaaaatacatgaaagaaagtatgagaaactattacagcatactaacttttaggtcattcatatttttttactaaatatttttataagatttatacagcaaatggtagatactattaaaatattatctttttaatataaaaaactgaaacaagtgataatatttagtgcttagatattaagctgtttatctgctttaaaaaatatagactcgggctgacattacaccctttattttccgtttgtttctttctttacattaatactggtttcagattctataagcaaaatcaatttgattactgcagacaggagttcgaagacttcaccttcgtagcctctgtaacagggccttttgtgagagcactttggctgtaatgatcagttgacctgtctgttgagtatcatgaagcttaagtgcctggaatagcccttgactttcgctaacattggaagttcatcagtttgccaactgtctgccagtgaactgcagtacactagagcagtaatgaaagtatgacctcataccttttgtggcaattttcattttttccaaaaacgacacttactttattgcattgagctctactgtgaactataatgcaggagggctcatattcttattatcgctgtttacaaatataaagctcaacttggaagggttgatgactccctaaggctagtaagcaatgaggtaaagagaaacaaatattcaaccttagaaatgtgagttataacttacagttaaataagaattttcaatcttacaggtttcaaatctgcatagcaagtagcgtaatggagcaaatgattcttttcctccagcttgcctattataacctaatcgtgtagatagggatttacaatatagtaaatgtgtagacaaatttacaacattgcaaggcagtatttggtaagtagtagaagttagtagatttagctccttaagttaaatctactaaccttaagacaataacaagataaacttgtacaagtggagaccttgttattgttgattccgcatttcattaagagtacatatgcctctctgtgcattctcatctattactgttgctgaaggggataaaggattataagaaatgattcctttcctccaggttgcctataacctaactgtatagatagggatttacaatatagtaaatgtgtagataaatttacaacattgtaaggcagtatttggtaagtgtcttgacagtgtcagacataataacctgatttgtccagataaatccaaaagtgagggtcagctttggcctgaataagcaggaagaaattcaagtaggaagtgacttttaagctgagctttgaaaggtgacagatttggataggcagatattttgtgagaggctattttattttgmtggaaagcagaggattttatttgggcagaggcattggggtaggaaaggtcaaagcatttgcaggtaggggagtagaccagtttgacagaatatttatgtaggagagtggttataatcattacttcatatgggaatgagaaagtagtagatttttctctatcatgagcctgcctacatttccttcctcttaaatttgttaaggaggaataggcttaggcagtttttttttttcccgcgagggtactatctttgacattaatccaaatatttggtaaagggtaatcatatagattctcatttttgtttttatcttttttctctttgtttctgcattccatgattttattaaacaaattaaaacctgtagaaaaggtacaagcatatgcaataaagacccataagtgtgatgatacttgctacacagtcattttagaccaacctatctgtatgtggcagcccctgtttgcatataatctagatcaagggtcagcagacattctctgtaaaagataagaaaggaactattttaggcttgttcggccatatagtatctgctgcagctactcacatttattattgtggtagaaaggcagccatagacagcacataagtgagtgagcatggctttgttccaataaaactttatttacaaaatgttaagacagacttggaccacctgtggtagtttactgacttttagtttagagacatatgggatcacctcatttcgaataatgggaccctagatttcttaccttcttcagcatctgtgggttcttttactcttaaaatagtgttcctgttcttctatttcttttggttaatattgctttttatatttttatattatttmtawttcttaataagatystgcatggggcctagtaaatcattgtgactaaccacttagttattamtagtgattataaggaatacattatatatgtttatagttgagccatactaccttttacaattaatatattgaaatattttaastgaatttaacattcagttaaatgttttatttaactgaaaatgctgcatacataaaatgtcctcttgctggaagtacagatatagatagtgtatatgttccagtatttttaattaaggaacacctgtaggttgttttatttgtttggggttctgcttacttcctcagaaggctggccgtatttatctgtggatccttttcagtactgagcagaataccttgtacattggttctgaaaatgtacatgtcattatccatttgaacctccgtatggggccatcctcatcaatatacacatgtgttaatagtttscttcactgtaaaacaaacaaacaaacaaagaagttccttgcttccatattcccccgttagttatcaccttattctcatttccctttctcagaaaaatttcttgaaatagcgacgctatgtgcatcttcactttatcccatctcttttgtttttcagtctattccaatctggcatttgttcccatcaccacattacaattacttttatcaacatcactcatgaaatttatattctgtwtactgggacacttctctaccctcatcttaatcagctgtttgccagttttctactcagttcacgtctccctgcttcttgaaaccttcttcctctgctgctttgcaatgacactggttgagtctgtttggactgccgtaacaaaataccacagttagagtgacttaaacaacaagaatttattttctcacagctctggaggctagaagtccatgatcaaggtgtttgcaaattggtttcttggagagctgtcttcctggcttgcagatagccacctcctcactatgtcttctcatgacctttcctcaatggatgggcattaacagggagcaagcaagctctctggcttctcttcttataaggacactaatcctgtcagatcagggcctcacccttatgacctcatttaaccttcattactttcttagaaagcccatctccaaatacaatggtactggggtttagggcttcaacataggagttttgtggagatacaaacatttggtccattaacagacagtctcgtgactttcctaccacctcactggccattcttctgtctctttgctcagcttttcttccactgcttgatctctaaaatttggagttccacaggctctattctaatctttattatttttttttaatgctacccagcccacgtggggagtctcagccattcccattgcttcacttatcatttctctacaggttctcccagattttaatctgcacagtaggtctcttccctragtttcagactcacagtcaatgcacatctcatctgaactcaaatttagtaagtctaaaatggaacacttaatttcaaaattcatatatgtgcttcttccccatccttcattttagaaaatggaagaatcattatctgcagtttctaaaatcataaacctggacactattcttgattccctcatgtctgtcatcactgttgtaagcaagtttttctgattctgtcttcaagagtcatcttgaatttttccatcttcctccttctcctttggactttgaagcgctttctcatcgattggatagtgggtaaaatattacttttcttgtctcttcagcctaagtagcaactctgaatatccattcccacagtcttccctattatatcaacttgttttattgtcttcctagtattctctcatccaaaattttatggcctgtttatttgcttacttgtcttttgtctcttcctttgagaatgtaatattaacagaacaaggaagggtcttgttaacttcactcttcacatgtccatattacctagaaaagtgcctggtatgtagtaggtgttcaagacataattattatagaaggaatgaamctcttttgctactattttagttcatgccaacatcatcttttgcctggactattacagtaaccaagtacccccattttttcgaagagatcatttaattatttttttattatttatttatttatttatttatttattttttttgagatggagtctcgctgtctcccaggctggagtgcagtggcacgatctcggcttactgcaagctctacctcccaggttcatgccattctcctgcctcagcctcccaagtagctgggactacaggcacccgccaccttgcccggctgttttttttgtatttttaatagagacgggatttcaccatgttagccaggatggtctcgatctcctgacctcgtgatccgcctgccttggcctcccaaagtgctgagattacaggcatgagccaccgcgcccagcccatttaattatttttttttcccctcttttttctcattcctccagttccttacttcccacttatccctttggaaatgcaaatataaccctttgccttcccttcaccatacattccctacagggcaagttcttctaaccatgggctccaagattgatctctcttccagagttaacaatttacaaaccaaagcatgcccactgtggaactctcacccaccaggagttttgcctcaagagataacagtcaaaaagtatgcctgctgctctctcccacctggtgagtttttgccctagtcctgcccacaaaggcaccagcagtcaccagctcaaccagtcagtagataaggcactgaagctggcataaggaccccaatccccggcttcctcccctgcatgcaatttctctttaaaagtgcccactttctgctccaaaagcaaagcagtacacttaaaggcaggccacctgtacttcttcccctaagatagctttggaataaatcactttctttatacgagaccttgctcttgttaattggactctgcaagcggagagtgaggaaacctgcatttcggttacattactaactaatcaggtctccctttcctgctcttgccttcctgcaatctatttccatagagcagccaaagtatcctctaacagttcatctcacactgtgcactccccagctggaagcttgtctttggcttttccatgcatgtcctggcccctccaacctcctctgtcttccattttactgtggacgtgtcagctgtctaccagctcctagaacacgccacacactttctcccacctctgagtcatttactttgctggtgctcttcctggattgttcacgatcttcacatgactggccccttctctttgaaggttttatgtcacagtgtaaatgacacgtttttagagaggcttcttctatctgagttgggttttccctccttcattggcccagcaccaagaagaatttcttcacagaactattgtctataattgttttatatctttgtttactgtctttcccatttttggcttcatgaggaaggacattcttactcttttttgtattttaatgtctatcatagttctgaacaatcaacacttatttgccaaatcagtgaatacacatgctataacatttatgtttttccttaggtgtctgaaaatagtttgtcttcaggattttgtcttctaaggatatgataacaacaatgattatttaagaaacttgaataacaagattagtaatgtttctataatatcttcttctatagtaaatctaaagtgaggagcttgcttttttatattgtatttttccagagacagcttcatgagtcagaggtacctctcaatatatgactcacataagacagtggatttatactgtcagctgcctttttataccttcagtcatctaggtcattaggcagtttgcattcttttctcttggttatataggtattaaagaaacttgccccttattatacattaaaaaagtggtaagctcctattttttcttctaagtatatggattggaaagacttttaaaaatgggtgatcagagaaatgaaggtcagttttttcctaatttttaatttttatgagtacatagttggtacatatgtttatggggtacatgagatattttgatacagacctataaggcttaataattacatcagggtaaatggggcatctgtcgactcaaatatttatcatttctttgtgttataaatattccaattatacttttagttattttttaaatgtacgatgaatttttagtaactgtaatcactctgttgtgttatcaaatactagatcttattcattctatctaactctatttttgtaactattatccatccctacaccctacccccccactccccttcctagcctcagtaaccattcttctactctccatctccatgagttaaatagttttaatttttagctcccacagatgagtgagaacatgtgaagtttgtctttctgtgcctggctcatttcacttagcataatgtcctccagttctatccatgttgctgcaaatgacaggaattcatcatttttttatggacgaatagtactctattgtgtatatgtagcacatttttctttattcattcatctgctgatggacatttaggttgcttccaaatcatagatactgtgaacagtactgtgataaacaggggagtgcagatatctctttgatatactgatttcctttctttggggtatatacctagcagtgggattgctggatcatatggtagttatatttttagttttttgaggaatcctcttactattctccatattggctatactaatttacattcccaccaacagtgtatgagggttcacttttctccatatcctcgtcagcatttgttactgcctgtctttggataaaagccattttaacggggtagagatgatatttcactgtagttttgatttttatttctctaatgatcagtgatgttgagcagaggtaagttatttttgtatggcaaccccagacttcagaaaagaaaaaagcagttgttatttataacaactgttatcatagattttaatcccacaatcatcatacttccttgatgataaaacagtttgaaggaagagtatttggcggtgtatatatttttaaaggcattatgaaatcctacataaattcccccaatcgaatttttccatttaaaggtttaaaaagtgatatattttcacttttttgaaaaagtgcaatttgaggcattcctgttctcatcaccaagatttaagagatattaacactttktcatatttgtgtcatatcatttttgaatttttttttttttttgagayagagtcttgttatgttgtgcaggctggtcttgaactcctggcccaaggcaattctccyaccttcagcctcccaagtagctgggattatagcctcaagccactgtgcctgtctctaatatcattttctcttgtttttgaaataagaattaatatattacatatgtaactgaagctttcatttgttattatatgaggttttgacccatgattgtttcttctctccctccccagagctgaatatatatgtatttaatctgcatgatagcaagggaagaaagaatttctgtttctaagaggttgatattgatataattggaaggggaaaagatagaatgttgttaaagacaaaatacttggtttcctggaggcaatctattttgctgtttcatctggagccctgtatgaaaggttcagaaaagttcaaagcttatattttttttccaaacttgagttaaaaacagggatcactaatatttaagataacaaacaaaaaactctacaaattgatacttttttcttttcagcaattcttgtgtcgtaaaactgaattgaataaaactatatattttgactatgagaatcaagattctcaagaaagtcaggcaattgagtgaggcctataatgttatgtttttaaatttgctaaatgatggtagcatgtcgagaggggagggctggacctggtggggggactgaataaccagttatctagagacctggcatcatgagaatgttgtcagctttcatctacatgatattggtttatatttttactacttatgtatatagtcttaaacattatttataccatttgtgtgttttacattcatgtgttattatttacataaatgacaaaatccagcttgttttttaaaaaatgtttttgagagtaatctcttttggagatgaatccctgggggtatgtatacctttagtttattttaactgttctaaataataccatcatattatagtttgtttttctaatatgtgttcctccctcctttcccttcctttcccctcctttcctgtttcctttcccctccttccctcttttccggaatttgcgtctgtgtgattcctaggtaatcattactgaaagcatgatcagcattttatggtttaaaaaaaaaaaactgyackgggtgcatttccactaaacgtatagagaatatatctgagggaacacagtagagctccatgtggatactgattgattagtattgggcccgtggagactgctagattaaacaggaggcagatagtctttcctctgggagtcttgcctctgggtgtgtccatcatctgctgaattagcactgcattcagatcagctctaggggaaggttgcttctatcacatggtgcagatgaacctgccctgctctcctcactctggaaacttggctgaggtgggaatctgatcagagcagttggcccagttaggagtccccatgtgccatttaatgacaagtgtgctccctggtgtttgttccgaattaatttcctctgtgtgaatggtgtctacagcttgtggaggtggcctttggggaattagtctcctaagtctctggttgccagatgaaattgtgaagttgagtccagagagcaaactcagagcagtaaattgcatttttttccgctctgaaaaccacttgtctactatgagtttcttgccttttttttctcttctgtcttgagtttttggccttggcacaactataggtttatgctagctctgactgatgtggtcctgtctggttgtcagcatcctctcatgctctgccagccacatgggaagggctctcctccttgcctcctcacccccctgcctatggatccctcttctcttgcagtctgggccattgctgggcatcacttaacttgtttkgtttccctgattccctttgtctcccttccatttgagtaatttcaaagcttagctctgattctgcctctcctctgctcctcatgagcttttgatggcttttcatgctacagagaaaatggctcattctccttaacatagcctggaagattttttataatctgactctaaccagcttgtccagtttcatgtcttatcttttccaacactcagccttgctgtggttgatgattccctgttacccagacctgctgtgcacatctcatgcatctagttttgcctctacctgtacacccaatgcccttctctgataatggaaatcctcctctctctctgcaagcccagcatgcatgttcccttctctgcgaggttccccagtaccatctttaggagttaaccaccagcccagttgtgttcctttagatctttagaattttttgtctgcctactatcataatgcgtcagatatgtgtctttccccagtaagtagtgaactccttcagagcaagagccatgaatatgtccttggaaagataccttagcacctctagagtctcttgcatcttttaggattgaatagctgttattggaggaacactgttgtgggtgcttggtgtgagggtgtgtggtatactgaactggagtccagagacccaggctaaagccaagactctggccgtgttcaatgatgcttttgcctaccaatgatcagtaaaggcttattaatatatraaatgatgaaatggtgttctgtgtgatttggggaccatccctgaacctctctgtgttttagttagctcatttggaaaataagagggtttgaataaacattattatagatttcttttagctctaaaaggttcatatattccttcttttgtgtacattttatattttccaaattatctacaacgagaatttattactttaaaaatttgagctgtcaggttaaagttcttataactcctagcaaaaataaatgagtcaagagacaagcattaagcctaaataccaatgaacccctataggcaggcctatttagcattggagtgaaatatattagtgactgattttacagtgctgggagttttgcagaatcaaggtcagaaatgagattgtgtaagccaggactgctcaagactgtataagactgcatgtggccagtattaatcaattaagaaatcaatagtgatttaattgatcaccactatatgcttggcactagatgagagctttttcattatctatctcatttaatcttaaaaatcactttgtggaattggcatggttattttatcactttatatgagaaaataggctcagagaagtgaagtaacttgtccaaagtcatccaagtactcaattttcaagtcattattcaagtatagattcatcaacttttaaagctcatgatcttttgttwatacatcacattgcctttctgttaggccagaggtcctcaacccctgggccacagacaagtaccaggtccatggcctgttaggaaccaggccacacagcaggaggtgaggggtggatgagcgagcattactgcctgagctctgccccctctcagatcagtggcagcactggattcccatagaagtgcaaagtgtattgccaactgcgcatacaagggatgtaggttgtgtactccttacgagaacctaatgcctgatgatctgacgtagaacagtttcatcctgaaaccatccccccatgccccctccacaccccgccacgggtctggaaaacttgtcttccacaaaactggtccctggtaccaaaaaggttggagactgttgtgttaggcaaaaaaatttgtgcatatatgtggctaaagaagataatgggagttgggagatattgctactaggtacctcatattttaaacaaatagtgccgtaattattgatagtgcttgaatttcattccaaatatcctatcttctttaaagaagcagtttactactgttttataagccattctcattagcatctctatcaataaggattcttatttgtaagccacagaaacagacactggatgatttaaattggaaaggaataatttagagcatattgagcaatttacagaatctctgcaagggccttagaaccaggcagcctggaacagtgcgtaaaatcacatcattgaatttggtgatgagagttggccaggggcactgtccgtgtcacttggcaattatcctgtacttcagcctccactctggaactctgatttagctgctgctgccagttgctgtgacaatgtgtctacatccctttcccctcactaactcccaagttagtctggggctggtatgcctgattgacagaaagcaggtcttgagtcaaggtcatagctacaatggaggctagaatgtaaatgtcggatatttttatttttagagtgggatgtgggattttcttcctaagagagacactattcatgcatgggaaggtgattcagatacacagcagccgaagtgaacgacagatactgcagcatctatgtatagattgtaattcatttcaataacatgagttttctcattttaaaaataagaaaactgatatggaattttccattcccttgggctaggaacttttgggggctctctcatacattttctggaatcaattgtcaccaagttctattgatgcttataaatcaggctcaggtataccacttcctctctattactgaagatataaacccaatttgagttttcaagatgttgaaattggagtttctcaataatctctctttccttgttctctctgaatttcttctcttggatctgtcctgcaaattrctgctagaatattcttccataagcactgttttcatcatacctctgcattgctcaaaattattatggtttaggggaaatactgtaggccactaatcttgcaaaaattttatggctaagacatcagaagcacaggcaacaaatcaaaactagaaaaatgggattatattcaacctaaaagcttccaaacagcaaagaaaacaaagtgaagagacagcttgttgaatgggagaaaatatttgcaaaatatatattcattctacaagggactaatatccagaatatactgggaactcaacagtaagtaatctcattaaaaagtatgtaaaaacatgaataaacatttctcaaaggaagacacaaatggccaacaggaacatgaaaaaatactcaacatcactaatcatcgggaaatgcaaatcaaaaccacaatgatacatcatctaatcccatttagagtggctattactaaaaagacaaaaactaatgggtgctggcgagaatgtggagaacaggaactcttatacactgttggtggtaatgtaaattagtatagccattatggagaacagtatgaagatttccccaaaaatagaactatygtgtgatccagcagttttcgctactgactgggtatttattcaaaggaaagaaaaaaagtatatcaaaggaatacctgcacccccatgtgtattgcagcactattcacaattgccaagatatggaatcaacctaaatgtttacctgtcaacagataaatgggtaaagaaaacatggtgtgtatacacacacacacacacacacacacacacacacacacacacacacacactggagtactatttagccatacaaaagaataaaatcctgtcatttacaacaacatggttggttctggagatcattatgttaagtgcaataactcaggcacagaaagacaaatatcacatgttctccctattatgtgggaaccaaaaagttgatctaatggaggtagagggtagaatgatagttaccagatgctggaaatggtgtatagggggtgggggttgaagagaggttggttaatgggcacaagcatacagttagatagaaggagtaagttctaatgttcaatagcaaagtagartgagtatagttaataatgcattacatttttcaaaatagctagaagagaggacttgaaatgttccaacacatagaaattataaatgtttgaggtggtggttattataaataccatggtttgatcattatccattctatggtggtaacaaaatatcacatacataaaaatgtaaaaatactatgtatcaataaaacatttaaaaattattatggttaaccatagcaattggtttattcaggaattagtgacctataataactaatatgccagtatgccaatttggatccctttgttgctaagaggcaatatggaggagtaagtttgctttgctcatgctgtctcctgtctagaaggccatctctgttctttcagatatccaaattctaccttttcttgagtgtagcttgtctctccttttccatgaagtccccatgcctttccagacttacttactgatttttctatttgatacttaattatttgtaatatgcatttcatagcttattatttagtgrcattttctaattttatcaagagtttttttttttttttgagacggagtctggctctgtcgcttaggctagagtgcacgcaatctcggctcactgccagctctgcctcctgggttcatgccattctcctgcctcagcctcccaagtagctgggactacaggtgcgtgccaccacacctggctaattttttgtatttttagtagagatggggtttcaccatgctagccagggtgatctcaatctcctgatctcgtgatccgcctgccttggcctcccaaagtgctgggattacaggcgtgagccaccgtgcccggccttatcaagagtttttaattcctgtattcttatatctcttcctgcttcaacccccatgccaaatccttaagggaaaaaaacatgacatagacttatttttatcctattcctagtgcttgacccctaataggttcttggttgatgattaactgaatgggaaataaaccttggatgtagatttctagtaggtgttatattttgcaaygtgatttaacagttctagaccaattgttacttgggcttctgagcactatacattattcaccatacggaattgaatgccattgagtacattaaaratagtcctgtatatatgacttgaaccacagctgtttccatctagtattgagtaggtgcatagttaacctccactattcctattctttggaaatcagcttaaaaaatgataataaataaaactgcagttatcagagttttttaggtaatgaaaacgggcacacgtgtgacacaaataggagttagcaggatactcttcstaatatttttttccttgtgtctattatasgattttccattatatatttctgtggcatctctccatcaggattctcattgtgcatgaatctatctatgcacaagagtgtcaactctgccagcagtatctgacagcattgtaatttaatgtattcagctgctgtgttaagtttcaggaagtttcctgtaagccaaaacttgtaaagctttgtctccctttaaacttttgttaatgatattatttaaacatttcttttttaagcctaaattttctaagaaartgtgatttgtttacttcagtgcttgctgttatagaggctgtcattttttcccaaactagactttattgtgaggtgtggcatgcttaatttgtccacttgtagaaaatgatgtgagcgtatggctgcctgttgcaacttgaaaaaccttaaaaccaaaatctcaggccatattatttaatctgtcaattttccttgttacatagaaattcctactagaagtccaaagatagttttcggaggagccctgagttgcaggatgtttatcacctcttagtgttcacctttgatttgttctttttcttcttgctttgcagttgtttgatttgtaagaattatttagatattaaaagcatgaactgtttttaatatgtttacttttgtttattatggtgctatataatagttctgcttttttatgaattccagttatcgaagtggtctattgtgttttcttcccatattttaaatcttataacttttgaaaaatttttaataacctagaattgttctggtgtaaggtaaggaaataattrattttaaaaatgtgataatttcagccagttttggtaagcattactcccagttctcttattttgtattaatgcctagccagatttttccctcatttgcttttctatgtgaggcttttccagagcgtcatcctattttaaaataaaatgtcagcctgcttctttcactttgcagattgccagtcatgcccagtatcttaccctgtgcagatctggtggtcaagctcattcttcctttccccaggtcatctgtgagtgtaaagcatcggagtcctgtaggcatcacttgaggtgatcctctctaaaagatacctgttcaacttctaaccagcttcagaatgataagacttttttttctgagtgtggaaagtgattaaaaaccaacaaaacctgtcaatgttatttctttcatcttctctgtgccttctgtgtctgttttagaaggaaattagactgtctgttaattcagagcaccttcatgagtagagaaaggacttctgaaagttgaactatccacatgtccccaaaatgtaaagaccgttttgagagtatcttctagtctgttatttttgtttcttaccactttttgacctttaatgttttcctttttcttttaattttcttccattgtcttggtggttctctatgctgcctttgccttattttccatcttcctttccttacaactggtcctgtcgcgtattgtttctgtttttcacccatttttctgctgtcttcttactgttcattgtgggatgatctcaggatatcctggatgaatggaaaaagtgtgtttggagccttgctgtaacatgattacctattgggtgattatgcttgtatagaaaaataggattgttcagctcaaacactgagggaaaaactatctcctagatttccttactgaaaaatcccaaatcataagagacagattttagtcttgtcatcagaacataatgactaagggaaaattcagatgggactgtgatgttttataaatttttgtgaaatagtaaaacttccatgtctcatagcaattttaaaaattatcataatttctttagttatagatataaatagagtatgtggaattgaaagtatgactggaaagggacttgctcagttccctgggcaagaacttcactttcttctggttccaagaagaaaacatacaactcctgtcactcctttctgtgtatgtctcttctgtcctcattgccttgtggtcttctgtggctctgaatgtgtagaaaatgctgatggagagatgtgaactctcccataagagcagtaatgcctgagtgacaccccacctctgtagtgaatcttcccagcccccaaaggcaaggttgaaaatcctggtctaggctgctgctgttcgagtccaagtatctctaggatttacccaatcagtkgcaatttatcagcagaattctaatcagtcttttcttttgttgaaaattgtttgttaaaaaaggaagaaattatttcaaaatatatggtctttataaacacataaacttctagaaacatttataactgaaaatgtgttgtttttacaaygtatcattttctagtagcagtaagttatgctgtagctcaactattcttaaaaccttcctggcaacgtttctctaggaaattgagatccttaaaatttttagttctctttgctataatgtacaaaaagaaaaagttgttttgtaaattctgtcattctcagtgtcataatgtttggattatttgagaaagaactacagtatgagtgaaaatttggtattctaaggtatagaataaaatgggatttgcctacaaaaatgcattgtaatttgcacagtgtagtgcctttgcatagtgattttatgctattgttttggaatgttgtttgaatatcttctttcatcttycagtgcattttgaatatattttctggtcctttcccttaatgtataagttcattggtttacaaattttagttttctcaaaaatatttatgacagggttttgcacattataaacgctcataaaatatttgcaatttgacttggctataagttagagctatattaaggatttccagaatccagatgatgcctgtgccatgctgactgtactatccaaggacaaagaaatgggtgctgatacagtaatgctcttttctttctggaaatgtgatcttccttgttgaacrtgttaaatattttattcattctgtgttcttcttttcattgggagttagtgttgatttctcagactcttaggttgtrtctaattatagtgctgattccacctcaaaatattgctgaactgacagtgrtcaaaggaaaccaaaaaagtagtccaaagaaagaaatgatgaggctttgcttatttttcagttgccaagaataacataaaaatctctttaggtgggagaaaatcacaagagcatctcacaatacttcttaaggagcagacgcatgatctgataatataataatacccttccttttgggcaggttgcgctcagccttgtgaatagtttagaatagcttatttctagggaagttataaaaaatgccttcatcgattggcattatttatcaggaacttcaaaaatgttcttactctttggtccagaaaattattcacttctaggaatttattatcaggaataattaggcatatggataaatattttgatacagcagtattattttcattgattgtaattgttaacagttggaaaaaaacttcatttgttcaataacagggtattgactaaatgcattgtagcctcttatactatggaatattgtggagctagaaaatcatcttatgtggcaaaaaatagagtatatactctgaatcattggggcaacacttcagattatagaagatttagtgtcttgtcttacattttagtgttttggaattgaaggtgacttgtgagggcagctgatcattgatgggtatttgaatcatgaattgagatttagggtcaaaagtaaccttccaatttaattaaaataatagatcatttgttagtttttatactataaaatttccttttttctagtagtcttgaaaaaatatrtaccaacagaaatattatgttgtaagaaaatgatgtttggagtttgaaaagcaatttgaaaaagggtgtgactcttttgagttttagtattctatgcacattcattacttttgccttatctttcctaatcacatttcattaaaagaactttcttcttaggcctgtcatgttcacttcattcatatttgtcatttctgtgttcaataatagcccatgttcatgagcagtttctaagcattagcatttcttagcccatatgtatcccgtrtttctactaaagatggaaatgttagtgttaaaaccttgagaaatatgtcagcaaagcttcccaggacattgtataaaatatctttgttttgagacttaattaaatatgtatgtagaaagcatcgtttctatgcaagaatttggattccaaaatcaatcatcattggtcaggtttatgaaaatagccgcaattattatgttttgcctgataatctgagcattttatttctgtaaattgttaaatctcaatacttgctacttatttgtaaatgtacaagtttctttagagaaacagtaccatttgatcagtttctgttcctgctggtcctggacttgtacactgaaacatattgctgccttcactgcaaaataggaaaaaagatctaacaagcatgttatattgcttttaaagtaacatgccataagttacattgaatttcaaggtaaagttaaaaggtcaaagatgtatatggattgctagcatcttttyggtctcagatgtttgcaaagctgagtcagacttaggaggtaggagtgtgtatgaagcagagtggggctgggctatgtgctggttataaactgtgaaactctaggggtatgctgcacagggatttgctatgtgcacattgcacaaggccaagtgcagtggccctggagcactacgaccctgctcttgtttctggcttgttccccttgagtagcaagtgtgttatgtggaatcaaatcagtgctgctaatcaaatcttttaagagtatctctaaaagtcctgtttccaatataagagcaaaggataaatcagattcttttaatgtggggagtaataacattttctactatataaggggagaagcagcagagttgggttctaaatactgagcctaactgcaaagaaaagaaagttgctgtggcttccagctctactctttcaaatatctattttaaatgaaatatttgacaaaggaacacgaggaaagggttagaatttgcagtggaatgacctttcttagagaagtaccctgatttgaaatgatcattttgacacctagaaaccaagaatttctgtggctttaatgtacagtcgtccttctgtactgaactgtgggttttgcgttcttgggttcaaccaaccagagatggaaaacatgaggaaaaaagcatctgtactgaacacgtacatcctttttccttgtcattaatccataaacaattcagtataacaactatttacatagtatttacatttacattgtattaggtattataagggatctagagatgatttaaagtatatgggagtatgtgcttgcttatatacaaatattatgtcattttatatcagggacttgagaatctgtagattttgttatctgagggaggtactggaacaaatcctccatgcattctgaggaatgattgtagttcttttttttgggtgatgagcctagaaaataaaatgcactgtacattataacatttgtggttatgttaggtttggtctacaatgttggactgagcaacacctcatttgaagaaaactggtggttaggattgttcactgtgctttattatagaggatttacaataaaaatattggtattttcacagcaagaaaaattgtaccaaatattccaacgtatgttcttaccctcaagggttgaagatagtaaaagccattattggagacttaaatttcaaaatggtggcatagaagcaagctggcttcaayggcccccacagaaaaccaaaatcaaatgtacagcagcaagactaacaatatcccagaactcagtatgaggatgagtgagttcctggggccacagagaagtaaagacactccaagcagatggtagactataacttccatatctgtgatgccttttcccccagtcagcccagcagcaagcacatggaaaatgttccacaactcatggtttctaacactggaaaaagtgagattgaggtggacagccatcttccccattgtcttgtgttccctcacaggagacctgccctgcctaaacccataggaagcagcacaagggcctgaagggagaaatatccctgaggacaactggagacaaaaggcagaggcagggctaccatctgtagccctggaaactctgctttgtaacttggccaaaggagatgccaagtcagtggcttttcagtaccatgctataggtggtacattccrcagatatcctgggcacaaaccctgagccagcctccccacactgctagtatcccttttgagacctccctcatttgggactagtagcacactaattgtttgcttgagccaaggaaaacctgggtttaaggttccatctaatgctggaaaggaggccacaacctagcaaagaaaaaagaatgtaacaggtaaattacaaagaatctataagcaaacatacccaacaaaaaacaaaacaagccagacagagaagactggaataaagacacggagatgcatccacaagaaacaatagtaaacagggaaccatgacctccccaaatggacaaagaagggaaccagtgaccaaacctaatgaaacagcaatatgtgagctctctgaacaagaattcaaaatagcaattttaaggaaactcagtcatctccaagataacacagaaaagcaattcataaatttaccagagaaatttaacaaagagattgaaatgattttaaaagatcaaacaaatttggaactgagaaatacatttgctgagctgcaaaatttatcagagagagactcaacagcacaattgctcaggcagaggaaaggatcagtgagcttgaagatgggctatttgaaattacacagaggagaaaaaagaaagaatggaaaggaatgacaggtcacgtatgagatatagaatattagctcagaagatgaaatataagaattattggtgtttgagagggagttgaagaagagcgaggagtagaaagattattcaaagaaacagtagacaacttttcaaaacttgagaaagaggtaaatttaggcacagaaaggtcagagaaacagcaaacagattcaaccccaataaggctttaccaagaagcataataaactctcaaaggtcaaggacaaagaaaggattttaaaagcagaaagagaaaagaagcaaataacatataaaggaactccagttggtctggcaacagacttctcaacagaaaacatacattttcaaagtgctgccaggggaatmaaaaaaaaaacccaacccccaccccacccctgctgccatccaagagtattgtttcaacaacgctatccttcacatatgaaagagagataatctttgccagacagacaaaagtttagagaattcaccaccaccagacttgtcttacaagaaatgctaaagagagtttttcattctgaaagaaaagattaatgtgcaaaacaaacaaacaaaaaaaaccaaaaatatttgaaagtataaaacccactggtaaaactgaagttcggatacagccccagaatactttaatactgcaattatgatgtacaatacactcataactttagtatgaatcctaaagcacaaagtatcaaaaagaataatagctacagaaacctgttgagatagtcaatacaaaaatgtgtaaattgagaaaacaaaaatgtggagagaatggagttaaaataaagattaaagttctctcttgtttcttttttggggtgatctgtgataagttgtcatctctgtaaaatgacttgttatgtctacaagatttttttgtaagcctcatggtaacctacatgttaaaacctataatagatatgctaaaattagaaaaagcaatgaattaaaacatgttaccagaggaagtcacttaaccacaaaggaagacagtaaaaaaggaagaacggagttacaaagcaaccagaaaacaagcaacaaaatgacaccagtaagtccttacccatcagtaatagcactgagtataaacagatgcagttctccaattaaaagacataggctggatgaatacataaagaaacaagacctaactatatgcttcctagaagaaacccacctcacctatgaagacacatgtaggctgaaagtaatgggatagaaaaatatattctatgcaagtaaaaaccaaaaaatggggggaataattatacttagataaacagattattagtcaaagactttagactctgcctaatagagaaggtgactatattaataatataaggggtcaattcagcaggaaaatataacaattataaatatgcatccaacactaaagcacacaaaagcaacattagtaaatctgaagggagagatagattgcaataaagtaacagtcatggactttaacactccactctcaataatggattaatcatctagataaaaaaatcaacaaagaaacagcagagttaaactactacactagaccaaatagacctaaatgacttttacagaatgtgtcacccagctgttgtagaatacacattattttcattagcatatggaagttcatccaaaatgcaccgtatcttaggccaggaaacaagtctcagcaaatttaaaagagcaatatatcacatgtatttttttaccacaatgaaataaaactagaaatcaatcacaagaagaacctctctgaaatgagacaaacacatggaaattaaacaacatgctcctaaatgaccaaagggtcaatgaataaattaagaaagaaatttttaaarttcatgagacaaattaaagtggaaatatgacataccaaaatctgtgggatacagcaacagcagtactgagagggaagtttatagcagtaaatacctacatcaaaaaatataaagacttcaaatgaactaatgcacctcaaggarctagaaaagcaagaacaaactaaacccagccttaaaaatgaaaagttggttttctgaaaagataaacaatattgacaaacctttaaatagactaccaaaaaagagagraggcccaaatgaatacaatcagaaacaagaaaggcgacataacaactgagrccacagaaataaaaagaatcattagaaactattataagtataggccaacaaattgggaaaactagaagaaacagataaatgcctggacacatacaacctgacaagattaagccacgaagaaatagaaaacytcagcaaaccaataaggagcaacaagattgaagccgtaataaaaagtctctcattaaagaaaagcccaggacctgatggcttcactgctaaattctaccaaacatttaaagaactgataccaattcaactckaactcttcaaaaaaaaaaaaaactgaagaggaagaaatactttcaaacttattcyacaaagctaacatcaccctaataccaaaaccagacaagcacacaacagaaagtagactacaggccaatatcactgataaacacagatacaaaagtcctcaacacaatattagcaaactgaattcagcaacacattaaaaagaccattcactatgatcaagtgggatgcatcctaggatatgatagttcaacatatgcaaattaataaatgtaatgtatcctctttacctaaccaagaacaaaactataagatcttttcaatagatgctgaaaaaacgtttgataaaatttaacatcactttatgataaaaatcctcaacaaacgttaagaatagaaggaacataattccaaataataaaggccwtatatgacaaacccatagtcaatagcatattgaatggggaaaaattgaaggcctttttgctaagatctggaaaaagagatgcccatttttattcaacataatactggaagtcctggccagagcagtgaggtcagagaaagaaataaaggccatccatattggaaaggaagaagtcaaattatcgttatatgcagatgacatgaacatttatttagaaaaatctaaagagtccacaaaaaaaaccctgttagaacaaaaaaagaataagtaaagttgcagcatacaaaaccaacatgcaaaaatcagtaccatttatgtaagccaacagtgaacaatctgaaaaagaaatcaagaaagcaatctcatttgcaatagctacaaagaacataaaataactagaaattaatttaaagaagtggaagatctgtataatgtaaaccttaaaatgccgatgaagagatggcacatgtatacctatgtaacaaaactccatgttctgcacatgtaccccagaacttaaagtataataataaaaaaaagaaacacataaaaaaatgctgaygaaagaaattgaagaggcacataccaaaaaaaggaaagatattccatgctcatggattgaaagaattaatattgttctgttaaaagaaaaacttcaggtgaattaaatttaaatgagtttagttgagcaatgaacaattcatgaatctggcagcccccagaatcacagcagattcagagagactccaggggtgccttgtggtcagaacaaatttatagacaagagaagtaaagtgatatacagcaattggaagtgagatacagaacagctggattggttacaggttggtgtttgccttatttgaacacaatttgaacactcaatagtctatgagtggttgaagtgtggcctctgagattggccaacactcagctattgttacaggtgcatacttctaagttaggttttccatctcatctacctattaattcaggttgcagttcatccacaaggactcaaatatagaagtataaagtccttctcaggccatacttagtttgctttaacagttcaaatgacagtgctactcaaagcaatctatagattcaatgcagtccttatcaaaatatcagtgatattcttcacagaaatagaaaamtgttctaaattttatctggaaccccaaatgaccttgaatagctaaagcaatyctgagcaacaactacaaagctggaggcatcacagtatctgacttccaaatatactacaaaaatatagtaaccaaatcarcatggcatggaaacaaacatgtagaccaatggaacagaatagaccacccagatataagcctacacatttacagccaactcatgttagacataggctccaagaacatacagtgggcaaaaggtggtttctttaataagtagtactgggaaaactggataaccatatgtagaagaatgaaacgaaacccctatctctcatcatatacaaaaagcaaaatggattaaagacttaaatctaagacttgaaattgtgaaactactcgaagaaaacactggggaaatgctccagaacataagtctgggcaaatattttttgtgtaagatctcaaaagcacaggcagccaaagcaaagatagasaaataggattatataaagrcaaaatgtttctacacagcaaagataacaatcaacaaagtgaagagacaactcacagaatgagaaaaaatatttgcaaactatccatataacaagagattaacaaccagaatatataaggaactcaacaacaaaagaacaattactgatttaaaaaataggtaaatgggtactatgctcactacctgggtggtgggatcatttgttccccaaacctcagcatcatgcaatattcccatgtaacaaatctgcacatatacctcctgaatctaaaatatgagttgaaattacaaaaaataggtagaatatctgagtaaaaatttctcagaagacrtacagatggctaatatttataygaaaaaatgttcagcatcactaataatcacagaaaagcaaattaaaaccacaatgaaccatcatctcactccagttacaatggcttttataamaagggcagggaataatggatgctggtgaggatatggagaaaatggaaccctcatatactgttggtgggaatgtaaatggtaaaactaatatagaaaactgtttggagattcctcaaaaaattaaatattgaattattatataacctagcacttatattactgactatatatccaaaatagtggaaataaatatattgaagaggtatctatctgcactcccatgtttagtgtagcactattcacaaacaccaaaatatggaatcgacctaaatgccaacaatagatgaataggtaatgaaaatgtgatatatgtacacaatgsaatattattcaaccataaagaatgacatcctgtcatttgttgcaacatggatgggactggagatcattatgttaagtgaagtgagccaagcacagaaaatcaaatattacatgttctcactcatatgtgggagctgtaaaagtgagtcttatgaagacagagagagattggtggttatcagagtccaggaagggaaggagggagggagggatgaagagaagttggctaatggctacagatatacaatttgatagaaaaaataaatcttagcctgtgatagatcactaaagtgactgtagttarcatgactctatgtacatttcaagatggctggaagagaataatttgaacattcccagcataaagaaaagttaaatatttaagttgaggtatatgccaattgccctgatttgatatttacaaagtatatgaatgtatcaaattacagcatgtactctggaaatatgtacatctagtatacatcaataaaaatttttcaaggaaaaattattggtggaaagtaagttactatattaatttacatattattctatatttatgccagacaacaatcacccaccttcttttttgacttggttcatatttagttaagttaccattcttacaaatatggatatgaaaaaattaaattggggaacttcgtaagttatgtttttgttacttcagttttagatattttttctacgtgatagaacctggtgtcttttttttttttttgataggtgaacactaaaaacagaaaaggcaaataaagaaactgattttgaattaggaagcttcttacaattaattgagttttcagtatatgccaggggactacccaaggtacaaatatgaaatgaggtaactaaaaagtgaaatccacaatttacatagctaaatgaaaagtactctttcaaagttctataattatcataggaaacagtaaggttgtgattgctcaaagaatttttgggtctctcatttctatattaccactttttcctgataagctgtgctttcatcacttttaagttttggacttctgatagtattttgtttgaacaaaaggctggttccacagaggaataaagaaaaaaatttgaaaatcatttctgcttgttgtacaactctaaaagcawctttgcattaaaaaaatcttcttctgaataaaagtttatgtatacctatcagtaaaatttctaacagtatagaaatgttaaaaaatcaatagaaaagcgcratttcatagcagtttcacctcctagatagtcaccattgttgacagttcggtgcatgttcttctttkttttttttttttttttttttttgagagggagtcttgctatgttgcccaggctggagtgcagtggcgtgatctcggctcactgcaacctccgcctcctgggttcacgccattctcctgcctcagcctcctgagtagctgggactacaggtgcccaccaccacgcccggctaattttttgtatttttagtagagatgrggtttacactgtgttagccagaatggtctcgatctcctgacctcatgatccgcccacctcagcctcccaaagtgctaggattacaggcatgagccaccacgcctggcctcggtgcatgttcttcttgaacatcctgcttattggaggcacaaacagccacctgcctgggaattgggaaggggtgtgtgggagcaggrrccaccttgagcagtggtcaggtgtgagaacacccctcctatttttacacaggcatcgtcctttgtacagagtgggggaaggccaagagaccatcttgaacaatctagcttttggatgttgaaattagaataaatattcaaaaattcatgaattatgaattcagcctcgttagaattttcccttgttggtttgtgttcattccacaagactacatctgataaacctgtatgtattattagttactctttattttyttaaagtcaagatattatctagattaatatttaggggaaagcagaaggctaaaagtaaataaactttgaaactatggtcttgtgttaatctcttcatggcttatcgctctatgtcagtggttctcaaatatggtacctggaccagcagcatcaacagcttctgagaacttgctagaagtacaaattcttggtccctactgagttggaaaatcttgtggtggtgaagcccagcaatctattttaacaaatcctccaggtggtattggtgcaggataaggtttgaggacactgctctatataaaagccaaaggttaaaaataaaatcaacttggtatttctcctctctcattctccactaacttttaccccaacctaaaggtcatgatgttactgaggcataacatgatttttcttaagagctgagattttttacatctctgctgttagaatgccattctccaccattgtctacataacccattaataactattctttaaaattttattctagcataactcactggagaacctcccttgacccagaaatccagctggacttgactcttatgctttttggagccctatgaatacctgtttgtagttcttcaaatttgattgcagtgatttgtttacatgcctctctcttttccagggtattgataactccctaaggaaagggattacatctttcccttgccctttcatccctgacrcctagtagaatttatggcatatgcaratactcaataaatatttaagtgaaggatgaaatgaaaataaaatcataacttctccaagattaagaattactaagaggcaaactagtgttataagaaagctgaagtgacttgagtttgaattatactgactgtatgttagactgcttgggtaatttctctgacactatatagtttatatagctttttactatataaaattgacataattcctacctcacaggttcacgtagaattcctgacacacagttaacactgaaaaatggtagctgataatcaaataaaaaatagtaacttcttacatattgtagtaatttgaggactgctatcttattttgaagtcatatagttattataggagtattttcacttatttaaaaaaattattttactcattagaaccaaaacaaacttgattgaattaaactatttaatattttgaggagaaagtaacaaaatgattcagatatatggatggcaaacattttaatcagtatgcacttatgattttaaaaggtccttgtatggtaaatttgcatatatatatatatttttttttttttttacaaataacagcatgtctatttcttgaactccacttgtgagactaccacataacttattgactctgtcatgattcccaggaatttattttgtgagttaaaagaatttatacctgtgagcataataagtactcttacaaatatttgatccttatttaggccccaaacagattcatatatttttaaaggagccaggtgtcagaaaattgttgccatcatatattgagaaaatttaatatttatacattttagtaggaaaaaatatagtgcctgtccatcatattagggatggaatctataatctatcatcaacttctggaatatgaatatatatggacagtcaagtacattggccccagtatacatgtcttgttttttctaagagaactgatccctaaaaaaaggaaaaaataaccaatgagactggttcgctgtttgctcactgataggagttggaagccgggcagcttggttgggtagagttgaggttagagatccaaataacccatgccactcagtttagagatgagagcctggggcccagagaccatgtgacctggccactgtctcactgaaagtcagggctgcagcaaagattagaaactctgtgcagtctcatgctggttgcatggcattttgaggcagtcacattggcaaagcagctgtccaaggagtcactttgttatactgtttgatactagggactttttcatgtgacctgaaaaaaaaaaagattaagcttttctgttttactttgctgtaattcaagtaatcagtcaccccactcttgagcttttacccaatcttcttcaactctgagaattaggatttaatgggatgggcrttagcaatgaggtgagatcagtatgggaatcaggaattkgatgggggatatctttcggtccattactttctaataagctcagcacttttgacctggcctcatcagaatggttgttttgaaacaggaaagtcaaaatgtccctctggccaaatcaaaaggattcatatattctttatatagggctcttcacatcagctcacatttctgtttctaaactattaaagmyctaacgacttatgcaaaygtttataactggatataaatgtttgagtctgggctgcccctgtagggggttttccctcttgattcaggttgttatcaagtattctctgggggaaataaccttaaaagatcattcagattccaaaacatcttacatatgccatattttgacagggcattcattttttttcctggggggaggggagataggttaagagagaagataataaaaagaaaacagacaatagtaccaaaacagaaacattgtattacaattagatcacaaataccattgcacagaagccaatataaggtagatctaccctggttctttctgtccaaagaatttcattgtttgatagtcctgtaagagtttttatatagcaccgaggatatgttaaggttgccattgtggcaagggtttaaaggacatagtttactaagttatttagatgctagttatcttggtaacttcgtccatttaaaaatatttcttcattcaggatttctgttccattcctggagactggcaggaggaaaatcagcttggcagatgagaacaagcattgttgtctgccttcagagtggctggcaagagtatctcagaagcagtttctaaagaaggggatggtggcccccaaatacctctgatgaaagaatttgggacttcagtgccctcctctctttttgtcaagtaaactatatccattcttctaggtgcaatacttcatctgaggttaagctgaaatgaaataacaatgaaaaaccgtcagagaacawtgctgaatactcttcccaacctagtgcatcagtggcacaccccacactcactggggtcattttgcccattagggctgagctacttatctacatcctttgagaggattattttctctgtgccagttcttggtaaatactcagaccctaagggaaattcaaattatcctggattaaccacatacagtcagaggagctaatgactgaaaaatgctccttgttcgttgcaaaatacccaagacccagaaaaagaagtcttccagggctcctaaggtrgaaattccttttaggattttaaggccacaagtaacagagtcctaaagcagtagattttatcacagtttcaaaaaatagctatgtaattcaactacagttgctccttaagacagcaaagacttagaatgaaagagagaagggaatctcaaaatgaaattaatcaaaataaaagtcattcttaagctttcttcttaaatcaaaatcaagagaattttttaaagctgattaaatttaatgtatttaggtcaaaaggaaaaaatgtatcataatcagacatagtcctcagcaaaggctgaaaagggcaaaagcaagatgaagggaraaaatgatgaatcaagctaatttccataatcctgttttattagtactggcccatgggtggtacagcacacacmaaccacaaatagtgtcaaattcctcagtrgaaaccaggctactcctgggccagcccagatttgtggatcttgcctgataccagttcagggcagccaacttgatgtggcatgtcctactcacatggatctttgagattcttgacagttctgggtcagttttcaaccattgtcagccagagctatctttggtcccgtctggaacagaatgaaatttctaaataatgcccggatttaatcctccctgtgaagcgccttctgcgcagtaattaactagagtcagatcagattttctaaagtttgctcaagctagatctgcgtctctgggatttggcgtgtccagcagtacgcaagtcaagtggatccctgttttcataatgcttgtcctatctgcttcctttactatctcccagatttactccctaatcaattcagagcttaggctattgttaaaacaactttctcagtttaggcttctttctctgatatagctactagattagggttcttaacatactcctgtttgacagttcattctccagctaaaaatatctttattggcttatcataatataaataacaaaatctagaccccttagcctggtgtttaaaactgtctacctccaacctgcaacttcaactgtatctcatatccctcatcctgaatccaagctcctcacctccaagtgtttgcttgcattgtgtctgccactcagccgttcccttgttcagatgtagttactgagcatctgtgtgccatgtggtggtctaggtgctgcggatactgcagtgaataaggccgacacactccctcctctcatggaacctgtgctctcattctgggagacaatatataaataggtgatatttcaaatgtcagaaattaggacaagtataaaaaggtgacggaatagaatgcagacaccctttcaactctcatagccctacctggctctacaatttatgtagcgttcatgacaggctgttttggtttttgtggttttagttacacactctggggcagatcacccatgatgaaggtattgaccctactactcactgcctcagtgaccatgggcaagtttcttttctctttttcagtttagccgtctctaaaatgaggataatatcattattctgttcataaggttgtcttgagcattttatagtgtctgcagaatgctcagcacagattctggtatgtgtgtgtacatgtgtgcatgcatatgtataacatataatgacacttatttatcgtcatttttgtttgggtgaggtaaattttaaataatataaatatttatactgataaacagataacttttaaaccagaatatcattacagtcctgtaatgtcctgtatattattataatgtacgattgaattatacattactgtttccttacagtctacttaattgcaaaccagaaggagggtacaagctggtagcctctaggagcaaccatgcatttctgagtctggttgtgttaactgtttctttcgtattcaatttgatagtacaaaaatattttacatatacattaattatttctcctagctaaacactaagtccctaagtttcaagcgaatacaatgtggaaatagattagaattaactgagatcatggtaattttttgacattttattttacataaatttgtacccaaatgctacagrctcaacttactagtaaagttttcttaagtaattaacactattatgtaatgggccttcccactctagtaaacagtactagtggctttattacctgttgaaatttatatgcatagttgctggtagctgcagtagtatctgtttctggtgcacacctgtagtcccagctactgaggagcctgaggtgggaggatcacttgagcccgtgtgtttgaggctgcagtgtgccaccgatttgagctgtatttttaaaggaattattttaggctatgaatagacagcatctatatttccataatacttaatgtattttaacactgaaaagttttcttgtaataatacagttaaggtttctattttggcaaaatgtaagaaaaaaaatactcaacacttgctttagcagtgtgatggtgaagtgagtaacagatgagtttagatgctgtagttgttcacagggcctgagacccagcagagggttcagtggaacaatggggaatgttagctattgaagtacttacattccttggaattcaagatatccaaggattaatgagtgctataagtcaaattgtaattaaagattcaaatccaaaggtgctggcagcrttgcctgcttttagcagatctgaatattgaaagctgggttcaaatgtaggttgtcatttacctgccatcctcctagaagtcactttacttctctgacccttagaaggttctcatttcaaaatgaaaatacagaaatcatgggttttgtgagattatataatactaatcacttaacctagtgcctgatratcataagcactcaataattatttgctgagttaaagaatggaaaaaaacaagctgattctcttggacctcagggtttcaaaaagctattctatttaagcctgtgattttcaaccctggctgcatactagaatcactggaaagctttaaaaaaattctcatgctaaggccccatcacagactatttgagtcatattctctgaaggtaaggtctagacattagtgtttttcaaaagctccacagatgtttctaacattcagccagggtctctgccatctgacaaccatgtttgtgcagttgtctatcttgccctagttgagtatgctctgaaatgcccttgaatgtatttcctcctttacattgtggtgccttgggttcacatgtgtactctatcacctgaactattgcagcagtcttttttttttttgatatcaccaaaaaaaacttccttttagttaatctattgaactgccagcacagttctcctagaaaacaaattagaatgtgttactaccctccttaagaaccttacccgtagcctgttgaatgaagttctgagtttaatggggcacacaaggctattggcaatctgaatctacaccatcttaagatacatgggaagtcattactgtaacttgtcaagtttgataaatgcagccaaatcacagcaracatgcccagagttaggaggtatatattttggtgtccatttttgccacacactggccctcaaactttggtgagactatcgatgtatagaactcagcatctttccctgtttggaagaaagaacaagaagaaatacagcttagaaataagtggaaggggccaggtgcagtggctcactcctgtaatcccagcagtttgggagtccgaggcgggcagatcatgaggtcaggagtttgagaccagcctgaccaacatggtgaaaccccgtytytagtaaaaatacaaaaattarctgggcgtggtggcaggtgcctgtaatccaagttactcaggaggctgaggcaggagaatcgctttaacctgggaggcggaggttgcagtgagccaagatcatgcaactgtactccagccttggtkacaaagcaagactctgtctcaaaaaaaaaaaaaaaaaaaaaaaaaaggaagacatttaaggaaggagtgatgtaagacactggaaaacatttgtacttttgtatgaaaatgctgtagcagaaggcttaatcaccccatttgtcattcagacctcaattcccctgtccctcagagaacttacctggaacccttagatggagacatattccttcttctcctctcctctggcactgtgtgccattcctctgtaacccttctcacctgtgtaaacacgtatgtgcatttttgtgactatttgcttgtctgattcccaactctgccatgaatactttgcaggcaaggtcttgtccagttttctcagtgcatgtctacagggctgggcctggcatgtggtaggtgatgaatttccaggtgggtgaccattgggttgactgactgagaaaataatcaaacagttgatgtgtgtaggcagtggggaaatgggaagcacataaggcctgtgtggaaggatattttcctcttccctccagggctggccaccttttcagggtccctttacctttcttctggttccactgaagaggccatgggcttctagaagtgtaggcttttctctgctttgcccatatcaagctgggggggctttgggatggcatgtcacgctatgctaccacctgcgtctgtggagtcttctagccagtgtgcatctgttttgtttcccattgtgttctgggtgctctgaagggttttgtgtagacttgtaccactcagtatggttgctattaaccacatgtggctactgagcactcaggttgtggctagtctgtattgacatgagctgtaactgcaatagacacatgggattttgaagagttaatataaaaaatactaaaacatcttgattttatattggttacatgttgaaatgataatattctaggtatcttgaattaaataaaatatatgattaaaattattttyacctggttgtatatttttctaacatggcttttaaaatattaagttatgtatgtgacttacacatttctgttgactagctctggtccagaaactacatttcttacatcatgaattcatttatctgcatttcatttgttcaggcacatatgaaaatgaacactttcaagcagtgtatgaaatgaccactgttaccaaaccagcgagaacacagactttaaggactgtcattttattctcctagtctggtaggcagtcataacttctgttagatggtttgaaacgtttacagatgcttcatgattttctttgagcagtcctgaggctgggacaaaagatggagcatctttgggctggaaatccatggcatgttccccacgacgagatcctatcgttctggccttttctttctgagactttctgcatttcatcctttgaagtggtaatagctacggacaacattcaggaagcagtgatctttgccagtgagttgtgtgactttgacagcgagctgagtttggaaaatgtgttgactttgtcccagctgtgtgattgtgggcagctctgagcattcgttaaactttctaagtcctttaggtcatatggaactctccaagtctatttcagatcacatcaacagtttctcctctggcctgacatgagcacatggggcatgtccattcaaagggagttcatgtgaaagttacagtggctttccaatcagctggtgatgatgctgtctgctgtatccccagccactctgctggagttgctactgtaatggttcagtgactaattggtgtttacctacagagtctgtaaatacattcccattcttggtattgaacatattaaaattgccatgtaatctttgtagcttattctctctactatctgcttaaaggcagagaaggatttgcaaatatgattacattttcaaaatgaaagtgtttcttttacggttgtgtactaacaattctttatcatttgcgtactaagtttaacacactctaacagaccagcataaatttaggcagagcagggaatatttctatctagaaaactgtgctttcrggcagctaactgcatggatgagttccaggttttatctactttgctatttggaccgggggatggtaaaacagtgtatgaggaaagtttcttactgtctttcacttggtgagagaaaattagtattgctggtcccagtttgcttttttctgcttgctctttagtgggaaagtgttaattttgaaattgcatctgtaaattatagtcatgtgaattttgtgctctgctggaatttctrtgtgttggcctggagtctgtctggagcacagcaggcaaagcagttgggtgtggctgaacatgggagtgtgtggagagtgggcagagtgagggtggaaggggcagggcagcagctcctggggacttctctgagtgtactgctaagtaactggcactctgcatttaagaattttggggctggcatggtggtaatggtggtatgatcacattaatagttttgaaatgtcatacaacctctatggtagccaagtagaggatgaaattgaagggagtgaaattgtaggcctggagacatattggaagctattccaataattgaggcaagaaatagagagggccgagacatagcagaggcatgggaggagagaagggattggatctgagagagtctgaaaaggatgaattgactgataggatttagacctggcacttacttccagaaagtttccccaatgtctggccaggtgaaggagaggagtgggattgtggggtcattgggaatggggaggaaaagcaggctaggaggaaaagatgctctgtttggggtcttcagaggcagagtgttgaggtcaagaaggcagagacggcaggaccatagtggtgcggaaatgcctaatgaggcaagtgcagtcctgtttgctttagaaaaaatttgctcaatgaccttctttctctcagaatctgaaaaatatccacttttaatcarataagaaatatatcattcagaaaatggcaaccacaaaaagcttctcagagaataaggtgcaagtgaatctrcttagaatacacaagtattctcactggagtacgatgtgatgatgagaggggtgggccagagactggtcattcttgcccatcaaacctgtatcaacctgaagaaagagagtctggcaaatgtccaggtgcccatcaagatgcagactaggatcacctcttttaaagatgcctttgaacccctctagctccctctgcccacgaaggggtgcaactggccttgctgtctcccctgggcttcagatgttgcttgtcatactagtctgtgttttccctcrgtacccttcattgttatggtctttcctaatagactgttggttttttgagagcaggaagcattgtatcctcattttgctccctgmagcttttggagtgtgtgtctggtgtatctagcacagaatgaagtgttcagtaaatacaagaaacttatagaaagggtagtgaagtggaaagagcaataaccaggacagaagaaaagggacctggtactaaccctgctactattagttgtttaacctggagcaagccagtttttctgggccatggtattctgataggcaaaggaagagatttagtgagaatctggaaagtccataaatggtccttcagaggtccctggatttcttgatattagatgcagactttatatgtgtttttgtgtgtgtatgtgtgtatgtgtgtgtgtagataggtgggtttaattttttgagtaaatgagtgatagctttcatcatactctcaaagggatctataacaaaataataaccactgaataaaacatgatatctctagaatttgtaagatagagttgtggggcctgggtataggcattcagctaaaggacttgtctggaaattgctatgaacaaacacaccctagttacacagatttttgtgtttatttggagtagagaggtgtggcttctctgagcccatcctgtgtactatcctttcttagaactctttcagttctatgtgaggtcacactcacattttgttttctgaagtactttacaaagaccaaatctgactttaccgatgatgatgaggatgatgacaatgacaacaaaggtgatgatgacgttagaaatagcagcagaagtataggacattcttctatgtgcatatatctgtctgtctgtcacctctttaacgctgaaagtaaacttgtttgataagtgatgttttaattgtaatttcgtaggtaagggaactaaggcacagagccttgatcatcttgactcccgtccttaccttgctagtaagagatggagctggtctttgaacccagaaaatctgacttctgagcctgcacttctaatcagcccagtatatggctttttttttaaaggaagttcttgttctctgtagtttcacttttgaagattcaaaaaatagtaagtatagaatacttcttaaatttatgattgttaccaaggacagcacaaactataatttggatccatttaacctatatagatactctactctcttgaacaatggaaatstatttcccatagtttacagtcttcctgacatagaaatgttttgttgatcttatctggctgtactgctttgctttgcccatagaggaggtgctaaggacatttttcaacagcatcccacagatcaaagcaacaagcaggtgcttcaggaaatccctaagatgtgttgctggaagtgacactaagctgtagtgtatcctaatgggggtaatttactgtgtgaaattagagtttcgaagaaaattatgataatgagttctgttgatttcctgggagagttaaggtgaaacatgttgttagtctgaaatttaccatctggtctggtttagaattagacctaattgtcagataacctggtgtctgggatgcctggatagtatcaggtctctggggtgcctctagcttgcagttgacctggtctacagactatgcttctgtctgaatttctccacccagcactcatgcccacactcccagttccctcttctggggcccaagtttttctccacaaccccacagggcacttgctctgatccttcagaaaccaggatgcaacatctgtgccttgagcctctgctgctagatagcaacctaatgttgtaggggtgtgatgccgtggaccccttcttgaacccccaagctcgtcttgcatttggggctctagcatgcagctgcctgattgcccttgcagagcccacctccctgtaagtaccctttccctcggaattccttttgaacccaggttgttgttactgaacccggcctttccttttgggtctggtatgggttaagtggtgagatttcagaatagagaactcaagaagataaatccataattaattagcaactttttggcagacctacatgttggtctcatggcttcctctggttactgtggctgtgcctttcttaactcaggaccttaaaggtagccataacatactgctcctgcttagatgacttgttttaattacaaataacatcaacagcactaatgtgctagagaagcaaagagtggacatttgcccgaatgtctcatgaagagaatagtttaaaatgggtagttttatcagtgtacaatatcaccagtctgttttcaaaagctgttttattttgtggtttttaaattaactaagggatgaaaaaaataaagagctaaaacaaaataaaaatcatcattggttgaaaatgtttcataggggaacatgtcagtatgtttgttggctctaggtttgagtaaatagacaacactgtctcatatttaatgtttaattttcacaatggattcttcaactattcattctccacttgtgccaggttgagccctttacatatctggacacctattatccctaatctttaaaacaatttagcaaggtattactcttttatttgtttaagccagaaatatttttgtgttaagtggttgctgtgagcctgtctrtgaactaggtgatggaaatacaacagtgaagaatcactttgattctactgcccttaagaaattttccgttgtyagattgaaagaccaatgaacagatcactggcacggcttatgtttttatatactcttcaggggtgtctaaatttatgcagatatttttcatattgaagcaatatttatgcaaatatattgaatatcatgccttttgtcctagtcatcccatttaaaaatctttcctatagcaaaatctgcacataattgaaaagatctttggcgagaaaaataattgcagattttgcagaaaaatgttgaaaaagctcattgacaagagaatggctaaatcattgctgtttatatacactgaaatgttacacagcactaaaatgaataaagtagatgtatacatatgacatgactctgctttattgttaatgacaaaagcatgctgtagaaaaatctgtataataggaatacattacttaataaagcaaaggaaaaaagaaaaactctgccagagtcataccagatttttagctatggtcccatttaggcagaagagagaggagaggtgtgaagggcatcttttatgtattactgtattatttcagcctgacaaagtaaacatgtattcttttgaaatatatatatatatatttgagatagggtcttgctctgtcacccaggctggagtgcagtggcactatctcagctcactgcaagccccacctcccaggttcacaccattctcctgcctcagcctcccaagtagctgggactacaggtgyccgccaccatgcctggctaattttttttttttttttttgkatttttagtagagatagggtttcactgtgttggccaggatggtctcgatctcctgatctygtgatctgcccgcctcagcctcccaaagtgctgggattacaggcgtgagccaccaggcctggcctgaaatatttttaaaagccaataaattttcattttaaatgaggtgatagatgctacggtggagttatgtccggggtcctatgrggacacaaaggggacacagaccatgggccagagaaggctccgtggaggagtgggtgrcctcactgggttcaggatggtacatgtccaccatgtagaagacacagagagaacaagggcttcttgcttggaagcatcctggaggcttttctggtaggcggccttggggctgtccacctccagagccttaacagctagcccaggtcatcctgggttcttcttcccttagccctcacagarcatcagctactattcctgaacactcctcccatttccactactttcctgtctactgcagccatcttggttccagtgcctcacctctcacttgggtggttgagacagccccctcagttggtctcctggccccttctctgttccctatgtcctctaccccagtctgcccttcactttgctttaaaaaggcagwtttgaccctgtgattgtcctttccacactttctcaatggtccttcctagcttctggaatataagccacccttctaaagcagatttgcagaaccctttgtctacctttcccacctgcctcacaaagtagctcttatttatgytatccaggatgattttcatttctttacagatrccactcttcttactcaccaaaggatagacaaagggaaagaaagaaaattcatgacatggatttactctagttgattgttggcctattgacctgcaggtattgttactagctatgtctgtttctgggagttaatgtatctcagaatttcctattattttgtggtaacaagttagaaattaatatattgcaggaaaayagtcttcttagtgtccttggagatgttttcttttgtaaaaattcttgaatggatgtttccagtggcaggtcagaatccccacaaagaggatttaagaatctggcattagtttgtatacttgtctattccaaatccggatacgcttcgcctttatagaatacacattgttctaaaaacaccgcattgactaaacagtctttatttgctttggctaaacttagagttaacggatggactcagtgtacaatagcatagacacaaaactgagtgccagttctcactcactttrggatacactgcatgctgtctttccattcctcctcatttgctgcatttgtatatttgttatttttctgttagtgaatagtaataaataactcctgttaagcagaaaataggagttggtctcagcttgttgattttcagaaatgtttgtccttataaaacacattcaattcaggactaaactaatagactatcatctggctccctctggtggacactcatgaaaaaaatcaagctatagttttctgaaagaggcggtgtgtaggggaggggttgtcatttttctggtttttggtgggggaaaaggaatagaaaatgcattctgattttgtagatacatcatagttattatagaaaatatcctcaargagtaaaatgcattgctatataaaatacataatagaatagcaataataaaagacataaccgtagtactgctattgctatttttcttgttattaagtagtgatatatgctgggaccacagtgtaaagtagaatcagaggcagatttcacyccatagctttctaacagtgatatattaggataagatgcatgctaaagtaaagcaatgtagttaattcaagggtctggatactgtactgattattccagaacctccccaaagttagacttttcgcttaatagtgaataattttggtattttagcaagtgactatttttattttgaattagttatttttgataaatttattagtatttgttcattcttgatcttctgagtttacaaactcactgacaatgttttatctttattatggggaattaatcaatatcaagttttatctgattggttgtatatgttttgacattagatgttcgacatagttgaccaggaagaaattgcatgaagggtttcaattgtattttcttttctttttctagtctcacagcagggggctacggttagaatatacaattttggggtcagtaaattagctcatctagtcaccatgtcctttgcttctttctaaccctttagaactatcctaaagagttttgctcccttctcttttgtttatgtaacaaattttcttaattttttaaaaattaacaaataaaaattatatgtattgatctgtgcaacatgttggtttgaaatatgtatacattgtggaatggttaactggagctaattaacatatgtattgcatcacatcttttttattttattgtggtgagaacgcttaaaatgtaacctttttgcagttttcaagaatgtaatacattgtcgtcatctatatgtaattcaattaaatgttatctttgtataataactttattttacatgataataaaaattcacatttactgagttaagcatatgataggcatgatctcatttaattcttttagtaactccatgaagcagttagctattatctgcattttacagaggctagtaaaggtgagcatagctgaaaacttgtgagtcagggctccaggtattcttactccaaagccaggagtttctaactacaaccatatatatatatggtaccagttcctgaagtgggtgagatataagtgtatgtgtggctggtactctcatgaaccttctacagagtactggagagacttcatttttatgttcctgtctctgaagtaaggaattagattaccttaatttagaaacagatttttgccttttctcgctttttactatcattctgaataagcctcatgtagaacctctttaagttgtgtttgttaaaattttgagagttaggatgcattatatctattatcataaaaataaactttatggccgggcacagtggttcacacctgtaatcccagcactttgggaggccaaggcaggtgggtcacttgaggccaggagtccgagaccagcctggccgacatagcgaaactgcatctctactaaaaatacaaacattagccaggcatggtggtgtgtgcctgtaatcccagctacttgagaggctgaggcatgacaatcacttgaacctgggaggcagaggttgtagtgagccaagatcgcaccactgtactccagcctgcacaacagagtgagactctgtctcaaaaaagaaacaaacaagaatagactttatgagaaaaatacattttagataaatggctttctcactaagtcttcgaaagagacaatcttaggacaaaagattgaaggaagggtaaagttgctagcagagtatatttaacatttagatttaagtactgaagatctttataaggaatctttgaaacataattaaggttaatttagaaaactttttctgaaaacactcagaattaaattaaggcaatttccttaaagttggtgattatacagaatagctactatttaaatagtttacgtgctagcttatttaatcctcacgataatgtaatgattgttaataatctaactattattataggcattatctagaagatgaaacaaaagctcagagaagttaagtattttgcccaaaagtacttggccaataaatggtaagctgaggatttagactcaggtggtctggcccaagagcccgcccacagtctcacctgctttgctatatagcaggactgtccaatagaactttctgtgatgatggaaattttttgataactgtgtagttcattacagtggccacatgtgtgtggctactgaacacttaaaatgtggctagtgcaactgyagaactgggatttttgtttttaaaatttaaattaatttaaatagcctcatgtggctagtgggtactatactggagaatacagctttccagaatctttcagattctgtaaaagtagagatacaagttgcttggggccacccaggctaactttgtgttatactgatatagaatctgcaactcaaatgggttagtaatctacttaaagtaataaagtaatttattactttaagtaataattataaaattataatccaggtgtttatacttcccaatcacagcccttctcattctgcacatctttgacacctgcaaatttatgtttctgctgctatggttaatattagattgaaaaaattttggaaaaagaaatcttatattttctgaactacatatctaattagtattttcctcttttctcaggttatagaaacattatcacgactttctcgaacacctatagcattggccacaggaatcaggtaagctctgttttcgttgttcatgtgtcccattgagttcagtgtaatgattctttattaaatggttactatttgtgaagcatcttgcacacaggtactatgtctcattcatgaagagtgcctggtatgtaagtatcccgtacacgtttgaaattaattgagcaaggtagaacttattgatagagttgaataacacattggctaaacattgttctcaattcacaggtgactgtcactggtgtggttcttctttttttttttttttaactttcctccaacatttctgtacatatgattcattaaagtaaacacaaatgcttaagtaaataaatatttataagatgttgtaatatgtttatttcctatagagtagatcataataactcatagcttttaggagtttaagaaataatcaaacaagtataaaacatgtgtacaagaatgtgtattgaaggttcagtagtaaattaaaaacctggaagtaaattggttaaatatagtatgtcatctccttgcaatagagtattatgcagttgataagcataaaaatatagatgtgtatgttgtgttgagccttttctgtttcagatactacatacttaagttagatcagtcagcaaagatgtattatataagtaacattaggaaataaagcaaaacagtctctactcagcctggtttcatggaaatggatcaaatttgttttttaccttctttattcagtgctccatatttctgtctcyggccatcacagccatttttctgtgtccagctcacattcacattctaagggagagaggatccaagcaggacttagtggggttctctgcactggctacaaagcacagtgagctcaggaaaaatgccctgctggtacaggacctttctcagaaatgggccatgaatttggcagctttctatgtatatggtctgtcggctggataaatgtttaactcctaatttgctcttcaatacatgcatacctttcatgtcaatatatattttatgttattatatgtaaacagatttttttaaagcatgatcaaatttttatgtattgattctgaaaaaacgtaagtcaaaatttttctcctttttttctcatctatattttctacaatgaacttgcataataaaatgtgccttaatttataaaaaatgattatgagactacatttctcacacactgatttatttgaaaaacctagtctcctcaaatgtcttcagtattaaattaatccataagtcaatgtgaaactctgcttttaatataactrgtaattatttaaagcttatttattattttgatggatcctctggtttttatgaaacatgtgatatgctggctgcctgaaaagagtagaatttttggcacagtatgcttactgtgattttgttagacataaatttaaggcagttatgaaaaaaggacatagtaccatgatgcaaacaaggaagccacacagtgggaataggagatacattaaaggtgattttcttgaatagggaacaaagaaaacactctattcaccccaaggtctggttgactcatttgtctaataaacgaaaataaaacatacagcttaaataccctaaagtctgagcagaaatgtcagggtcaatgaccgtatatgtaaagggcacaatgtttttgtcttctactagttttcatctacactagtgaacggagccatggaaggatgattgctaccaaattatttgttatcagatcccacagctgaaaagagagggtgctgaaggcaagggtacatgcacagctgtttgttgtctgacttggggtgctgcagtgggtgaggtgaccctgcaggtatgtggcaggtgggagatcagataagcacgttattatgaccccctgcacatgtgactgtggtgaccagctgtaattgcttcagatgatttcaggtggcaggtgttacagcctccctaggggaaccccagacaaagccactgagcaggcactttagggaaagccctagatattgttagacatggtgactgatctgaccattttggcagcagacaacttacatatttagtgagggttaagtgcgcagcctgattgttgctcgttsactcatgggtttgtttttttgtttttgtttyttctcctcttcctaggcccttcccaacagaagaaagcattaatgatgaaracatctacaaaggccttcctgatttaatagagtatgttgaaaatttcaagcaaaatttagccactgccaatttatgtgtccattgtgggttttaactgtggatgttaaagtaagctatctgaaggaggaaaagtggcttaattactgattaaccttaaactggcgatggaaagctttacaagaaaatgtacttcaactggtttttagttcctgttttgtgtccccatgaagaataaagaaacttactctaatgaagtaaaatttcaaagtttctcaaaggcataacagaagtagtagataaaactggagttagggaacaatttaaaagaaatagaatctgctgctggagttgtgggacacatagtgcatgccttataagttcaaggaagggagagataagtgtgggttggagctattcgggatgttttagtaggcggtgtttgttctgaacagagaatctttttgggctctattatttaatagtcaagagaggcmaaaggtccttgcagccgattatcttctgctgattgagtgacttgtacagattacaaataaatatatgcgtgatcgttactcctcaaggaactgatgacatggatcaggcatgtttgcaaagaatcataataagaaatagattatgccccaagacagattcaaatgctatggaacttcatccattcattcatctatccttcctcatacacccaacacactgggcttgttttagccttgtgacctttacacctgctattctttctgcctgtttgactgatccctcagcgttcaagtttttgcttagatttcyctacagagaggccttctctgactatcctgtctaaaattgccaccacccccttacattgctgtgtttttacagcatttgccaatgcctgagacagtcttggtttgcttcatttattgtttgtctcctcattagaaggtacacttttgtgaggtgtgggactttgccttgttcatggctgtattcctagaacttcacagtgtctggcatatagtaggtactcaataagtatttgttttccaaattaataagtcaaaactgcatctagcatctactgtttgccaggtattacacctggcaataataataagagcttactgagtttccatttgtgtgctaaccaggttatatgcactatcttatgtaataccacaatattactaggttgttattatatcttcacagtttaaaagtgagaaaactgaattttgaaaagcctagttacttgctgagggtaatattgctagtaaattgtagtctttggatttgaactcagacacctcttattctagagcagaggttgttagtcacagccccaacttccagatccctctcagagcttttagtagaagagtagagggggtgagcacacccactgcagtcacacgatggatggccagcagctctttccagggtaggtggccttgagaatgatctttcagtcttatattttaaatatctattaagagtagtttcttatctcttaaaatctctaagaactcaccaacagtaagcaagatagtgccagttgttttattgaattggttgtaatcttcataaagtgactaagattattggtaatgtactcagattgtttaaggggaatatttaatttctagtgccgtgatgctattctttttttttttttttttttttttttttgkgactgagtcttgctctggcacccaggctagagtgcgatggcacgatctcagctcactgcaacctccacctcctgggttcaagtgattctcctgcctcagcctcccaagtagctgggattacaggtgcctgccactgcgcccagttaattttttatttttagtagagacagggtttcactgtggtagccaggatggtctcgaactcctgacctcatgatccacctgccttggtgtcccaacktgctgggactacaggtgtgaaccactgtgcccagtcgatattcttttttaacccataccagtggtgacttacacctataaatttttatagcttccccattttgttcttttcactgatgttatttaggcagacatgatgtcaggataaatccagtgaggatgcattcctagctaaatttggagaaaaccttggtttcctgaattggctgctctgagatgccagcccttgctctgtgagaggcagtctgctttaaatttctacctggtggccgaaggtccgaatgtatttgcaggattaaagaaattatttatttaatatgcccaggctggtctccaactcctgggctcaagcaatccacccaccttggcctcccaaagttctgggataaaaggtgaagtagggttatcttaaaaaaaaaaaaaaagcaaatgtattatccctagacatgcttggttttgagtttgctgtgacagcttgatttttattctcagctttattacaatttctatgggtaaatatacttaactctaaattttggggctgcattcacccaaacrgaagcccttggaataaatactggcctggtccccactgtggaggcaatcattgtttcctaagttggggagaaagccacaggatggagtggagagggcaggtaatggctacactgtacagtgtccttttagtatcagggcgccagacatgcccgtatgtaggtggccttacatgtcgattgtttttgatttattgaccatttgaaaaatatcacagcttttttctttcctggctcagaaatcaggaattgttgactaagctgttagcaagaaaagcagctttagtaaaggattgaataacaaaagccaaacagttctagaccagtcttgtgtgtgtgtttgcgtttgtgcacttgcatgcacgcatgcactcacacatgcatgtcattcttacaggtcttaaaatagagaaaagtcagccaggcgcggtggctcatgcctgtaatcctaacattttgggaggctgaggtgggcagatcacctgaggtcaggagtttgagaccagcctggccaacatggtgaaaccctgtctctactaaaaatacaaaaattaactgggcatggtggtgcgtgcctgtaattccagctacccaggaggctgaggcagaagaatcgctggaacccaggaggtggaggctgcagtgagccaagactgcaccaccgtactccagcctgggcaacagagtgagactctgtcccccaaacaacaacaacagcaaaaatagagaaaagtctgtgctaatttatatgattcattcctttactgtcatgggaaatagtgaaatgtaggacttcagcaaggttgacttttttgcaggggtggtgatgttagggatgacaagcaggagttctgggattaggagtgccagggaaatgaatttcagtccattttgcttccaaacaggatcccctccaatgcagaacctgttttttcatcattttatatctcagctccttcatgaactcaccagaccttcctatcctttgatgtggtacagagaatgtgcaaacygatttacctgccctaatgttctctggccagattgccgcctaaacccctcagtatggaaattatgttactgccaatatggatcaccatctccctggtgtcccaaagtagaaagctccttcctcttccttcctcctccctcccttattctcagtgttcaccaagtctggttgtcccagtctcctatctctgtctgttcctctcctcmtctgtctttatgttagttatggccctgaatataaaacagataaaggaagggtctggttgatgggggactggtgggtttcctctgaatgggcttgaaagagcatgggttgaaaaccactggattagatgctgattataacactgcagtaactgatgcttttwtaagaccacttatgacatattagatacaatttaactctcctatcttctccatattatacccattaatacagttgatgaaactgaggtcttgaaatatgaaaagtgggaggcagtatgatagagtgggtaaaacactcagcgttaagacagacttggttttaaatattggatctgccagtgactacctgggttatttgtaaagtcaaatagccttttggtctttcaacttcctcatctctttaatggattaaataataatgcacacctgatcattaatgttggatgaattatgtaagataatatatgtagaataattatttttgtgcttatacatagtaactacccagtaaatgatggctgccactgccctcgttattggattctgtagttgtcattgtacctattaagagggacaaagttgtaatgtaaaccttttgaactctttccactaattccattttatttcctttctggattttttactaaaatccagtaggctatttgtagctattgcatttactgcataatagaaaatgaccttatrtgatatcctttgttgtagtgaaacccttgtggaagatgaagaagatctctatgactgtgtttatggggaagatgaaggtggagaagtctatgaggacttaatgaaggcagaggaagcacatcagcccgtaggacttttacttgtttttaaagttactctgaatattttattaggaaagrctaattaacataataatttatgtaacatctgctgggattttttttaacstttgcttgcttataactatataattatgacttgttactgcatttggagacatatgcatgacctttcagagttcaaaacaaccatagggaatcttttgtctagtcttttcatttcgctartaaggaaacaaagtctgagagagaaatgaagtgccacccagttaaataatggcagggtggtagtagaatagaattttagggaatcatgaaattatactcttataaaagtaaatttcttacaacacaggtaaatttttccctttaaatttgatataagataaaatatatattaaagagtatttcttcacatttgttaagtgttaatatgaggtaccatttttcttttgtttcatggtaagtctcctggctttcctactcatttataaatttagtttcagatattgtcatagccaatatgagccctcaaaaccttatctgctattartatatccagaacattcagaaaggattactttggattattttctcatttacaatttgaaacarcaacagaaaaagtcagttgcttaggttcttaataactttttcttgtatattaaagacttttctttaccagctgcttggtaatttttgtttccacagtgctttgatgaatgcgcttagctctctctatgttcctactgttaataaaaggctgatgggctgtccagtagcttctgtggaatggaaacaagttacctgcctgtgtttgaggaatataacgcaagtgtggtttaaccattgcataggctgacagcccatctgtggcagcattttcagaacatttttaggtgaccgaatatcatctgtgcctcctgtaattgttaactgcattgagtgctagtgcattcttcactgtctcccgcaagggcagtcctcactcagctgatggggtgaacagtgataataatttagatgggtaggactcttcttgcgcrcttggaaaagtgctaagtgctttatactgtttatcttatttaccattccttggggttggtactgtaattctctctgtttgacagataagaaaactgagtcagagaaatttagtgattcattcacagttagaaaagctaacaacaggccgggcgcggtagctcgcgcttgtaatcccagcactctgagaggccgaggcaggcagatcatgaggtcaggagatcaagaccatcctggctaacacggtgaaacctcgtctctactaaaaaacacaaaaaattagctgggcgtggcggcgggcacctgtagtcacagctacttgggaagctgaggcaggagaatggcgtgaacccaggaggcagaggttgcagtgagccgagatcgcgccactgctgtccagcctgggcgacagagcgagactctgactcaaaaaaaaaaaaaaaaagctgacaagaaaactggtgttgaasccaattccatcagattccagaatctttgattttagtgttgtgctctatgacttccaatcttaaatacttagttaaaaagtcaagcagtaagatgttaatgttggaaaaaatatttgaaggtctttacttactttgccaaatacctttttattgtttttgcagttatttctrtagtatttgttaagtgygctgtacattaaggaaataatcatacwccatttatggtgtttccaactttatgaacattttagtaagagatattttagagtgtctacattcagaggcttattttttaatcatctaaatctttgtcattacattgttcacgatttttataaaaacagcaaagatgcctcacaaatgcagttagatgtctttcaattatgtgttgtattagaaaggaaagtttaagaaagtcagcaatgcttttgatctctacttccygataggttaatatatgattttattaaatcattttattttgataattctaactgcagaaatgtccagaaaatgatatacgaagttgttgtctagcagaaattaagcagacagaagaaaaatatacagaaactttggagtcaatagaaaargtaagtcatcaggtattatttttgatgcccaaatactgcctaatatagttaatatattagactcactgtttcttctgaaggtgtgtatgtgtattataatttttaggagaactttgtacttaaagatctcaaagcagatttattcattttacaactatttatggatgtcttagtacctgagtggcactgtttcagggactaaggatatagtaataaatacaacagtattctgattctcatgacactttttcccatgggaggattagaatgtaagcaaataaatatgccagatggtcataagttttctgaagaaaaataaggcaggggcataagatagagagtgatggggggggagggctggtggcattttataaagagtggtagcagaagccctctgtgacaagattaagtgggcagctaagtgaactgagggtataagccgtgtacatatgccaatgaagatcattcccgagagagcccctctgattggaaagtgttcagcatgtgcttcaagggcagcagcagtccagtgtggctggagcagaatgagggaaggggactgagcatgaggtgggagagctggtgggcttctaggccatgcraggacattgggaagggttgtgagcagaagtgacatgatgtgatttaagtctttaacctctcattctggctcttctgaggcaagagtggtaactaagagaagaattagaagaaaattgtgttaatcgagatgacaaaaatggtggtataggyggtcagattctgagtaaattttaaacatagaaccaaccggattggatgatsaattaagtaaaggatgtgaaaaaaagagaggagtcaaggatgactgtaggttttggcatgagaaactgcatgaatggtgaagattacaggggtggggaaggacaggcttgggaatcaggagtctgttggaacaagtgaaatttgtgatacctattagactttgaatgggatttgttgagaaaggtgttaggtatatgaatcaggcattaaggggraagactgaattgacaaatagattgggccattatcatcacacaatggcattaaggccctgggactaagtgagatcaccctagtgaatgcatgttagggaagaggtttgaggccagctctccagactctcacatttagaggttagggaaagaagtgaaagtatgcaagcattatttagaagagtagaagagtagattgactagggaactgtagtagcactatgtagcgttacaggcccagttgagttttgtggtcatattgaaaattagacgatcggtaatgtccatgcttaacttcttagatagagtcacaaaatatgtggcaagttagacttgatcagggtgtttgtttttctagaaaagcacaatggaagaagagaaggtaaggggatttacagggaagtgattcatggagtataaactcggttaggagggaaatgaggatatgatggaggtgggatggttagtggactggctgacccaattccttgaaattagtgctatgaagcatatgaagttgttgataatgacaaggtctgtgagtatggccataagatttaggagttgagctagagtggagcacaagattatttgtggtcaaggaactgagagaccagtactagaaggatcctctgcacagatactgagaatgccgagaatgaaagagatatggtaggccagaaactaaaattctcaaggaataattcataaattgcatacatagattattgatctcagggatctagaatctccacaaaacatttgggagatattactgtgtaagtcttcatatacatctccamaatgttgccattttttggcaactcagacaataatgttcttttcttccttccttttggaagcatttattgtctaaaccattttattttatactttaaatgtattaatattagctcgtatttatgtttttatatatctattcaagtgtaaagtctttaagttagagaaaatagtttctacaattttggtgtttataatgctgatcaacaattgactttcaaaacgtatttgttgtttgttgatgaaaaactattatatagattaggacaagttatacttaattactattttcttcttctttcctggtagtatttcatggcaccactaaaaagatttctgacagcagcagaatttgattcagtattcatcaacattcctgtgagtaaaaatatgctagctaaaattgtggtgtacttcaataaaatcttcatttccttagggggttccagatccctattttaatactcttttgtattatttaagaatattggccttatttatttattttttgcttttccagtttttatatccttattttcttgaaataactgatgtatcatatcttcaaccaaaagtcagtcaacatgtacgaagaacacaaatggaaaaataactttcatgtgttattcttaactctttgtcatgaagaggtagtctcaaataatctggggatccacttccatccccacacttccctgcggagctctgttgctcttccagaccctcagaccttgtcttgtaggtgatgtcctcaccatatcagtttcccctactttcctccattcctccacatctttgacttctactatttggtgctttctacttccagttgtatcatatgtaactcccatttatgaaataccctacttccttatgatttaccagactattttaattgtaaaatttgaggagatatttttcgtttacatttatgtaagcatttcaagtttcagggcaccttaccagaatcttacaatcttaaaaggatatttgcccagaaatctagaagcaagctaaatgtcatgccaagtgaggtaatgctaggcaagattcaagttctcagacctctaggacttgctttggtttatacatccccacccccatgcacgcatgtacacatacactgataaatgtatataagcttttatkcacagacctgcttgtattacctgaacagttctttgtgttttgattctattgtgttctgtgttgctgartagcagttggtaagcaatggcatgtcatccttgtccctgattttggccgaatgaggacattcttgttgatttataacatgcacaatatcagctgaaggtttagcactaaataaactgcacatttggggaagataaggatcttgaaccacttaagtatggtctttataacttagagcccacatcttcatgtttactttctacaccactaaggagagagcatgctgtggagtcaatgtgtgctccaaggtacacaggatgagataatgggagaattggcacctagttcaagttgcctcatatcctggctatgacatgtatttactgcctgactgaaaattagttgcttatcgggaaaaatgtgaaattctgacattttgagttgctctggtaaactgtcgaatacaatttatttgctccttatttatgccattagttgcctgatttcaagtaatttagtctgattattgttagcttagcaccaggacaccactaattgaccaaagtacaaatttacatgtttgtgtcacaaggacatgagtcattattttatcctgtcaataaaacattaggcacttggacagttttatttaaaaaatttacagtgattataaaacaaaaataagctatacatatttttacacaaggaataaattatcctttaataactagtgagataatttcttttttcacaggatgctgacatttcaactgagatctgaaattgctgtttcccatctgcatggcctgtctccttctcttctcctccctctcctctgccttccccttatcttccttcttttttctcctttccttcccctgctctccctcctcctcttctaccctgtcctctcccgctgcttcctccccttcctccccctttctctccccactctccttttccctctctctttattggtggaagcagttttatatattgagagcattcagcatatcctgagtggcaagtctagcaactaaaaggattctgggtttggggtgtattttttggttgttattcctactttcctttcacattgttttcttttcttaggaacttgtaaaacttcatcggaacctaatgcaagagattcatgattccattgtaaataaaaatgaccagaacttgtaccaagtttttattaactacaaggaaaggtaacttttgaagtttaagttttgtgggtcttagcttgtaattatagtgaggattagtattaaaatagctaacaaatagctattactgctgtttattacattactacctgagcagtaattagaaygtgggacaattactttcagagtagtagtttgagttctatatatgtaattaaaaaagaaaaaaagaagaagaagaaggaggagggggaaggacccagtatggtgcttatttttttgcatcgcaaatcaaaaggctaagtttcttttacaggctttatcattactgagcgatgtaatcttcagtaagtcattttaactctctgagcctctgtgtccccatctgtaaacaccggaggtagattagctggtacttaatgcttcttccacttttcttccaattctggtattttatgacactctattttggagtattagattcgcagagtcagtttccctttctaagttaaaaaaaaatctcctgacaacctataggaattggagtatcaagaaattttgcttaaaatataattatctctcttttcaaatcaagcaacgtatttcctagtactaagaagtggctaatgaattactttgcatcaagtcttcgataaatattcacattttattagtagtgtcttttttccagtggagagttaagagaagcaataaaccaactgacctctttgcaraatatttgtgctacagagataccttccctgaagtgggtcagattccatgtgatatgagttatcttctgtccagaacagttcaggtctctcgttttcctctcttcagatgatttatgttccttaattaaaaagtagcaaggagtaagaggtttaataatgaaggagttatatgtagtgattggcataaaattgtaatagagaaaactttctgagtgtttagagacaaagtttatctcttgtaagagctttaacagaaatttttaattttgtttttggaatgcatttatgtctactcaaataacattaacagtcatcaagccagtttgtaaattctgcctgctataaaaatttacatagaattaatctcattcaaagttggaactacaaattagtcattactataaaaatgagtgacccttattctatgactgtgtatgtggtatgtattaaaaataatttctactgctattttggttatccctaacaatggttttaaagagatgaagattctgcttgtttccccctccagttcattcttggtttttgtcttagagatttcttgtcttttttccctttcagattggttatttacgggcagtactgcagtggagtggagtcagccatctctagtttagactacatttctaagwcaaaagaagatgtcaaactgaaattagaggtgcctatttatttttagtttatgacataaagcaaaataaacctaaaagcaatgtrttcctstttatgatcagtgaagcagtacatttcccattattttaaatataatttcatgtcaattttataaaatatttaaacagctctataaaatagtaatatggtagtaatagtaacagtcgttaaaaatctaacatttatggccctgtgttttacatgcattatctcattaggtccttctgactctgtgaaataggtacaattaattttctcatcttatgagaaagctgaagttcagagagattatgaataacttgcgtagatagtaagaagtgcaggacgagtgagatacgttagataatgtatatgtagattwaaaatgtttactagttagctgggcagggtggctcatgcctgtagttctagctacctgagaagttgaggccaaggagtatgcacttgagcccgagagtttgaagctgcagtgagctatggttgcaccattgcactccagccagggtggcaaagcaagaccctgtatcaaaaacaaaataaaaaagatgtttactaaaaatatgacatttagaatcagatgtattaaaaggccatgcatattgcccacaggaaggaagagaagacgaacacaaatatggtaggattaaataacatgtgataagcactgtataatagggctctgtaagactgaatctacccacttcagtgtgggtagattgtagaggattcatctgaagaggcagcatttgagttaggtcaccaaagaatgggatgagctttgacagatgagattctatggagagcattcctgaacaattggtatgtattgaccagaacagttgggaaagtttgagaggtggcacgtaggccgatataaacagagtgcatgatcacaacagtatataagtctagaaacctaggttaagtcstgtttttttgtacatcatgtttttttttttgttttgttttttkkttttkgttttttttttcctgaagaggagttcgaggacttcatgctttcaaagaacttttgaacaatgtttgttgtatcagtcactgtattatccatgtattttgaattttattaaatttcaggtagagatatatagccagctcttaaatttaacagygtgtggcttatwtgcctgtttaatatcccttttccttttctttgttcagtgtagcactgaggtcaggggagaaggggcaggtgattttcaaatcagaagcccttcactgttttgcctctctggcatgatttcatagctcacaactcccacaaagggaaactattgcttagacagtttgcacgttaacaggccaccaagtaactgtactagatacgtgatstttttgctttatatcttaatattccttcattatgttgactttaagactggaggtagtttgagtcacccctaaataacatccttgtaacattgttagtgcaaagacttcctgctcctctttgcagaatagagcctcctaagtgtagagctgggagccactgtgactcaaaatatgatgataaaattaaattttacaacttatacacctacttcctagtagggcaacattaaagcagtttttcttaaaataaagatataaaattgtgctcccagatagtagtcagcaagttgtcaatcacacctccattatattctcagtcttgtttgagtgttgttcttccttctttcagagttattgtcaaagttttgcccaatgaccatactctgggactctaagtatgtagtttttgcagtcaatgctcgacttagggaaagagaggacatcaggctgagtttgaaaggcacagggtgaggtgcccctgctgtcctttcttcagcttaaaagcccacacttctaaccatagtcctgatttggaagtattaagtcggatacttagtgtaacacttcaacaaatactcagtgggagctgcgtgccgcaagccccagcatgatagaaggaaaactaccttattcttggtgtctttctgccttctttgtgtcttctgttttgtggttatttttgttcttgttgagttttttgtctttttcttctctactttggaaccaagataacatggggtgaagggcgatgaatctctttatcttgccctatcagcctggctcatcctacctcattttattttccattacaattgaattgaggctaagcaagtgactggatgttttggaaggattctttctacccattatttactttcaacacgaataagcattttacatttgagtctctatctcccaggtgtagctaattccagcaatgttggtttctttacttcctgagcctgtaacttagaatgtaaaggaactgactttttttcttcaacattttgaaactaatttccataatatagtgaattttaaatatataatatttctgttcctaccactgtgttgggatggcataacataagaaatataagctacaaccttaattccaagggccttaaaatgcagcagaggagataagacctactaattatagtaatattaacaatgtaacttyctgtttgagacccatgatccagagctctctacaatctgtagaagtaagaaactggttgaaatagttatccttctaatgaactgcagtaattgatgacacagctagcatgtcaggatgtgtccccaattcattttgactgatagctgtagacaracatactcattaagtcacggatcattagagttaatggtgtttttttggagctcctcataatatatcattccatgtgccagaaaaactaagtgtgggcaaagaagaaacaaacttgtgagcaamagtgtattttcttaagcacaactccrtctatgaactggaaaggtccttgtgctgggatgtgcaattgtgtcaggattttggacttatgaggttgctcactaataataatatttgtatggccctttttttttttttttttgaagaacaccatagttacgtgagaaacagtaaaatcagaaaagtgacttgtccaaggtcacaccgccaacagttgccaaatcttggctttaagttcattctttgacacttcaaagtaatttactcaaagtcataattattatcaaaagaacaaaccagtcaatactattttaaaataaacctttaggaaagaagagggtgaaattaaatacaatccaaggcttctaaatcttggagtttagtagtaggtttatacttgagcaaagttttaaagtcaaatattccatttcattcagttcagtaaatacttattaagcaaatactacattcttaggggcatacagcacaaatcatattggagtagatattacatatgataataattaaaagacccacaagacagagagagagtacacccaattgtgattgtaattgttaygaaaggcctaggattgtagttcttaaacaggaagatgtattttgctggaggctggacaaagcacatcatagttgagggaactgaataaaccatagttgagggtgggaagactattgacacttttgatgagtagggatgtgttcttgatgcctgttctataagtccactgggggaaattggtgggaagtacagcgataaagataaactgaagaagaccctggggggccatgattttgcactagagaaaataattttctttttcttttttcttttttttttttttttgagacggagtctcactctgtcacccaggctggagtgcagtgacaccatctcagctcactgcaagctccgcctccygggttcactccattctcctgcctcagccttctgagtagctgggactacaggcacctgccaccatgaccggctaattttgtttttgtattttcagtagagatggggtttcaccatgttagccaggatggtcttgatctcctgaccttgtgatctgcccgcctcggcctcccaaagtgctgggattacaggcgtgagccaccgcgcccggccaagaaaataattttcatacacaaaatagttctcttttattcatrtttagagttaaagtactacaagatttgtttttttaaattgaagatactttctgttatttacagagaaggattgttaaggaaacaaacgcactcatttattgtataataactgttctgcctagggcctttgcatcttttaatgtttatgactccctaacaaagtgtttttaaaacatttcattaggaatgttccaaaagagcaaataatgggaaatttactcttcgagacttgcttgtggttcctatgcaacgtgttttaaagtaccaccttctcctccaggtatgtaacttaaaacagtttatttattgtccatttattcactcaacaaaataytaatgaagcatcaactacattgcagatattccatgtgttgggcccaatccccttaaaattttgaattattattatagttaagtgggaaataacagaacagctggacattttttcttccttttagcagagatggtcagtagctgccataaatcacattttgtgtccttaaaacaggactgsctagaaaataattaaaaacaagtcaaaacaaataaaaatattttttcaaccaagtcttctgtagttatcagtatttatttatgagcacctcaatattgcagtgcacttgaattttggcagattaatcatattagacctcttcccttgtaacagtaagccaaagagaattgtgtgacattccatattgctttctactatactaaattataataagactacatttattttgaagtgattcttgttatagccyacaaagctatggtttccacggttagtcttctaaatgagggtggagagtcttataaatttaatttgatagctataccaggagactcattagttctgctccaaagaaatgtcttagtgtattagtctgtcaactctgctgatgcttgtgaaatgtcattttaaaaagatctactacctgtatgtgaaatacaattttgcgtcggctgtgctttgtatatcttgtatattaaatttcttgaactgtagctgcaaaattattagtcatctctatttttgttctactgagaaatcagaaaaattcaaaccctgattattccttaaaaatgcattaaaacatttatgagacctaaactcaaagcaacttagtcaaattggattttatgaaaaaataataaggacgactcaggcaatcagtttccaaggcatcctggaactaaatacatgtccaaaataaggtaataatttattttgtaactttggtgtagtcaagtatcgattgaagaatttagaaggtacagctttttaaaaaaatacctattttggtccttacagggttttacacagacttataaaagtataaaatacaactatacttttttgaaatttagtaaactgttccccctaatttcccttgggttgttttatatttaaaattttaagagtatgtttagttccatgatgactttttaaaatagggaaagttttatttggatactacacataggtaaaaattctagaaatgtttttccctctcaaaattctatggagtaaaatttatttgttgtctagaaatttgttgaacaaatgtggttatcagtttagacttttttacttactactatactttagtggcgaaatcacttgaaatgcttgatgatttgaaaccacagattcacaaagtgagaatattttatagtgggtgattkggaactttaataacatgacttttatttaatgaagtaaaagtaacttttaaggaataaaagaatagaatttttatggatttattatacttaatagattctgtctttaagttcttgtttatagcagaaacactggtagtattggattcattaaagatttttgtatggcttctctgtgccaaacatagtattaggcactcgtgatatacgacagaccctactcggataaagctcataatttagaaaggaaaaatgaagtataagctgccaagtataacacaatatgataggtacatgtaaggtacagaaccagcacagttaaaggcctaaataattatgtatagggaagctggggacctgagtagaggcctctgtcatagaagactccccagaggagtaactcttgagttgggctttaaaggaagagtaaggggtcaataagtagatcagaggggaagagctttgtaagcagaaaaaataatatttctaatgggattagatattagaacataatttaagaattgcaattaatttagtatgaatagaatataagttgtctgggtgaaagtggagggagaaattgagagaagtttgcagaattcagatcatgaggagtctaggaggtatgggtgacaacctgaagcttttgtggggcatcacagaagtctgagtagggtagagacaggatctgatttatattatagaaacctacccctgatgacaatagagtgactggactgtagtgaggagagactgcaagtcagaagsccgatcagaagctcattatgattacctggttttgttgttttttgttttaagagagggtctttctctgttgcccaagctagagtgcaatggtgtagtcatggctcactgcagttgggctcaagctgtcttcctgccttagcctcccaagtagctgagactacaggctcatgccaccttgcccagctaatttttaatttttttttgtagagatggggtcttgtcatgttgcccaggctgatctcaaattcctggactcaagtgatcctcccatctcagcctggaaatgtgctgggattacaggtgtgagtcaccatgcttggcaaataattatctgtttgaaaaacgtgaggatctgaacctaattagtggcaatgaggatggttccaagggggcaggatcaaagttaacatcaataggacatagtgagggagagagaacagggagaagtctgggacaccttttaggttttggcttaagtgatgacactgatggaagtgccatcattcaataaaacagaaataggatccaagaataggattctgggtgaagattgattaagtttggggaatgttggatttgaggggactttgaaataatgaggtagaaccatttagttggacggatgagtccgggactcgtgtgaattttgggttgagcacatacrtttcacagtaattggcccatgaggtgatagttgacattrtgacagtggttgtgatagaatttgtagagtatgtaaaatcaggggaaaaaagaggactagggtgaaaacttaaggaacaataactttctaagaagcagataaagaagaaactatgaaagactgaggaggaggcagaaatttaggatggacagatgaacaattttaacagcaataacaacaacaaatagaacatcctgatgtccctgaaatgaaaggagggatgcagttaaaagaatcaaaagctgaagccaagaataataaatgagtaaaaagtgtgattttaatcattatggaatctttcataacaatagggatcaatgtcagtgtaatggtggtggatagaattcagattcatctttgaaaagaaaatatctcatattgtgtctcrtgattttttggtgtctagttggtcttcttacagtttgaaatttttgatggaaatggagcccagacatattagatttatcacattatagagagaaaaccaataataatggtttatttgtaaaaatgttttctttagtatgtcttagttttaatttgatgaaagtagtrctaaaccatatcttccaaataggaactggtcaaacataccactgatccgactgagaaggcaaatctgaaactggctcttgatgccatgaaggtagggcagattcatcagtaatttgtttgtattttttattcttgcctaaagacaatggaattcaaattgcatwyayacacacacacacacacacacacacacacacatatacacacatatatatacacaaacatatatatatacacataaataaaatattatgacatgcctatgtataatacacatttgtttttagtggagaaaactgkatttttttttttttactggaatagttatccttgcatggatttaattgttagacaacgcataaaactaagaagtatattaaaatcacttagatacaagtataaaaactttcataaccatggggaattatttaatatcatatttttttcccattcttttcatggtgactaatagaaaacgttggcttgtgtaagtcgtaggccagctggtggcttcagaaccccatgtaacttattttcctcatatgaggatatctgctaggtttacccttgtggatgctatggcttcatacaagtgaatttcagtttgttcagttttcaggaaaatacgaaaattatgaatagaaaagacagacattttgaacatactggggaatatgtaaaacctcagtttycacattatgttaaataaaaatgactttgaaacgaaataatatttgccaataacttaaagcgtaggcaaatatttgttctttaaaacaaaatggcaaggtgaccctgctcagagcagtgcataattacttaactgtgtccttgtaccaattcgtgttagcttcgctgtttggctgattgtctaccactaacaggaaacaccacataattatttattattattattaaaaagtcaaaccaagttccaaattttaaagaagtcgtttatggatctatcctatgaaaagtcagacttccatttagaacaaagttaggaactgctttttgcagagttctgtccctactgttgcagatgaatttaagagggtagagaaaaaagaaaaagagctcagaaaacaggaaaatctggagcacatgtaacaaaaatagctagttacagtatggaaagattagctaatgtttcctcaaatatgagaaaagacattttaaaataggtgaaggcacatggaaagacacggccagcattttatgttcactttaattcatgaattaaatttagttccagcatgttgtgctatttagttcctcacctctcctttacttctcctgaatccataaacgggttaactctttaaaattgaaccggtttccttgaccgaatgctctcaggaaccaagaagactagccgattgcaaaaataaaacagtcttgctagattcattatctaacttttggttacttttctcatgctaatcgttcatgattgcccttcttctaacctgtgtaaaaatatcatgctctcaaggtcagtaattaacgtgcttggaatttctattcttccgacctagttttctttttgttgctctattgtggtatattttgttttgtcttttaaggcaacaacatcctgactcttctcagtggtgtgacaaatgacagctcttcagtcttcccagctgtacttcagacattttaaaattgcctctgtgatgcagctttgattgactgggcattcattttactgtctttgaaaagttacagtggttacttttaccactaatggaattaatgatgtgttttctttcaaagcagtttgcatctctaatcttagtgtgccttctttttctacccttttctttattgtctaggacttggcacaatatgtgaatgaagtgaaaagagataatgagacccttcrtgaaattaaacagtttcagctatctatagagaatttggtatgtaattatctttccatccagcttcccctcacccccacatcaacsacattctaggagttgttgttgaagaaaacatagtttaccttcaagtttctactgttggaggttgttgccagtccctttgtttggcagtgttcatgtgggtgtctgagggcacctgcaacctgcttgtgtctagggactttgtgatggcttgtccctcttaccttagtcacactctgcctcttctcccagcagtctgaatctaaatataggagtccactttttttttcttttctttccctcatccccctacatactcatggctgattcctattcatttattcattttacatatatttgctgtgtgactattatgacccagacactttgcttggggctgggactgtaactgtgaacaagatggtctcaagattgaggagacagtttaaaaaaaaaagagttaaaaatgccatattgagattagtgctgtgaactggctgctataactgaggattacaaggggagtcctagtttagataagttggttggaaaaagtycttttaagtcatttgaactgagacctagcagataagaagcagccagccacaygaagatctaggggaaagtgacccaggcagaagccgtagcaggtgaaatgctcagagttgggcaagaaccaggtgtattcaagaagctgaaaggtaagagtggctggaaatggagagtgaagggaaggatggtgggctctgagccatgaggaatgggcagggcaattacataacacagccttgtaggccaatatgctgaattgggattttattgtgactgcagtgggaagctrttaaaaggtttctwtcagggagtattacaacagactgattgacatttcaagaagaccctgtragcaggcagcccagccagcaagctgttgaagtggtttcaagagaggatgcagccctggattaatctgtgggcagtgcaaatagagatgagtgaatttaagatacatttttggtagagcagtttcatcgctgctttctctgaaacattgtgaacctgtctctttcttttcacacatgcagccacatacccatttcaggacaccatcatctgccagttttccagtcacagtagcctctcatcatctcttcatatagttgcatttccaaaatgtggatttctcaatttactctctttctcaaatttgtcaagatttttttgttgttgtcttcaagattcagtcaatattccttggcatgatatttaaggtcctcagtgatctggacttaagctattttcctgaacccctccagctaataactgcccgtaaactttacattgtggatattttgctgtattacaaggtctccaatttgacatacgtttctacagttctgccttcaattgtaatctcagagcctagaatgtttttttcctattccctatcaaatttattcaaggtgcatctaaaataaatcccttttcctaatctcctattatttttcctctttagaattccatagcatatttcttggacagctgtgtagcctttaaamaattgtggtaaaatatatatagcattggccgggtgtggtggctcacacatgtaatcccagcactttgggaggccgaggcgggcagatcacctgaggtcaggagtttaagaccagactgaccaacatggtgaaaccccgtgtctactaaaaatacaaaaactagccaggcatggtggcacgtgcctgtagtcccagctactggggaggctgaggcaggagaattgcttgaacccaggaggcggaggctgcagtgaaccgagatcatgccactgcactgcagcctaggcaacagagcgagactctgactctgtctcaaaaaaaaaagtgtgtgtgtgtrtrtrtrtatatatatatatacgtatatatatatatgtgtgtatatatatgtgtgtatatayayacacacacacatacatacacacacacattaatgctataaatatatatagcattaatttgccattctaattattttcaaattagaagtgcattcatgatgttgtgtgaccgtctccaaaacttcatcttgcaaaactgaaactctgtactcattaaacatgaacttcccattcttctctttccctggcccctggaaactaccaatctactttctatctctgtaagcttaactactctgggcaccttatataagtgaaatcatacaatatttgccatttcatgactggctttttttacttagcataatgtcttcaaagttcatccttgtagtagtcatgtgtcaacattttatttttttgatttccatttgtttaaagctgaataatacatcattttatataaatacctcactgtttttcattgatgaacatttgggttgcttccttctttcagctattgtgaataatactgttatattattattgtcacaggtgtaccaatatctattcaagtgcctgctttcacttcttttagttatatacttggaagtggaattctgggttgtatggtcattatgttaatttattgaagaattgctataccattttccacagcagctgccccacttaactttcctactaccaatgcacaagggtttcagtttttccacatccttaccaacactcactattcggtttgtttgggtaacagccatcttaatggttttaaagcaatatctcatcgtgggtttgatttgcattttcttaatgactaatgatgttgaatattgtctytgtgtgtttgctggccatttgtatattctctttggaaaaatgcctattcaaatgctttgcccatttttgaatcaagttgttttttgtctttgtgttgtagaagctctttatttgtatcccagatatcaatcccttataagacatatggtttgcaaatacttttcttgtgtctgttggcttttcactctgttgatattgtctgtgaggcacaaaagtttttaattttgacaaagtcccatttatcaatctcraagaaataattgctgaatctattgtcataaagtttttccccattttcttgtaaaagttttatagttttaactgttatgtttgggtatttgaaacatttttagttattctttatttatggtgtaaggtaatgaagggtctacctttattcttttacatgtggatatccagttttcccagcaccatttgttgaaaaggctattctttccctatttaatggtgttaaccttgttggaaatcatttgaccatatatgtgaggacttatttctgggctctctactattctgttggtctatatacctgtttgtatgccagtgccgcatgattttgattattgtggctttgcaataarttttggaaacaagtcagtaagtatgagacttccagctttgttccttttcaagattgttttgactattcagaatcccttgagattccataagaattttagaatggaattttctatttgtgcagaaaacatcactgggattttgataagatacatttatttttatatttatagtgttaatcacacatctctgccctttattaaaatggaatttctgaaygttagtgattttcagtcaattcttttttcctctagcgtgtacagtaagtgttcataaacacttaaaaataatttagttatcagcctctgggaaaatagctcaytattttaaataattaactcagagcttttcgtccttgaggtcctagctcaagaaagccagcctggacttyatagaccaaattagcgcgcgcccccccgcccctttctgtactccttcatggcaattgtgcgtttgtaattgcatgcttctgtgaatatttgttcctccactgsgcagtgtgcttcatgagggcagtgtctgtatcattttgccgtacacctgttatggtggttggcacgtagtagatgctcaaaaaataytaattgccgaaccgtctcgtaatttggacccttccggttgagtctttcttttcatagctaatttcccctttaagaatatatactaattaaaatcaattgatgtccttgacataccccctgggattacagaggacagacttatttgtcatgtagacctgagctttttagagtaagtatgctttaaaagtataaaaaatggtaacattttaatgtaataaggtagttgtcttgagtwaatatctctactaatatttgttttyattttcatgtgattatgaaaaactctgacatgtgcattttatattttagaaccaaccagttttgctttttggacgacctcagggagatggtgaaattcgaataaccactctagacaagcataccaaacaagaaaggtaagaaaagaagaatactattttcaaaataagtaattagtgtcagaaaactgagaaaaccttaaagacaatttttccagtgtgaagtagggggaaaaaaggaagaaatacaaggagacagaccaacccatgatttctaaattttttaaatctagattatcttaggtattcccacctgggttctggtatctattagtttgtctaagttattaagaaggaagtaacaagtatagatgatcagctaggatacattaaaatgagaagagcgataaagtaagaacagataactaccataaaaacataattgaatttttggaatatatttttaaataaccaaaaataatagaaaaatgccctaagaaagaagattaagtgagaatcacgtagtaatattttcttgagggaaatttgcagatgtagttcttgaagattagtaagcttggcccggagtccttaattatgtatatatgtaatcatcaaacagaggtttttgtggttgacaatgattgttttctggaatctttggagaagcgaaagccagtagggggcagcatcagctcttgcttcttcctcgataaccctggctccayaggtcctttaaacctctctgggagaaatagacgttaaaagtgatgcaagtgttacagccctgtgaatgtgtcattatcattgtgtataaaaaaaatgtgtgttaatcactgagagtttataaaaatacacaagtattggtattggatgatgtggttataaggtttattttctcccccaagttacgttgttcttaataagaaaaaagaaatattaacatggaaatttcaccataacgttttcagtttacacttggctcatataccattcagtttgggtttttaggtggccaattaaatcatgaggaacaatatagagggtaaaagcacagtttccaaaattagacctgtttgtgaatcctgttacatgcctcactagcagtgtgatcttgarcaaattatctaacttctctaagcctcagtttcctcctcaataaaatgaagatggcaatgataccttcccagcatgtggtcttggggatttaaattgagtcatgtttgtgaaagggatgaacacttctcaaggcattctggctgattcctagtaacttcagtagaagctgctacggatgtcattaatattattctataggtttttagcttttaaattaaaaaagataattgctcatgaacaaactttatggcttatctcacttggccctttcaacaactctgcagtgtgcattttactcttactatgatttttgcccatttttaaaatgagggaaccaaagcacactgaggccatttacaaggtaaagggaaattccacacacagttcttataacctcaaataccccgttgttttcagtgtatgatactacctgttgtctttaatgcaaagaaaaaaacatttggttgctttatacccaaaaaaattaataacccatgyttctaaaccatttaaaatcaatcaatcaatctctttttcccaggcatatcttcttatttgatttggcagtgatcgtatgtaagagaaaaggtgataactatgaaatgaaggaaataatagatcttcagcagtacaagatagccaataatcytacaaccgataaagaaaacaaaaaggtgactttttggaaactaataactgtaatttacttataatcttgaacattaaggaaaagtatgataatacrttaatgtgagatatggcttatcaatccagatgtttttgtttctagagattgattaggtacataactttgtgagaaataactggataatgccacagccagatctgatcatttctaatgccctaatgatccagataataaaacgcatttggcatagaaattgttatagatatgaagttgactacaataagcttgattgttcagtttgtacattgataatattgtgaggagtttttggatagttgtggtattcttgtgaatttagaaacatgttattaatgatacatattaatctaaggaatattaattttaacagtggtcttatggcttctacctcatccatacccaaggacaaaatgggttagaattttattgcaaaacaaaagatttaaagaagaaatggctagaacagtttgaaatggctttgtgagtatttctatttttaaaagtgcttttatttttactagttaaatcacttatgaataatgaacaaccaataagtgtactctaatgcttgtagcatgtataatgtgtacagcgacgggaatgtttttgctgtgagcaggagtgctactaggctgctggctgcttgataactttggtctcctaggagaggagttttgttgaattccttcaaaaagaagaaagagggagctctaatcttctgtttgactttcttataggcatgttttagttctttagctctcagcagcccaagaaaatattaattattctaatgataaactttttatgtaataactatatttttaaattatatacctttaaatagaaatgcctccaagtgtacatacacaaacagatatgtaaatgcatatatcttatttttaatagaaagattgaattattctgttttaactcgcttatttgaatcttggctaaaatgcttcgtgtatttaaggaatgctttaagggcttgatttctttaagtggcttttagttccrctgaggaggaagctcaacaaagaggtagaaaataaatcaaccctgtttcaaaaggaatggcattctgagacgtaataaccaagaacaggtcattataggtgtttctttttagttttgatgtttaaggattgaaaggtacacaatgaccctttttgtagaaatatataggataccctgaaataaaactgttagcaaaaggggaaattaaggaaaactacatttggaatttgtttcatttgggttctaagattatataccatttgttgacaaattctgtcagttttttttctttgttttaagaaatgctcatgttaatgtaaactagaggtaggaataggatgttttattgtggttctgaaattaggaaaataaagattctcaaggttattttatctaacattttaagagacaggattctatagccaaactatttacgcttataaagattatttaccagttgttgacaaattctatcaattttttttccttgttttaagaaatgctcgtgttaatgtaaactagaggtgggagtaggatgttttattgtggttctgaaattaggaaaataaagattctcaggattattttatctaatattttgaagacaggattatatagccaaaatatttaagcttatagtcaattctgggttcatctattatcactgccatkaactggctgcataatgaaagctaagttatttaacctctcacagcctcagtttcctcatctgtaaaataggaatgatatttatttcaaattctaggtaatatgtatcagcagagagctagccaaatagtrcaatagcagctacagctatgtgatattgaacaataggtgatacctattattattgctattattattaataataattgcatttgggattctagtatacttacaagacttataaaactacataacatattctagtatactattttttctttttaggaagtcacttggagttaaacaatttgaattggagtgataggatgattgggttagtggtaatatgcaaagacagagctgatctcgagcctttgctcttatatgctaggcttttttttttatgggtttcgtttggctrtataatcttcagatgagtgaaggaatgtctgcagagaaggaaattgaatttcatgtcctagagcaggcaggttccttggactgtatgacaggcatgtcagttactattttgttcagttgccataaaacaaacagttaatttgtggatatgagagacttgatggccaggtgtgatggttcatgcctgtaatcccagcactttgggaggctgaggtgggcrattcacctgaggtcaggagttcgagatcagcctggccaacatagtgataccccatctctactagaaatacaaaaattagccgggtgtggtggcacatgcctgtcgtcccagctactcgcaagactgaagcaggagaattgtttgaacctgagaggcggaggttgcrgtgagctgagattgtgccactgcactccagcctgggtactagactgagactccgtcttgaaaaaaaaaaaaaagagatttgacaagataaatactattgtcagcatttgacttctctccttaagagtggttaccttgtagtctgagatagctgctagagctctaggtataaaatttatgttctaggtagcagaaagtaatcccacttttatggattccttgtagaaataccactcgcttctgttacataatactgaccaacgtatagtcatgtggccgcacctgccgagggaggctggcaaataaaacctttattctaggtaggattcttcctggctaagaattaaggttcttttactatggaagaagggaggaatgggtagttgtaggcaaccagcagccaccgccttacaggtttatacatataggggtatgtacggatttaaattgttccaccacaataaggatggctgcagcacatgcacagaacctgggtttcttaatctttgattgttttccaagcatctcagcaataaaataacacaccagtagaagtagtttttgttgttttagagttccgttgaatgtctatgcagatattgggagggtagaagtatctttttggagaattgctcagagttgaagttgagggcttctataaataagggttatattatatatggtwaaataaaatctgagcaggcatcagaatattccattgttttatttccttcttctttgaagttcatcatgtaggaaagccctgataatgtctgcttccagctttgtaagacaggttttgcctgtctgatgctcataaaaatagaataatataggtaaatcctgaagtttgattttgcctatggttcaaattttgctgcttatccattattaaatctgtagtactcctttttgataagtcayrgagaataaaagaaaataactcctgcagcatccatgacaatgcatgaagaacagcaagccttgtgtatctccacaggatggcttcttcccagtgtctttagtatcaacacgagtcccttgagttcccctagagtgctctggactattgctttaaggaattctgaaaaggaaagggaggcattggtgagagggtggagggaaatcaagggagctgatatttttaagagtgttgaaatgcttgccatttctatttacagaagatggcaattctgtttataggatgattggatcatttttatttaaaattattgcaaatcactgttaaggcacttaaaatactatgttaagcctctaaattagggctcttaatttagaacattaaataaggccatggaaaagcatgaacactaatgaacagtaagtatctggtgaacataaatattctccccagaggtgacctaaatctcagcctctgtctctcgcagtcatgttctctgaccttctttggccataaccacttccagcatttaaaatatgcagtgaaccacattagaacctgacagacctccataggaaaggctgaacaaagagaaaagtagcagtgacccacttggatacggcaggaggattcccccccgcttttttttttgtgataagtggtagcaggactgatatgttcttgaggttgttggaaaagttattgagccaaatagaccaaatagagtgcaagggctgtagttctggggggcataatgtaaataatgtatttaaatctttaagaggctgatcgatatgcattgcttacttttatttattccaaaagggttttattttttttttgtcactaactgtctctcacaattccatttagtcatatgtgaaacaggacggcaaatggttttattgggttaaactggttttcataatcatgctggaaaatatggatataactgcctatagcaatgttcaaaattttgttaagaagctatggatatgttttccccaaatccaatatatccattgtgcttttatgaatttttctatgagatttaaattaataaaccttgtcatacccgttttgtagctcaggaaactagcagtcacaggagcatttgagcaaatgtgtacaagtttgatgctgtatcatttacagtacagttgaggatctcagttcacaggagtttctttatccataagggtgctaaagtaagcaactggactcagatcttggcatctaaaactggagtccaggttttttgtgttttttgtttttgttttctcactgtgaataggatctagcaatcagacagttttcttaaatgtcccaggaataagttaaacctgagtaaaaaataaagaagtataattgtatttaagttggtgcaaaaataattggggctttgccattacttttaatggcaaaaaatgtttgtttgtttttttwaaaaaagaaaagttagcaaaagaaaaggtaaaataagaggcataccataagcatcacatgtggtagaaacaggtagattcagaattagccttcatagtgttttttgaagggaaatgaaaggtcctcttgcctagaatttcttctgaccgaccttggcccagtttttgaaattctaacaattcwcatttacccccttgaatgaagaaagactctttgagatgcatatgccatcactactgygaatatctaagatttctcgactgtgtaataagtgcctggcacagttctacatggcttacctaagggaaaatagcatagaggtcaggcctgtctactgaaatattagcccaggatgtttatcttttaaacacaaggactaatggtagtgggacgaagagaatgagaatgggggatggagattctagagctctggagggactctgggaccaggatgyactatcctgttggtcatccggagcggcagcccctgcctgagctttgcatttcccagaatgagccctgagaggaccttcactgttgggatggagcagggagtgagaatgtagccgttaagctccrcaaatcacatttaatctgaggcacagtgtttctttctaatttattccccatctacttccagaaggaatttgaagtcactcacaataaaaagcacacatgctgcagaattaaaaagaaaaatttaaataatccgaggtcaaatagaacagtgtttccaagtattatcttcaaactcaggctccactagacaagaatattttcttgaagtttactttctgtagtttatatgataaaaacaaaaagcatgtttctcacatttcaaayctagagttatatttcatcaaacataatttgttttaatctaaagatattgctcagatattttgaataccagagagagaattaccagaggaaattttattcattctgcaaatatttatcgtgcacttgccttgttgccagacactgttggaagccctgggcaaataacaatgagggagmcattgcaattgaatttaagtattattatttctaaatataataatattctgttaatatataatggattaagtttcaggactgaactcttgatatttctattcaaatcatctcttcctttaaccccatttacttaaggatcaacatacagagtcccaagaattacgcttgatacagccccctctctccacttgtaatcaatctctcaccagtctctgcacatcaaatctgaatagctgcctgaactctcccttgccacccctggtttacgtcttctgcatgtctctttagctattccctacctcttcccaaccagtccttcttcacaagcatcagagtgatctgcccctcttagaaagctctgttgggtgtttattgtacttgctataacaccagagttttcgctaggatggaagaaggccctgactggttttatcccacccatctttccagccccatctcctatcagttttccctgtgcttgtttctttttttctagttagattgtgtgtttcagttcttagagaatgcccaggcctcagatattcacacataagctttccctgccaggcctggtctttcctcctgttctttgagtagctggttctatatcctgcaggtcttggctgtaaatgttactttgtgagggagatctctcctgacccctatgctaagtgagtaataccaccttttctatattctctcacaattgtatttatattgccagacaaaaattatccaagcatcctgtttactgccttctcttcatccaacaatccctctgcctgttagaatctgaggtcgtttcagttttacttctcttttctcctaaagaataaggattctgttttgtttattggaagggaagttaagttgaacctcatggttagagatgtgggaaaggggaaaagaaagcctcgtggatctgggaatggaaagaaagtattgggtttgtttggtgtgagtaaggctctgggatagctatggcatctgagagatttgagaaggggaaaaggccttttgagatgcaggtgtttggaatctcaatttatctttcctttatgttctttgaaatgctaagtaaagaatgaaattatcttttgtttattttggtgtacctttagtggcccaaggctgaactgtctgggcccatggaatatggggttgccattagatctgtttgcctatttaatgtctgtttcttgcatgagggcagggatcttgtccctgttgttcacatgcgtgatctttcatagcacagtatcatatttttgttgtaaatttgaaattttactctgtaagttttctgacaaccaagacaagtgggaaaaaaaaagactygatgagttgtggcattcttattgtgtggcaaaatattacaacagccctttggaggagagagtttttcctgtatggtaagaaggctatatagtgtggatccttaggtaggagacattgaaaaacatgttctctaccagcagcattagattttttgatattcttgaagttgatgccatagatgagtatttctcttttatgtaagccttcaactatgtaattgcagttttgctaaggcatttttatagacacctaacctgatgctagcccttccagatgtttctttctagtagtctggcttgcttggataaaatttttggaaccaagcaggatgggcaattctcattttatctagcctgtcatttaagtagcactgatctcactcatttgtatattgaaaattgtagaaaatatgcaagtcatatggtatttggggcctccttgctccttggagatgtagacagaggttagcccagattccagttttagggtctgaggtgctcaaggcccacctacattctcatatttctctctctgtccatgttcttgattcactgtggcttttttggtttttgtgtgtgtgtwtatatttttttaattttcccacctgtcagacccaggagaaaggatctatgccttttccattttccacctgaaatccattcacagtctattttttgtaatgccaacaggcgtcacagtggggcttatgtcatgcatgtgttccctcggctgtttcactggtctttgacaccctcagcagcacctggagcatgaccctccccaccctgcactgctccctgcagaggaccagcaccccttgcctcaccaccccttcagggagcggctagtcaggccggacagagtgcctcccacacccatcctgggatttagaggaataaagccatgtcatgttacccagcaattcaaaattaagctctccagtgagtgtttcaaaagaaattggtctttgttgttaatttttgaaagacccatgtttctattattaaaggtttggcaacaaatttgacattcaaatgtgaaaatttaaaagattcactttgttaatatttttgcccagatggagatgcctacagtatctgcatgaagctgtcggagttctaaagcaggcctaagaaacagcaactactaccgctatgagtactgctagtcctctcttcccttcctgtcccctcctctctcctctttttcattttcttcatcaggaggtttgtttggatcttctcaaatgtttaaataagtttctgttgagacaacaaatttcgtctcttagaacaagggccagcaacattttgttgtagggggccagagagtaaatggtttaggctttgtgggccatatggtatctgtcagagctactcaattctgtcatagttaactacgaatgcagccatagattcacataaatgaatgagtgtggtatgttccagtaaaacactagtggttgtatttggcccgtgggctgtagttagtgacccctgtcctacagcacaaataagatgacttaggcctagagaattagttaatatatgttaccacaaaatgatctcagctataakgaaaccacgctgtggccttttgtagaagtgtgattttttttttcttttatttttagtatcagtgattcctgcttaggctatcatgatgatttagctccaaaatgttttttaactccaccaaaaaaaactataaacctggatgaattatctatatttgtcattattattttactgtctaattgaatattaaaaatgtctgctcacagaacagactgtatctattcaatttctagtttcattaagttttatcacatggtttattgaaaaggacaggtcccayggagtccaggccagtagcagccatgtagtaactttttctctattcagtagtcagccatatcaacaagaagcatttttttttttttttgagayggagtcttgctctgtcgcccagcctagagtacagtggygcgatctcagctcastgcaacctccacctcctgggttcaagtgattctcctgcctcagcctcctgagtagctgtgattataggcacgcaacaccacacccaggtaatttttgtatttttagtagagacagggttttgccatgttggccaggctggtctcaaacttctgacctcaggtgatccgcacatcttggcctcccaaagtggtgggrtttcaggyrtgagccaccatgcccagccaagaagcattktttaatcagtgatgctctttgtgctcttgatgcattttcttcccagcagcaataccatttgtgccygttatttactctgaaatttcctccctggagggcatactaaggaaaaccagaaggggtagaggaagcctgtggtggtatcaagagttggccagagggggagccttcctggatgagctggatgtggggatgacattttgtcacctgctttggcattttcttagtgtccaaagcccgtcagtgtctgtttggaaactggaggccttactggcataatggccaaaatatgtctataaactgtctgtatatttgtcagcccttttggattgttttttgwtgagaaattattttctctaaaaacctcacattcttcctccttaaaatgcttgcatgaccagttwttaatgtgaagaatttgtttatgggtgcagaatccatgccggcaccatcagttgcctctgggctgtgctgagagtctcatggtgctgacctattcacattaatctcccaagttgaagccagctcaactctccctgaatctaatgtattgtctataacctttcaaaattggcagttaagtcaggatagggaactatactggcagcaataaaaggaagtaggacacgggacagtgctcagaaaaatcacagctgtcatgaaatggagtctttcaatagcctgtttgatccggaaacatgcgaaagtatttcatgcatgacaaaggattagtaartattaaatagtattcttgttttgttattgcctagtgaggatcaagctctctcatttttctctggttatgtttaatatgtatttgatacttcttggcattcttgaacatgcttatgaggaaggagaagtcacaggcaggaggaagagcaaaggatgatatygaaatttccatcagcaaataagcattaccctggttaaaactaaatgcaaataaaattagtaagctgaattagtgtttgtttccctgaggctttataacagagcctttcatctgttgttgtttttttctttttctttttaaatgaacaataatagtacagccagagagtttaacctgacagtggtggttactgtgctaytgtctccggcttgtctgagtagtgtagagatttgctcaaagagtaagattgttttggagttgtttgttgtactaagtcaacttggtatatggtttcctccaagtatatgacaaagtctccactgcagtgaattctatgataataatcaagctttaacctataagtctaaacctaacagttagtgtgacatgtactatttttaggctgcttcttgataagaaatgattagatcacaagaattactactttgggctatacaacacaaaataagctgcgattggaaactggcaatccttgcaatggaaacgatgggagaaacttagttttttgtctttatggggcagtagacaatagcaggctagttggggagatggcaaggaagtcatacttgaaacaatttttgaataagactatgtattgtgcatttcacaatacatgcccaggaagtgttttacacactaggggtagagtgatagacaagttcacttctcttgtgaagtttgcattgtaaaaagacaatatattttcttttcttttcttttttttaatatgctttaagttctagggtacatgtgcacaacgtgcaggtttgttacgtatgtatacatgtgccatgttggtttgctgcacccattaattcatgatttacattaggtttttcwcctaatgctatccctcccccattccctcaccccagatgggccccagtgtgtgatgttccccacccttcgtccaagtgttctcattgttcaattcccacctatgagtgagaacatgcggtgtttggtgttctgtccttgcaatagtttgctcagaatgatggctccagcttcatccatgtccctacaaaggacatgaactcatccttttttatggctgcacagttattccatggtgaatatgtgccacattctcttaatccagtctatcattgttggacatttgggttagttccaagtctttgctattttgagtagtgccacagtaaacatacatgggcatgtgtctttatagtagcatgatttataatcctttgggtatatacccagtaatgggattgctgggtcaaatggtatttctagttctagatcattgaggaatygccacactgtcttccacaatggttgaagtagtttacagtcccaccaacagtgtaaaagtgttcctatttctccacatcctgtccagcacctgttgtttcctgactttttaatgatcgccattctaactggtgtgagatggtatctcattgtggttttgatttgcatttctctgacggccagtgatgatgagcattttttcatgtgtctgttggctgcataaatgtcttcttttgagaagtgtctgttcatatcctttgcctactttttgatgggttgtttgattttttcttgtaaatttgtttgagttctttgtagattctggatattagtcctttgtcagatgggtagattgcaaaaattttcttccattctgtaggttgcctgttcactctgatggcagtttcttttgctgtgcagaagctctttagtttaattggatcccatttgtcaattttggcttttgttgccattgcttttggtgttttagacatgaagtccttgcccatgcctatgtcctgaatggtattgcctaggttttcttctagggtttttatggttttaggtctaacatttatgcttttaatccatcttaaattgatttttgtataaggtgtaaggaagggatccagtttcagctttctacatatggctagccagttttcccagcaccatttattaaatagggaatccttccaccatttcttctttttgtcaggattgtcaaagatcagatgtttgtagatgtgtggtgttatttctgaggcctctattctgttccattggtctatatctctgttttggtaccagtaccatgctgttttggttactgtagccttgtaggatagcttgaagtcagctagcgtgatgcctccagctttgttctttttgtttaggattrtcttggcaatgcgggctcttttttgtttccatatgaactttaaagtagttttttctaattctgtgaagaaagtcattggtagctggatggggatggcattgaatctataaattaccttgggcagtatggccattttyacgatattgattcttcctatccatgagcatggaatgttcttccatttgtttgtgtcytcttttatttcgttgagcagtggtttgtagttctccttgaagacatccttcacatcccttgtaagttggattcctaggtattttattctctttgtagcaattgtgaatgggagttcactcatgatttggctctctgtctgtaattggtgtataggaatgcttgtgatttttgcrcmttgattttgtatcctgagactttgctgaagttgcttatcatcttaaggagattttgggctgaggtgatggggttttctaaatatacaatcgtgtcatctgcaaacagggacaatttgatttcctcttttcctaattgaataccctttatttctttctcctgcctgattgccctkgccagaactttcaacactatgttgaataggagtggtgagagagggcatccctgtcttgtgccagttttcaaagggaatgcttccagtttttkcccattcagtatgatattggctgtgggtttgtcataaatacctcttattattttgagatacgttccatcagtacctagtttattgagagttttcagtatgaaggactgttgaattttgttgaaggccttttctgcatctattgagataatcatgtgatttttgtctttgattctgtttatgtgatgaattatgtttattcatttgcatatgttgaaccagccttgcatcccagggatgaagccaacttgatcttggtggataagctttttgatgtgttgctggattcagtttgccagtattttattgaggatttttgtattgatgttcatcagggatattggtctaaaattctctttttttgttgttgtgtcactgccaggctttggtatcaggatgatgctgacctcataaaatgagttagggaggattccctctttttctattgattggaatagtttcagaaggaatgtaccacctcctttttgtatctggtagaagtcggttgtgaatccgtctggtcttggactttttttggttgttaggctattaattattgcctgaatttcagagcctgttattggtctattcaggaattcagcgtcttcctagtttagtcttgggagagtgtatgtgtctaggaatttatccatttcttctagattttctagtttatttgcgtagaggtgtttatagtattctctgatggtagtttgtatttctgtgggatcggtggtgatatcccctttatcattttttattgcgtctatttgattcttctctcttttcttctttattartcttgctagcggtctatctattttgtgatcttttcagaaaaccagctcttggattcrttgattttttgaagggttttttgtgtctctatctccttcagttctgctctaaccttagttatttcttaccttttgctagcttttgaatgtgtttgctcttgcttctctagttcttttaattgtgatgttagggtgtcgattttagatctttcctgctttctcctgtgggcatttagtgctataaatttccctctacacactgctttaaatgtgtcccagagattctggtacgttgtgtctttgttctcattggtttcaaagaacatgtttatttctgccytcagtttttaatttacccagtagtcattcaggagcaggttgttcagtttccatgtagttgtgcagttctgtgtgagtttcttaatcctgagttccactttgatcacactgtagtctgagagacagtttgttgtgatttctgttcttttacatttgctgaggagtgtttyacttccaactatgtggtcaattttggaataagtgtgatgtggtgctgagaagaatgtatattgtgttgatttgtggtggagagttctgtagatgtctattaggtctgcttggtgcattgctgagttcaagtcctggatatccttgttaaccttctgtttcgttgatctgtctaatattgacagtggggtgttaaagtctcctattgttgtgtgggagtctaagtctctttgtaggtctctaaagacttgctttatgaatctgggtgctcctgtattgggtgcatatatatttaggatagttagctcttcttgttgaattgatccctttaccattatgtaatggccttctttgtctcctttgatctttgttggtttaaagtctgttttatcagagactaggattgcaasscctgcttttcttttgctttccatctggttggtagatcttcctccatccctttattttgagcctgtgtgtgtctctgcacgtgagatgggtctcctgaatacagcacactgatgggtcttgtctctttatcctatttgacagtctgtgtcttttaattgggggattaggccatttacatttaaggttaatattgttatgtatgaatttgatctgtcattatgaggttagctggttattttgcccgttagttggtggagtgtcttcctagcattgctggtctttacaatttggcatgtttttgcagtggctgttaccggttgttcctttccgtgtttagtgcttccttcaggagctcttgtaaggcaggcctggtggtgacaaaatctctcagcatttrcttgtttgtaaaggattttatttctccttcacttaggaagcttagtttggctggatatgaaattctgggttgaaaattctgttctttaaaaatgttgaatattggcccccactctcttctggcttgcagagtttctgctgagaaatccactgttagtctgatgggctttcctttgtgggtaacctgacctttctctctggctgcctttaacatgttttccttcatttcaaccttagtgaatctgacattggtgttcttggtgttctctgtatttcctgaatttgaatgttggcctgccttgttaggttggggacgtcctcctggttaatatcttgaagagtgttttccagcttgattccattctccctgtcactttcaggtacaccaatcaaatttagatttggtcttttcacatagtcccatatttcttggaggctttgtttgtttctttttacttttttttctctaaacttctcttctcgcttcatttcattaatttgatcttcactcatttataccctttcttccacttgattgaatcggctaccgaagcttgtgtatgagtcacgtagttctcatgccatggttttcagctccatcaggtcatttaaggtcttctctacactgtttattctagttagccattcgtctaatcttttttcaaggtttttagcttcgttgagatgagttcgaacatcctcctttagcttggagaagtttgttattaccaaccttctgaagcctacttctgtcaactcatcaaagtcattctccatccagctttgttccattgctggcgaggagctgcgatcctttggaggagaagaggccctctggtttttagaattttcagctttactgctctrgtgtctcctcatctttgtggtttttatctmcctttggtctttgrtgatggtgacctacaaatggggttttggtgtggatgtcctttttgttgatgttgatgctattcctttctgtttgttagttttccctctaacagtcaggtctctcagttgcaggtctgttggagtttgctggaggtccactccagaccctgttttccttggtatcaccagcagaggctgcagaacagcaaattttgtagaacagcaaatattgatgcctgatccttcctctgtaggcttcatctcagaggggcatctggcwgtatgaggtatcagtcagcccctactrggagatgtctcccagttaggctacatgggggtcagggacccacttgaggaggcagtctgtccattctcagagctcaaacaccatgcygggagaaccactgctctcttcagagctgccagacagggacattttagtctgcaaacgtttctgctgccttttrttcagctatgccctgcccccagaggtggagtctacagaggcagacaggcttgttgagctgaggtgggctccacccaggtcgagcttcccggccactttgtttacctactcaggcctcagcaatggcagatgccccttccccagccagtctgccgccttgcagctcaatctcggactgctgagctagcagtgaacgaggctccgtgggcatgggaccctctgagccaggcgtgggttataatttcctggtgtgctgtttgctaagaccgttggaaaagcgtagtattaaggcgggagtgtcccgattttcctggtatagtctgtcacggcttcccttggctaggaaagggaaatcccccaaycccttgagcttcttgggtgaggcgatgccctgcccagctttggctcgccctctgtggccgcacccactgtccaaccagtcccagtgagatgaaccaggtacctcagttgtaaatgcagaaatcacccgtcttctgcgtcagtcacgctgggagctgcagaccggagctgttcctattcggtcatcttgaaacggctgcccaagacttatattttcaagtcagcattataatgttgatgcaaagcagtgataaattgcaaggtatatgaaacagattatactacacattgttttgatctgtggmgaatgggattagaaatttcaatgtagaaaagtcctgtgcatgtgatgctgatggacaaattttcagagttattgggctcctgggcatctaagaaaggcatttgcaaccaaatattttttctcttcacttagaagtaagttgttgtaagttaagtgtatatgctttcgcttcaaataattaggaaaaaggtgccatttgacaccaatatataatttagaaaaactgatttgtcatagttgttttttcccatcgattctgaataccttttcataatggtcaaaatcttcagaaactatacagttktataaattcatacattctctgaagaggagattaaagctcctccattttaacaattcactgcttgagtctttcgtacaacttctttccaagtatatgctgtgcttggatgcctcttgtgatgagggacggactgcctctgaaattgcttgttttatctttggttagctttcactgtagaagattcttccttataatgaagaagattttactatagaagattcttataataactggagaagattcttccttataatgagtttaaattctttgtctgttaaagtataatttcctaatatcacttcttgggcccaaatagaacctatctaactcttccttacctggaaatctttcagatatatgaagattgctatccctctaagtccaggcttaaaacatattgttttatgaataaatgaaaagaaacttaatttaggaagattctttcattaacgtagcttaccagtgctaatgaggatcaggtaaaagtgtggatacattgaaagtttcatttcacctcagaattataggcagggtacaatgaatgctagatgctgttgtcctcacaaagaaaagtaaatagaacagtttatctttttgagatgtttagaagtcagtttggagacttctgattgaattgtgcatagcattttaatattctgcttttgagtatttaaaggatggcttcagattttaatactttaatgttaagagtatttagagtctgggacatgtagtgataattctttgctgttatatcgtgctttacaagtagtttccaaagcatttttggataatgcccaatctgattcttaaagagtcyggtgaggtagctaagaaggtattattccttttaaaaaatgagaaaatagtagagagattaagtattttttcatttccttagcaaatgacagaagctgagcttgcatctcaatctggggctttttctctcataccatgctgcctcatttgtagcaagaacacctactgttgttttctaaagatgaaagtttccttttcagtttgttttataagcaagaggtattcctgtgtagcatattcattcactagatgaaaaatatgatttagagtttaaatacttgcacttatttttcagtgattgctgttgggtaagaatttgatatttttataaaatcaaataataagtaacattgtgtatattattaacaaccatctgtaaggataatttttgcttcaaagaatttccttagagcaaagtaaaccaaatcttaatttacaagttaatttatttcaagattttttgatcactttattttatcacagtctaatatgattttgagccttatatgattaatgcaacggtttgattttatttggttttgtggtgttttcttctcccagttatttagataagattttagtctcagagtttaagttctgcttttagaagtaaaggaactgagaaggaaagcctcatggtctgaggctaagccctggccaattatcagggtggattcagatgatcgttaaataaatatgtgtgtttctttccatccagaactttggtaacattggatgtttttacataagttgctgaaggtatggacacagtatgataatgctgtcatccttctccttcagggtacactttagactgaccattgactagcttctccttcctggggagaaccaaatttgaagtggttatctaaaccatgtgtttgacccgtcacttattaaaatagtagactttcttctaaaatgttcctctaagaaaacactgaagtttgggagttcaaatttttgccctcaaagtagccagactattccattggtcgatggtggtccctgattgtttagtcctgtccacatattgwtatttatctgtaacatcactatctgtacaaagcagctggctctttgaataaagaaaggtaatttcaaaagccacagtgccctacattaatgatctctaaaataaaatttttgactaaaaacaatactctttatcgtttgttatggtaaacaacaaaaaataatttttgtatttattatttttccaatctttccttgtatcagtccaatgagataattcatattttctgacattagcattgtattccaagcacaatgctatgctttggatgctcatcttgttaaataatcacaaaattatgatggagcagtttatcctgttttagcaaatgagaaaattcaggaccagaaatgtaagtaacttgcctgaacsacacagctcatcacagaacagggattccgtacccatgccccttcagtgcaccatgtcgtaggacatccttttycattcttttctttagagagtttgttgtccaaattgctggtaaggaataaaactcatgtttttttttaaactcaggttttctatctcctaaccccaaactatagactttctgcatttttctttgtttcttttcccttggataacaacagcaaccagaaacacaattctctcatctattatcatataccaaatttgccttatgtagtctttgactaatgacttgttggtcagaatgaactcagggatctgttctctgatagtacattaataatatatatgcattaaagcttcttctcggagaatatttgagctttgacatattgaacactggcattttaaattaaagctgttgctgtcagtgcattttaaaaactagatagcttcgaaatagtgtttcatacataacaaaatatacctgaggtcataagtagtttgctaaggcaaaactatgcctggcctggttaattgtagtaggggcttgaatagagttttccaattatcatgacctaaacatctttcagactgagaaaaaaaactaaactgttttgcagggctttgatttactagaagaaacaccatagagcaacctaatggattttctgcatactgtcggagctaggaataatgaatttaaaactattctgaatccttcaagacaggagagtatcaagattaaaatgatacttggtgacaattataattctatagttgcgccctcggcttgcattattgtttcttgtcttgcaaacacttttgtatcagattatattagctaagcagtctttttgcttgtggcattagactcatgcaagtttataagtagtgtgtgttaagcctttccctttgtagagctgatttggggacacggttttacacatatacatatacatatacatatacatatacatatacatatacatayacrtatacgtatacgtatacatatgactgtcctcatgaagattttttctgtagggcagtgtaatagaaagaatccccgattggaaccacagaggtcatgagcaacacccacccaccctcactcctgctattttatagatagatcaattaacagatwatttttccctcaaatgccactatactggatggtctcagacttcgtatccagtcagacccagaagacttcctctacagagtaatttgcccaaagccacaggagtagtaaagagtggaactgagactattaaaggaaccaggtcctttaatccctggtgattcctcttcatttagaacagatcttgtgttagtgagtacctttccctaaaatgggggtctgaytctttgctctatatctttgtcatgaaaatctgccaattccctgtccaggagccagtggatttgggacagaggaggaagactcaaccaacctccagtggatattagcaataggacctgtttttccaccatctgtttgacattaatgtactgctcgctgttgacattgcagatttatttccagcaggccactcctgactcctgaatacttgatactagcatgaaactttctaattgcaggatacagtgaaatccaaagtgagttagaaatttaattaaatttcttgcttgtttaattgtttaatgtgtcgcacagtccagcttgcaattccatattcaattataatgaaactccccttagattgagtttgtcttggggtttgatggtgagtctaaaaagggtattgatgctttaagagaatccttggttttataaaatttcagtgtaagggattgagtgttttagtattaggtttgtattgactcttgatattgacacaagtctaaatgtgcaaagcccacaaaggctaaatcccataggcttatatttaatttaaaatatggctagctggccattttgaatatacttgctaggttgacaatctgaatacttgactgattgggaaatagtcaaatattaattttaaatgttcattagtagactgtttgtaattggtttttaaattcatttggcaaatgagaattcacatttatttaaaattgccaataaacctgatttcataaaggtgtttggaggttaaatgcctaataattaatttatgcctaagtaatatttttaataatttagaggaaagttaaagcagctgagaataatgttaatgatgaaaagtaatgaaggcttcaagattccaagatttaattgtggagatcatattcatcatcttaaaaacagaataggaaactggatggaaaagacattttagtggagcttaaaaaatgctggtcaaggagaacaaaattacgaaagaacccaaaccctatcactgacttggccatgggacccaggcaagcctgtcttcttctctgaaacttaattcatccatacttgaagaggggtttgaaaactatttgtaatctatttttgttttgcatggcaaaagaaggtagaggaagtgtggaggttaatttaattgtgatacaaaaataatgatgtaatcaaatcctcttttatttctacccaaccgttgttatgatgtttttctcttgggcttattctttttttattttcaaaaataatgttagatgattattactcattgtgtgagtgtgtgtgtatatgtgtatacatgtgtttgtgtggatttacacactagacaatgatagcatggtccctttgggaagattaaggtgatgacatgctttaaactttgtgtacccactctgtaaaccatcagtaaaattcaattagcaggctttattccatctgtagaaatataatgatgctaaaataatcaaaatctatttaatcaatttcattataaatgaagggattgcttgcattcaaaatcttaataaaggaaacgaggttggtagtctatgctgattcagtaaaacatatcgtatcttgcaaagccaaagaaattaactgtaaacccttgatcaaaaagcacagaaagtgtgtgatccagagagcttgataactgctagcttttagtgaagaaggctttttgatgttacaagcacaagaagccagagcgttattatgtagataattgattgattaatttaatcaatgactttctcaaagatggttctgagacatgactgggaaaactgaaatgagccagctggccattggcrgtccacacctctccatgaaaagtatctgcagagcgcctctgccggagcacrgaggactttctggcggaattcctgtagcttgtgtgaggatcaaacctaagcagagtttaatgaaattctactttggagtgatttgtttatcttctgtgagcaatttctttctttctttttataggttgattgatttatctgtatgtgtattcctcagtgcttttccttgtctgaaccaaaagtgctttgcaaatatcagagctcagatttttaaaagatcattgatttttttcaaatatcctgaaggtaggctgtcacacattattatttaattctgagatagggatattgatagcataatattaaaatctttcattagagaatttttttttggtctagcaataacctaaattcraaggagttttgttttccttcatctatcagaattgttatttaaaagtacccactacccaggacagtatggttactttgttgccttcaggaaagggaatattgtcattggcttaaaacattctactgtgactgccagatattataggtgcccaggagacccaggaaacaggcctttggttagctactgaaatttgccatctgggcacggtggctcacacctgtaatcccaacactttgggaggctgaggcaggcagatcacctgaggtcgggagtttgagagtagcctggccaacatggtgaaacccatctctactaaaaatacaaaacttagctggtgtggtggcacatgtctgtgatcccagctactcgggaggctgagggatgagaatcacatgaacccaggaggcagaggttgcagtgagccaagattgtgtcactgcactccagactgggcaacacagtgagactccatctcagaaataataataatgatgaatttgcctagcataaccagctcttcaaaagtttggtcaaaagccggtaaatgcttagtattgtgtagacgttccacagtgtccctctcactctctttactttcggctgcatatttccacttgttatcaccatctctgtggaaagctccattcaggatcagcaatcttcttgattcagaggaccattcatgatgttaaggatctgctagtgatgacaccagtcacacagaacaatcatgaggaggaagaatatggggaagtctttaccatttcctcctgggctactgttagcttcttacctggtctccctgctgccattgtagccacctgactcccaactgactgttgtaagagtgacctctctaaaccgacatgcccctctccatggttttatcatttctgattcctttattcactcctgatgtcactgtcttgctttaggtcttcagggtcttctacctagattgctatggtcatctctataactgtctccctgtctctcacctcaccccttcagcatggctgctagagtttcctaaatacaaatatgatctggttatctgcatacagtcctttagtagtcactccttggccacagaacaagatcagatttctggagtatgcacaaatggcatttactatctggcctgtgctcagctctagccttttttttttccccccaccacatccagtgttgcaaccagactgaattccttcctggcagcttccagaacatgccaggctcctttatacctctgcacctttcatcatagtgttctttactggctcgggatctgttctctgctgaggtstgctagggaacatctatttatcttttaagactcagattgaaagcagctatgcccttttcctgtgccaccccccatcctatactgtaggattgtccaatctctctttcattctccaccatatcttacacctttgggaatcactttattaggtttacttcttttcatgtctctatcttcatcctagattgaaagaactgtaaggccagaggccatgtattttttgtcccrgtacaatgcttggtactcatcaggcatttaataaacacttattgaataaaagaatgtctgaagcagctgaataatagtataagacaactttcagattgtaagtgccatataacttcagagaaaggacagatcattatacactacagtaatctaggatgctctcaaagaaaaagtggggacctatgttgcagggatagatcacatttggagtggtagagggaaggaagactattcatgactaggaataactgtttggggctgagacggaggtgaacatttaaagagtactttgaataaatgggtttctttacttatgatgaaatactatgaytggagataccattttcctaattaaaatgttgctgttgttcttcatgactcacatattaatttctatactccttaatattgggttaagagtcaaatcagagttcactctgttagtcgcttcacgagccttggacaagttgcttgacttttctgagcttcaatttagaaatgaaaaaaatggagacataatagctacctcaaaatgtgtattgtagcatttacgatgtgttctctatttatccaatgtcagatatagtacaggacactttatgtgtattaagtcttgtaacctttatgtcagctccattttgattaggttattgtttttgttctaatttacaacagaggaaaaacaacggtaccaccaagagaaatatggaagtatggaagacatcatctcagattgttttggaggttggaaggaacagctcctctgtatagggtggctggcagcagtacttaatggtactagcgcagctttgagttcaagggagagagagttgggtctgctaagttgcgggttcatccatgaagttgttttgtgccctgtgatctaatatagcttcaactcagaagctggaaacattactctggaatcctgtgtctggcagtgtgtcaagcagccaggcccagatggagaatccaggtgtatgttggcaaaaacagggtaggtccaaatggagggtggtggcagactgtggaggacttacttgagggctgagctggtggctgcagcatttttatgggatgttccctatttgtgtgggaagacaaccctgaaggtgaatttgtgtggagagaaaacacagaagggcascaacacagcataagcacaagtcaggggaggctgtgacatcagatgggcgctgaatgcttgtggctgggaggacaggcaaggcccaaaggagtagctctctttttgttgttactgttgttttgctcttcatggataaatttgttctacagcagtttttaagattctattatatgtggagtaccatttatgaggatacaaaatacaaataagaggatgtcctcaagttggatacagatagtgaaacaaartttacaaataattacacaataacatgacgaagtctatagtggagccaaacaaaaaggactgcaggaacactaaggggtaagctaaaaatcctgcctgagagaattaagaaaggcttctcagagragataacatttgagctgggtcctcaagaatgaacaggaattctccagtgggaaaggtcactatgaatgcaatgattagaactacttagtaagcgtacaaaaaaaaaaaaaaaaaagagaggataatagggctttctgacactacttttccagattcgagggtatctagtttgtttcatcactctttaaaaagaagcccaaggtatcttaaaggatgaaacagcgcctcggtgctgctcttcrtcatagaacctcacctcatgccatggcttggaaagctctgcaggcccaggcgtgtcctcttatactcagaaaacaacccttcaaggtcatcaattccatttgtattcttattggacattgtttggagcatagtaggcattcagtaaatgttctttgaaataagtccatttgttggaatgtcttgaaaatattttttgagggtggttgtattttctttcttgagacwcactggcacatgtgtctgtttcaagtcagcaaggctgttccaatttttgtcttaggagttttactttctgtatgcttttttgcctcatttgggagtttacattatttcaaaatggatagagactgtagaatagagaatcccaaaatcacaggacaattgaagttcattgacaaggatagtgagaaaagtgtgctctgcagaatattttactctgagtttctctaatgtaattagttttgagtggggaagaaaacccaacattcagcagaaaggcaggaatagaggatcaatctaatacatcacagtggagaatgaggctgtgttcaggccattctgcatactccgaaactcttaagcacaactgactctgcagaaaatatgtctgtctcaaacccccgtttactgtcagttcttttggatacccagatactaaccaccagaataaagtccagcccaaatctcagggtttctggactgtaatactagttagctccattaatacttgccttcatctgccaagaagatatttaaaagtcatttgcaattatgggtccatctcaggtttggattcattttcttaagggaagtatttggggactactgtcaccccatattgtaaggtgaagacacaaggcaacaggttgagtgaatggtggccctcagtcatgctgggtctggaggaagctgaaagctaggctgagattgctacttagtttgtgtagtttgatgttaaagcatcatcacgtttttttttcaggcccaggaacaggatttagaagcttcaggttttcccttcctgtaaggtagccttgatacctagatgttgtgatttcctttgtggagagaaacaaacttctgggcctgtttctacccatctgctgttgggttgaaagcacagytctcatcatgtttctttccttccgaagtgtctgatgtgtttctctgctgcctctacaagcacccattttcttctgtatccagccttgtggcccttatgcctaccctgttttggttctaaacatgggaatacctcattttctcagtgcttttcatccattccttccatctcaagtgctgaaaatgtctcaraagtcctagaccttgataaaggktattggccatgttattctcatctgtctgctcctgctctgctctgaacagttctggaatactaagacagccatacagtagcagccaatatctttggatgagtcttcttactttaattattctgctgaatggacatatgctcccctcactttcctcccccaccatagctgtccaaatctatttgaattcygttaacttcacgttttctcatgccctgattcagtctcttatgcctaaatttagtctcgaagcatgaaaccataaaggattctccagtccaccctagaactctggacattaacttaaaatctgttcacccatatcaagcctgtgctgtgctcagcttatacctgtaaacactgatctcttctctcctactctaatacaagttttatttgtatcagctctgccctgggtactccaagaataggatagccaattatcctctcataccttatcttctctgacagagaaatcagagttcttgcattttggtctccactgagaaaggcaattctgtgactgcttgccacatggctccccaagtcctgctcaagttctcacctccttcacaaattgttgatgtatgtgggccttgtctcttcaactttatggcaggctcgtagaggatacgtatcttcataacctgtaagtcccactgggcctagaatgttactaaagcactrcactttttctcttgagatggagttttgctcttgttgtgcaggctggagtgcaatggtgcgatctcagctcactgcatcctctgcctcctgggttcaagtgattttcctacctcagcctctcgagtagctgggattataggcatgcgccaccmcacctggctaattttgtatttttagtagacacggggtttctccatgttggtcaggctggtctcaaactcctttttttttttttttagcaatattaacrgatggaacttttatttatttatttatttatttatttatttatttatttatttatttatttttgagacagtgtctcactctgttgcccaggctggagtgcagtggcatgatcacagctcactgcagcctcaacatcctgggctcaagtgatcctttcacctcagcctctcaagtagctggcacttcaggcatgtgccaccatacgtggctaattttttatttatttttatttttttattatactttaagttttagggtacatgtgcacaatgtgcaggtttgttacatatgtatacatgtgctgtgttggtttgctgcacctattaactcatcatttacattaggtatttctcctaatgctatccctgccccattcccccgaccccacgacagggcctggtgtgtgatgttccctgccttgtgtccaagtgttctcattgttccattcctactgatgagtgagaaaatgcggtgtttggttttctgtccttgtgatagtttgctcagaatgatggtttccagcttcatccatgttgctacaaaggacatgaactcatcctttttaatggctgcatagtattccatggtgtatatgtgccacattttcttaatccagtctatcattgttggacatttgggttggttccaagtctttgctgttgtgaatagtgccacaataaacatatgtgttcatgtgtctttatagtagcatgatttataatcctttgggtatatacccagtagtgggattgctgggtcaaatggtatttctagttctagatccttgaggaatyrccacactgtcttccacaatggttgaagtagtttacagttccaccaacagtgtaaaagtgttcctatttctccacatactctccagcacttgtttcctgactttttactgatcaccattctaactggtgtgagatggtaactcattgtggttttgatttgcatttctctgatgaccagtgatgaggagcattttttcatatgtctgttggctgcataaataaatgtcttcttttgaaaagtgtctgtttatatccttcgaccactttttgatggagttgtttgattttctcttgtaaatttgtttaagttctttgtagattctagacattagccctttgtcagatgggtagattgcaaacattttctcccattctgtaggttacctgttcactctgatggcagtttcttttgccgtgcagaagctctttagtttaattagatcccatttgtctattttggcttctgttaccattgcttttggtgttttagtcatgaagtccttgcccatgcctatgtcctgaatggtattgcctaggttttcttctagggtttttatggttttaggtctaacatttaagtctttaatccatcttgaattaatgtttgtataaggtgtaaggaagggatccagtttcagctttctacatatggctagccagttttcccagcaccatttattgaatagggaatcctttcaccatttcttgtttttgtcaggtttgtcaaagatcagatgtttgtagatgtgtggtgttatttctgtggcctctgttctgttccattggtctatatctctgttttggtaccagtaccatgctgttttggttactgtggtcttgtagtatagtttgaagtcaggtagcgtgatgcctccagatttgttctttttgtttaggattgtcttggtaatgcaggctcttttttggttccatatgaactttaaagtagattttccaattctgtgaagaaagtcattggtagctggatggggatggcattgaatctataaattaccttgggcagtatggccattttcatgatattgattcttcctatccatgagcatggaatgttcttccatttgtttgtgtcctctttgattttgttgagcagtggtttgtagttctccttgaagacatccttcacatcccttktaagttggattcctaggtattttattctctttgtagcaattgtgaatgggcgttcactcatgatttggctctctgtttgtctgtaattggtgtataggaatgcttgtgatttttgcgccttgattttgtatcctgagactttgctgaagttgcttatcatcttaaagagattttgggctgagatgatggggttttctaaatatataatcatgtcatctgtgaacagggacaaactgatttcctcttttcctaattgaataccctttatttctttctcttgcttgattgccctggccagaacttccaacagtatgttgaataggagtggtgagagagggcatccctgtcttgtgccagttttcaaagggaatgcttccagttttttcccattcagtatgatattggctgtgggtttgtcataaatacctcttattattttgagatacgttccatcaatgaaacagactttcaaccaacacagaccaaaagagacaaagaaggccattacataatggtaaagggatcaattcaacaagaagagctaactatcctaaatatatatgcacccaatacaggagcacccagattcataaagcaagtccttagatacctacaaagagacatagactcccacacaataataatgggaaactttaacaccccattgtcaatattagacagatgaaygagacagaagattaataaggatatccaggacttgaactcagcaatgcacyaagcygacctaatagacatctacagaactctccaccacaaatcaacagaatatatcttcttctcagcaccacatcacacttattccaaaattgaccacattgttggaagtaaaacactcctcagcaaatgtaaaagaacagaaatcacarcaaactgtctctcagaccacagtgcaatcaaattagaactcaggattaagaaactcactcaaaaccgcacaactacatggaaactgaacaacctgctcctgaatgactcctgggtaaattagaaactgaaggcagaaataaagatgttctttgaaaccaatgagaacaaagacacaacgtaccagaatctctgggacacatttaaagcagtgtatagagggaaatttatagcactaaatgctcacaagagaaagcaggaaagatctaaaattgacaccctaacatcacagttaaaagaactagagaagcaagagcaaacaaattcaaaagctagcataaggcaagaaataactaagattagagcagaactaaaggaaatagagacacacaaaacccttcaaaaaatcagtgagtccaggagctggttttctgaaaagatcaacaaaatagatagacygctagcaagactaataaagaagaaaagagaggagaatcaaatagatgcaataaaaatgataaaggggatatcaccatcgatcccacagaaatacaaactaccttcagagaatactatraacacctctatgtaaataaactagaaaatctagaagaaatggataaattcctggacagatactccctcccaagactaaactaggaagatgttgaatccctgagtataccaataacaggctgtgaaattgaggcaataattaatagcttaccaaccaaaaagagtccaggaccagacggattcacagccggattctaccagaggtacaaggaagagctggtaccattccttctgaaattattccagtcaacagaaaaagagggaatcctccctaactcattttatgaggccagcatcatcctgataccaaagcctggcagagacacaacaacaacaaaaaaagaattttagaccaatatccctgatgaacatcgatgtgaaaatcctcaataaaatactggcaaactgaatccagcagcacatcaaaaagcttatccaccatgatcaagtgggcttcatccctgggatgcaaggctggttcaacatatgcaaatgaataaacgtaatccatcacataaacagaaccaaagacaaaaaccacatgattatctcaatagatgtaggaaaggcctttgacaaaattgaacagcgcttcatgctaaaaactctcaaactcctaacctcaggtgatccacctgcctcggcctcccaaagtgctgggattacaggcgtgagccaccacacctggcccaccaaagcacttttaaaagtctttactggctggctgtttggtcacaataatgtttatagtgaatatgcctttttctttaataaacacatttaacgttttaaagttctttttctgaagagtgatttttggttttgattgttgatagtggccttgattcatgccaaacttataaaaatcctggtcagtttatactgagcttctgcacatagagttttatataaaaccaagactttgtatttgaaggatggaatgttgatttaaacaccttttttgtacataatcattttagaatttgaagaggaaaaattaacaaagcttgtcagattacctttcagatttctttcttttgttccctaatattaccttgtaacaataccatctccatctccgtatgcttctagatcacattaattccacagcaaactttatattatcagacataatttgaaatgtgatacaacttaaattcactgtgccagctcagcattcctaattcatgttatctgcagtgtttgaattatagttcagatttattggaccagagaatgagaaaatccaaattctctagaattgatttcttacatggaaaggctgacacagtgggagatgtgttgctgtttaaaacagaactttgagacctccccacccccgttcagtgataagagaatgaacaatgcattttaatggaaaaattgaagtaamgcaagatagttcaaattaactggagaaccatgattgttggttccagaaaaattcactgttgtattctcagtgtttgaaaatgactgtcacatgataggcactcaattaatttgttgaatacatgactaagtgtattataagccaagagaagttttaatatgcttattacatgtttaatacaagaaaagcattatctcaatttattcaggatatagtaatacatagatgatcatttatactgctctaccttgatgaggcctctagctttccactaaatgtttgtcacttatgatagcaataacagtaatagaagtagcatctagcatttatgtaatactttttatcatttagtaagtactatttatttattaaaatgcacacatatatgttctcacttgtcttcagaacaaatttgagtgctcggtggaacaggttctaaacaaatgtgagatccctcttctcccactcctggatgttggccttgtatggtaggaagggcaggtatagttctttgattggtgaggaaactaaaaatagaaagaatagtttatgggccaaaagccacactttaattttgtaataaacataaacctaaattacagataatctgacatcttttccactttaaatttattatagatttaactgactttacatttcattcaataatttctttgcaatgtcactgaaatgcagtgacagatgtatatttaaaattactataaagcccatcwtgaataaaataaagaagtgtaatatatagtagataagaaaatactatttttcagagctaagcatgatctgatttttatcagtattttgaaagtatttattcatttccctggataaaagactgtacgtgatttggaatataaggaaaggaataggtgaagatgtcccttctgaactgttttttttaaacttggtttttgaaggacccgtttgtttttcgttttcttgccctttcaaataaccagcagcataattagtatgctatggtgttatgggaacaaattatgaataaacaaggattaaaagattgtatgaatatatctttcatacttacttggaggatttaatttcacaatataagatattttaaaaataaatacttggattttatcctggaaattttcatattaatgaaagaaagaaaaacctatttaatgagagctttaagattgtatcttatgggaaagtctaactttaggtataaaaggatcagttttattttgagatttttggctaagactttacttaaagattgctttgtcagaactggagattttaggagtgcctatgacttgacagaaacaactgggatagactattctgatgttctttaatgtttaattggtaattctaagggaagaagaaatactttggtaagttagatgcatggtccagctagcttaattatctgtcttgcgtgctggggactatatggagagtgattcctgtccatcatagtattggtctcawaaggtcaatttctagttcagacagcttcaggtctcctttggtctccaggatttgcatatttatctgttttatctttagttttgatggaaaaataatgcgtataagtgaacatctattaagataatagctttttgttttcgaaatttctcctaaattataaggcctgatacgtctagagctagtatttgaacattcggcacaaacgttaaatttcatatgtttagaataattagttcttaaattcaaaagatatttgactagccaaaacgtgatgtctgactttataggagatgatgagcatttaggtgatgatgtataagtgaaatatgtcctgaaaggcccctcatagaattggttttactgagtaatactttggtactaagtccttggctcaaatcaagaaaggacagaaagggaaggcmcacagttgtatttataaggatgtcgttgaagacattggttatatatcacacaatttcccttttatgaaaacccttcagtgtatcttttttcttttatcttttccttttttggggccagtctgacacgtgaaatgatgtcttgttatttaaatgtacatttcttttgattgctagtacatgttttatgtattgtttttattttatttttttaacaaattgccctgctaattttcttgctatttttccaattgggatgttcatttttttcttatggactttcaatggtacttgtgtattgcaaggagattaatcttttaccatacatattctaaacatttttctgctttctctaattttttatgtgttttttttatttaaataaaagtttgggtttgtttttctaagtgaaaatgaggccagccatcttttgtttgctttcatttcctttaaagattatataagtagttatcaatattttctccaaatacttgtatttttgttttttgttkaaaataaatatcaggttcctatctaaattttacatttaaatgcagaatataagcctcatgaaggcagcaattttgtcgattttattccttatcgttggctgtattcatggcacatcataggcatgtaatatgtatttttcaaatagatagtataagtctttatctaaactttatattgttataaaaatgtgaatagaaatctagctttcttaacctttttagaaagctggacatgtacttttaagtcatatttaagcctgctgtttttcctctgtcccgaaattcttcctcttgctttccacctatttctgtagaaaatccttctgtggtaatacaccgacaaggtcataatttacgtttcaagttttcctaacgtgatctttctttgtagcacttgtcatagctgcagtttcatgattgtttgtggaattatttaaatgttcttctccccgcttccaccctacaagccaacattagtcagggactttacttatttttgttcatcatcatatcccactgcatggcacatattagataattaataagttttttttaaatgagcattttattttttgaatagactaataaactgccacaaaaatcacataccaagtccttgcacatattcggtccccttcaagacttttacattttatattattgatctgtctgttttgttatcagtcccatacaaatttaataactatacttctaaaaacattttagtatttcttaggttatagtggcttcccatatactctttacaacaggtgtgtccaatcttttggcttctctgggccactttggaagaagaatttgtattgggccacacataaaatacactaacaataacgatagctgatgagctttaaaaaaatcacacacaaaaaatctcaatctcataatgtttcaagaaagtttacggatttgtgttgggccacatgtggcctgcagaccatgggctggacaagcttgctctacaytaattcacacagtttaaaacattttccaactattctcacatatttatcttctggttgtattttataatcatttgtcaagttaaaaaaatctcattgtatatttataagtgtgcgtgtgagagagagtatgtttgtgtgttggtttgcaaggaaggatttgttttaaatttgtaaatcggagagaggttgtgtatttataataaaatattccattttcttatttaggagcttgctatgcggcttttaatttattgaatgcgttgtygggcacggtggctcacacctgtaatgccagcactttgggaggctgaggtgggcagatcacctgaggtcaggagtttgagaccagcctggccaatatggtgaaaccccgtctctattaaaaatacaaaaattggccaggcatgctagtgcatgcccatatccagctactcaggaggctgaggcatgagaatcgctcgaacctgggaggcagaggttgcaccactgcactccagcctgggcgacagagcaagactctgtttcaaaaaaaaaagactacttacgaatttattgaatgcatttatttctctcagttaatttaaaactttattttatagaacctaaacttttcatgttaggatttttcttagacattttcatgcagaaactagttaacatagcaagctcgaatttgctatctttagaaggatttgcttacagggttggcttgtccttggctgtcatctgataacttgacttcagaatgttccctgtggtactaagtgataaggttatttggtgtaccaggggtactgaatttcattgtgccaatctgcctagacttaaaaaaaatgtgatttatacttccttctgggattttttaaaaatattgtggctgagtatgtaggcagagagtgtctgtgtgaccagtccctccaaaatctttgcactcggggtctcaagagatttttccagacagagatgctacacatattactgcatttctttgctagagagcattagaaacttacacacagatctcttcaggtgccacttgatgtcttcatctctcattagttttatcacttttaaatatcttctcttagtttttcctgatagtcccaatattgtcatctctaaatgaaaattctgtgtacttttttacaatatttatccttcacattcatttttcttgtcatattacagtgattagatcttccagaacaatattgaaaaatacagttgacttcaaaaacttttattttcaatataattgtgatagtgttttatattagatatgttttctattatctttagtttgatattctttatcatagtaagaaactatcccttaatgtctagtttatttagtttcattagaagcacacaatgcattttaagtcttttttgatacctgttgagacaacccaatttttttgtttctttattaatgtgataaattgtttcacatatttgaaaagccttatttaaaaagagtcatgatatcgctaactatcctggcgataaactatccatattattttaaatgattttaaaaccttgctatggaaaataagattaacttaagtagtaggcttattgtaatttattgccacttaaataatagaggttaatagaaggatgcaagaagagagccaacttgttgtatcatggagaaaaataattgtaagtattaataataataaataaaaataagactgtttagcatatttctaaaggacattctcaaataagtaatctgtatttggtatctgttggccaaaatatatattttctgtattttagcaacacacacaaagctatgtgtgtgaatacatttttataaatcgatgtatttttgatacaaaaaagcctgttgcattcagacaggtgtttttgaagcactgacatttgcttccagctctcctacttttactttcaatgcaatatgatgaaataaaccattttatgtatactacataattgccacaatgtccatactggtaatacttgattgttaatactgatagagcatgagacagcatgatgtcataaattggttctcatcttatttgctctgtaattggtcatgatcattacagatgatttcatcttgctaggatttgcttcctttattctataactatattactaaaatgacatagtgattttaaaatttacagttaaaatagagaaaaatgttcattttaagcatgtatgttttaaaaatcatatgtattattattttacattgtattactaactacactgtcatacttattactgaaatatatgtatgagtacgattatagttttttgtaaaaatattgtattcgtctgttctcacactgctaagaaagacatacctgagactgggtaatttatttaaaaaagagatttaattgactcacagttcagcatggctggggaggcctcaggaaacttatagtcatggtagaaggggagacaaacacgtcctttctcacatggcagcaggaaggagaagaatgagtgcccagtgaagggggcagccccttataaaaccatcagatcccatgagaaataactcmgtatcatgagaacaggatgggggaaaccatccccacgattcagttatctccacctggtccctctcacgacacgtggggattattggaactacaagataaaatttgggttggggacacagccaaaccatatcaaagtttaaatattttctcacaataaagagaggatatatgtaagtaaacataaattctgagatttaattgaaatttagtgaatcatgtttttcttcagtgttctttcacataagaggtaattttttttggcttaataaaaatgtctcttatctttcctttacttcttccatctttctatctgataatgtggcaaaaggcagcttttgaaaacaaacaaaatactacagtaaaagcatattttttctgatttctatcagctatgaatatctagcattaattttcctggtagaatgtttgatgactataaagaggagactggtaagaaggagaagatgcaccctccacacaggtcagtggggaggcggacttacaagtacttttagtgctacttttagggcggtacaaagttactgaaagcctaggaggtctacttaactcggcatcagatgttacataaagtgttatggaggctgacgtatctgaatttcagcattgcttccatctcctctggtaactggccccagtaaacctatctaacattattttctagtgtgtctatattaggattctttagagaaacaaaaccaataggatagggtgtgtgggggggtatgtgtgtgtgggtgtgcgggtgtgtatatgtgtttgtatggaacctgagtttttgaggaggtatttttaagcttgaattgaccgaaattggtcatgatttcagggaaggaaaaattgaatcacaggaagggttaagagaaaatgtacatgtagagggtgtgagggagagggaaaaattcattgtgattttgaagttcccagtttggaagatggagtaaatgaatcagatatgtcaggaaacacatggaarttgagttttgtatatgctgcatttgagatgcctgaggagcagttaggaatgcatatctggagaacaaagaggtccaggctagggggaaagtgaggtcttcaacttaaggcctgtgatggagccaggtgagaagagaacatctaaggacagcatgtaaagctatatgaagccctaagagtgtcaacattccttgccctataaatgtttgattgcctgattagttatattcataatgagttctatgtgaagcaaaagaaatgggaacatttgattaatctgcaagattccattgacattctcaaaagtaaattgtcatatgttaaggcagattactaaaatggaattctttatgtgtatcagcatgactgagcgagttaactaatctgtttgacactcagcactcatctatagacaacccaaccccatgattggtcctactatatccacgcttgtcttactataaaggaaatctctatgtagtagcagcagaacttttttttttcttcctcaactaaatgtgatgtcaatcctgtataaaatctcacttctttccttggtccctgccaacctatctcatgtctttgctcatttgactccagctgaaggaggcttctttctgttcctgcccaagggcttgtgcatatggtagttactcaataaatacttatgaaatggatgaatgactctgccttgtagatttgttctgagaagtaaatgtgaraaagtatatgaagagcctagtgatgtatctggtacattagagatgtgaaataaatgcctcttttgaccattttaattttttgtttctccaaatctgtaatcctgacatttctgtcgtcttctgctgcaatctactttcccaacccttctcatccagccagcttactgtctttggtttcggcacccccacaggccacggaccatgtatgatctcctcagtttgtacttcagtgtgaactgaagagatcacagtttcatacacaaggtttttcatacatgtaatctcttgagttaccctcttacacttcaataattacatayggattcctagtcccaaggacactgagcatataagtcgttgtgctggagattctcagaagaatgggtgtcctctggggacttggtcacagacctaaaaagggactctttaccagtcacaaagcactatcatgatcacacccttattatatggatttggaatcagcacttcataaattgtagccaacattgattgaacaccaaatatgggtcaggcagtgttctaagcacgttacatatatcacttgatgagtttggttttattggtattcctgttttatactcactaacttgcctaagatcacgctgctactgatttgcaagttaggatgtaagcccaggtggtctagtttcagattcctgtccttacctatgctttttattcaatactgcctcagcagcagtttcagggtcatagagttaacatctgttctttagtgtttgattctagattttaaaaataatttaccattttagttttcaaataattctaatagtttctttctactcttttacctaccactttaagtctttattcccatagggcagctactgttaacaatattttcagaacctttttcatcataatttttttgtaaaacatcttagtggctttgtgattccccctttcagttgtttattttctgaaagttcagcttattcttagttcatgaaagttttaaataccagtggtccaaacacaactccggtatgttcatgtgtgtgcctgtggatgttccacctgtgtccgaggcagatttttgaaattaattaacttcttacctgtttggaacttatttacatgagtttctgcctgaaggagatgtacttctgtttgaaaactccaggttgatgaatttttcgggttgccaggactcaaacttatttgacaaatcatctatgaccctatcaccttgatgctcagaaacaaatgaaccaacagcccttcctgactaaggaaacaggttttgatggagttttcaatgcatggctttatggactcaagaatcaaatgttttctgaacaatgtgaagaaagttttgtttctagatccttatatgttcctgtgtctccttttctgtagaaaagctctgcaatttttaatcagtaacacaaaaatgcctccatggaaatgtccataattctcagcgtgcagtggaacattttccgaaaaagtgaggtcaccagaagcacagagcagagaaatcccagatggcactaatatttgatttcatttttagcacgctcatattcagcagatggattggaaggctgacctctctgacacttctgcatcactgcctgctactccaattgcctttgcgaatgttttttcataaggcatctcctggtacctcagagattgatgcctggtcgcctgcctgtgttatgcttcatttcgccaggattctgtgtggttgagagttgctgtattctataaaaggggaaatcctggctcatcagtatctcaagcttttcctacagtctctcaaattgcgtgtaacrtctcggagcatatcattttagctttctaggtgtacccytgatttgtatccatctttaacttatcctagtctaattttctgccctcttttgccatcaaaaataatagcaaaaacctcaattacttttgcagcaacctaaatagctaagccaagaataatgtaaaaaaaaagttaaatgttttcaaaatacctactargtacaaaaatttgattattttaatatgaacattgctgaatctcctccttgagctatagtttcagtggccaaaagcaaagacctgagttagagttcccaatcatgctgttttctttaagggtaagctctactttagagtaagtgtcagttttcttatttgtaaactagtgatattattcgtgccaggcagttaggattgatgtgaagattaaatgaagaaatgaatgtcatatggttgtcacagtctgtggcacagagtaaatatacaaagaatattagtttgtggtgtgcaaaataacttttgtatgtataatataaataaaatataaaataaatggtaaaattattttgtttcattattacttagattgtgagtaaagtgaaatgttaagaattttttaatgttcacactaatgctttattttaaaactttctataaaattactgtattccttgttatggaccattatgttgtccacacatctatttagagatgaccctcttctccctcctaccctcacctgctagtttatatttcagtggcgtggctacagacaaggaactatcagataagatgagtatccagtgggtttttttttttttttttccaggcaggttgacctatgtggccatttgttaaagttctctgagaatgctcaattctgaggaggattaggttgctatgtccttccaggttgcttgttcccacacagccagattctggtacatatttgaatgcatagcatacttttggcttaraaaacattgcacatttagtagtcattttgcttgaatcagatctctacctgatgtcattttgatgaatttagggtttagatgactaaattgcagctttgttgtgaaactttctatagaaagttatttttttcctttttttaggtctaacataagrccagactatgcagactccaatttccacgacttcaagatgcataccttcactcgagtcacatcctgcaaagtctgccagatgctcctgaggtaagcctgctcagtcctggttttcagtttaaaggaactgatataattgctaagtgtttcagacttttctaaccttctagccaataggttctaaagtggggaatttgccttagcagtctggatcccacaaacctttgccaggctttctgcctggacagtcctttcagaagctctggcaagctcgtctccctctaccragggggtaccttgaagagcactgttgatactttttttcttcttcttgcagtaatttcatatgggcagaattttgcaccgtttaatataccactttcttatttcacctttcaggggaacattttatcaaggctatttatgttttaagtgtggagcgagagcacacaaagaatgtttgggaagagtagacaattgtggcagagttaattctggtggtaagtcatgtttattgttgcaattctgtttttaatgaggacataamatttgctaaacataattaaggcctaatttactctgaatatgtgtttattgtaacatatctgcttttgaaactattayttataagcacaattagaaaaatgcttaaaatttayrtgagttttctgcataactttgttttaaattatttaaaatttgtgtgacttttatacatatcttggagacagaggtcttcaagagggagttggatggtttcatgtcactcatttctttaaaagccctaaataaatgactaaaaccatacaaacatagccraaaaaatagagtaacaaaaacaacagaaagaatatattcttctatctttagttcttaaatttcctttttattcttttaaatatttagctcaggaatgctaatggctccagaagtaaacatcacacagactaattcatgaattaatgaattgaatacattgtcattttgcagcacttaaaaaagagcatatatcttttgggttttatgtaaatattttccccttggtttttaaaaataatgctgcatgattgttacatgagctagtttctaagatggctggcagttatgcattcagtagcctattgcctctttctgctcctcttgggctctcttccttgtctttattttctggcttctttattcttccctttcttcttttttctctttgtccttttcccccragtttctctgtgtttttatcaataagacctttcaaaatcagtaaaacttttgaacacaagaaaggatctttaacagcttgagttcaaaaggtagccatgtcaacctttgattttcccaaaggaaaaggtggacattgaattattttggataatgtgaaaaagagtgaaacagagaatagctcatttyggagctgagttcagaaaayaggcaattgtagaaaaggtgaatcctattagacgactgagatcatagcacattcctctcagacattttaaaaggaccctctgtgccattctctgtgctaggcatgagcagctataaagtgacagaycttggcatgagttgagcacctacactgtgcctgtcctgcctgggtgctctrctgggcatcttcttgcatgagctcattccgtcttcagaatggccctgcacatttactgatgggggtcggattgcttatgcagtttactcaagggctgttaaataaacttacctcttacttctgtcggaaagtcagaaacagtttacagagttgtaaaatataatagaaataaaaattmttgttgttattctttaattgccaccccaatagaatttatcacttgaatttttgttgttccatctttatatgccccattctttaatctctttggagacagttaacattttatttgctcatagtaggctaatgtttatataaattccaaggccctgtcttgatgagatgatatctgtgaagaatgtaaaatgatcccatagttggcatggttctaaaggaaatagtgtaggagaatagtttagagtcaagcagagatggttgaaatgctagctttgcrccatttgttagctatgtgagcttggggaatttacttaaatattctgagcttttgtttattcattttgtaaattagacgattattatgaggatacagtgagataatgttgattcttaccacagtacctgagcaaagtgagaacttactattttaatctaaggtgatatagtgaaaaatcaggtttttttttttttttgaaagacrtgggcttatttagtatttttattgttttcatgatctggagtacacgtggatgggaacgttaaggagcaccaaactttaaaataatacgcaagtatggcattaaaaggacataaaattttttaacttttacgttataaaagtcaataggaaatcrttgaaaattcctagtctagtcaaatagaagagtcatatattctcagtgtctgttcctaggtaattatttcaatgtactctgtccttacataagtcattttgtctatggcagtaaaatctacaagctctggagtcttggtctgtttgaatcctagcttcacaatttactccttgggtgattttgaactccatttacttaccctttgtaagtattrgtttcttcccttatgctatggtttggccctgtgtgcccacccaaatctcatcctgaattgtaatccycacgtgtcaagggaggggccaggcaggaggggattggatcatgggatttcctccaygctgttctcatgatagtgagtgagttctcatgagaactgatggtttcataaggcagtatttcttgctcttgctctctgtctcacttgtcaccatgtaagatgtacstgcttcaccttctgccatgattgtaagtttcctgaggcctccccagccatgtggaactgtgagcaaattaaacmtcttttctktataaattccccagtctcaggtattacattatagcagtgggaggacrgactaatacagtaaattggtacccagagtggggggcactgctataaagatacttgaaaatgtggaagcractttggaactgggtaatggatagaggttggaacagtttggagggctcagaagaagacaggaagatgtgggaaagtttggaacttcctagagacttgttgaatggttttgaccaaagtgctgataatggtgtggacartgaagttcgggctgaggtggtcycaaatggagatgaggaacttgttgggaattggagtaaaggtcactcttgctgtgttttagtaaagagactggtggcattgtgccccrccctagagatctgtggaactttgaacttgagagagatgatttgaaattggaacttatgtttaaaagagaagtggagcataaaagkttggaraatttgcagcctgatgatgcgatagaaaagaaaaacccattttctggggagaatttcaagcttgctgcagaagtttgcakaagtaaygargagctaaatgttaattgccaagacaatggggaaaatgtctccagggcatgtcagaggtcttcatggcagccccttccatcatggtcctagagtcctaggagagaaatggttttgtggactggatcaagggccccactgctgtgtgcagcttaaggatttggtgccctgtgttcccagctgctccagccatggcgaaaaggggccaacttayagcycaggcctttgcttcagagggtgcaagccccaggcctttgcagcttccatgtggtgttggacctgtggatgcacaaaagtcaagagttgargtttaggtatccrtctaacaaagatctaataaccagagtctacaaggcacttaaamaaatttacaagaaagaaacaaacaaccccattaaaaagcaggcaaaggacatgaacagacacttctcaaaagaagacatttatgcagctaacacatatatgaaaaaaaaagctcaacatgactgatcattagagaaatgcaaatcaaaaccacaataagataccatctcaygctattcagaatggcaattattaaaaagtcaagaaacaatagatgctgstgaggcagtggagaaataggaatgcttttatactgttggtgggaatgtaaattagttcatccattgtggaagacagtgtggcaatccctcaaagacctagaaccagaaataccaactgactcagcaatcccattactaggcatatacccagaggaatagaaatcattctactayaaagatacatgcatgcgtatgttcactgcagcactattcacaatggcaaargcayggaatcagcccaaatgcccatcagtgatagactggataaagaaaatgtggtacatatatcatagaataccatgccgacataaagaggaatgagatcatgtcctttacagggacatggacggagctggaagccattatcctcagcaaactaatgcaggaacagaaaaccaaacaccacatgttctcactcataagtgggagctgaacaatgaraacacatggacacagggaggggaacaacacacactggggtctgtaagcagggtgggggaaaggagagcatcaggaaaaatagctaatgcatgctgcacttaattcttaggtgatgcgttgataggtgcagcaaaccaccatggcacrcgtttacctatgtaacaaacctgcacatcctgcacatgtaccctggaacttaaaataaaatgaaataaataaaataaaactttaaaaaatgcttattgctcatggccacttgtcttcaggccataaggaagttgaaagttgactgcatagaccatgaaacaatgttcaatcactttggcttttgtaagcttacctttttaagaatacttactgacaaaatttgatttaaaaataaggattcttatctctagagtcttcctagctgtttaactcagctttggcatgctgccttgccaacaactcacttgcacttataatttaattgtagtgacatagacagcagattttcaaagaactgaaggtggattttcaaattcctcagcctcataacctttggtgtgtgatcatcctggcccaccttcaccaagaatcctatcaagtcagtttagccggaatcgcccttatatgtgatgtttcctctcactaattttccatccattgacctcaccctcctccttggctataaatctccacttgtccatgctgtatttgaaattgaacctggatttctttctcctttgcaattgttcctgaataaaatctgttatcacaacttaaaaaaaaaaagagagagaaagaatcgagctttgggaagctctgcttagatttcagaggatatatggaaatgtctggatgcccaggcagcggtctgctgcagggtcagggccctcatggagaacctctgctagggcagtacagaagggaaatgtggggttggagctcccacacagagtccccactgccactgcctagtggagctgtgagaagagggccayggtcctccagattccacaatggtaggtccacccacagtttgcactgtgcctggaaaacccgcagacactcattgccagcctgtgagagcagccaggaggggggctgtaccctgcaacgccataggggcagagctgcccaagaccctgggtgcctacctcttgcatcggtgtgacctggatatgagacatggagtcagaagtaactgccctgctggatttcagacttgcatggggcctgtaggccctttgttttgatcaatttctcccatttggaacaggtgtatttacacaatgcctgtacccctattgtatcttgggaggaactaacttattttttattttactggctcatagttggaagggacttgccttgtctcagatgaaactttgaactgtggacttttgagttaatgctgaaattagttaagactttgggggactgttgggtaggcatgattgtgttttgaatatgaggatgtgagttttgggaggggccaggagcagaatgatatggtttggctctgtgtccgcacccaaatctcatctcgaattgtaatccccataatccccacatatcaagggagggaggtgattggatcatgggggcattttccccatgctgttctcatgatagtgaataagttctcaggagatctgatggttttataaggcagtyttccctgctctggcttgctctcttgcctgcctccatgtaagaattgcctcttttgccttctgccatgattgtaagtttcctgaggcctccccatccatgttaaactgggagtcaattaaacctcttttctttatgaataacccagtctcaggtatttcttcctggcagtgtgagaatggactaacaccttgtaaaacagggccaataataacacttagattttaaaatctttttaagcaaatacccctatttagtgccaggtactgttctcagtacagctgctcctccattaatgatggggttatgtcytcattaagccattgtaagtggaaactatcgtaagtcaaaactgcattcaatgcacctaacctattgtacattatagctttgcttatcatactttaaacatgctcacagtacttgaaatacagttgggcaaaaatcatctggcaacacagtacactgtattgtttgcttccccttgtgatttcgtggctgactggtagctgtggctagctgctgctgcccagcatcatgagtgagtctcattgggcatgttgctcgcccgggaaaatatcaaaattcaaatattaaagtctagtttctacggaatgcatgtgactttcataccgttgtaaagtggaaaaatcataaatgaaccatccaaaattggggaccatttgtactttaccattgttaactcatttactcctatataaattctgtgaagttggtattattgacatcttacagatgagaaaccaaggcacagagaaatatgcaatctgtctaagtttcttgttcaatacaaccaagattcaaatccaggcaggccagcccctaagtttgttcttaccactgggctctgctaccagttacatgaatgatctgtgatgatgatatgtcagatgtgtcaaaagcccagtactgaatcctagtaagtaatcatgtgcttgcctttctcagtgaaagggagtgattttctaatggttttttaggcagaacactttaattaaattagtaactacccagtgtttttaggtttgaatgttctgtagtgctgcgagaagacatgcatccctggggaccatacctaccttcttcccatggaaactctcaagaccggatggacttaagacacattcagttctagggcctcttattttaagatgaagaaacaaggtcataaatatatgaaaataagataactaagaataatactgttagtgccctgcagattgtagataatgcttactaagatatcctcaattaaaaagtagcatcattctctaaactttggtatgtaattcattrcaaagcaggaaaatgtttttttaaaacctctggctaaatttgctttttggagtttgtaacatactctcttgctcttttgattcttttccctgttttgcatatttccattgacctccattccccttctgttttatacgttggtgccctttctctccctctctccttcttttaagttctttcctgctcaagattttgagagaccrgtaacaccgaatgctcatagttcattagcggtaygaaatggtaaggacctgcctaggaggcttcctttttttactctcagatyggggtttgctgggtagcccttataaggggcartgtctttagggggaagaagaatctctgtatcattccatcagtagcctgtaccttctgaaagctggaagccatggcatcttctcctcaccctcattccttctcaccctggtataggtggtaactgtgggtagagtgtgagtttgagcttggtaggtctgatgtgagtgtggtaaagtaggtactattttgaagtcttgggcaagctagactttatgagctgcttctcagcttctcaagctcaacattgacttaagtcttgtgtgatcctttgggcatccaggaataattgcttgctgcagttcagtaatatagtttttcatgactggcctaggatttggaggaaatgctggtgtaggggagggcaggaaaagggataagatatatccaggggatggagacttagtttacttgaatagggcttttgcatggagaagagtgtgatatgatttcagcagaacttgactttgagggaaatcatttcaacagccaaattgaaagcaagggagtactactgacttaagacaaactcaaatgtttacatagatcagacccccccttaatattaaatcataggtggtttgaaattcacccatactttacagagctttatagcaataatgtttaacatagtctaactatactctcaagcaacaaaaagagatcctgattggatcagtgtggatcaggagyccacttgtgatccagaaagctatgactagtaggagttgttataaacattgcatagttggcgtgaaaggcaattccaaaaaggggagtaggcagaggttggttaatggatacagaagtacacccagatgggaagaataaattataatgtcctatagcactataggctgactataattaacaataatttattgtatattttcaaatagctggaagagcagattttgaatattcccaacacaaagaaatgataaatgtttgaggtgatagatatgctaattatcttgatttggttgtaacactttgtatacatatattgaaatatcacactgtaccccataaatatgtgtaatactgttggttccctgcagattgtagataatgcttgcttatacagatatcattgattaaaaagtagcatcattctctaaactttgttgtgtacttgattacaaagcaggacaaaacattttaaaacctctggctttgaatgtgtcaattaaagataataaaataaaaaatttaagagggggagcatgctatctttattcaacatcagacttgtttatagaaagggatagtcaaatggagaagaggtactagttgtacaaaatgacagggtaacccaggggctcaatgagaggtagataatcttttactctaccttttaatggacagatccatggcacatcacatttaggccttaccttacttgacctttctctttcatttaacactgctaatcatcctccttgatgctatccttcacaacccatcatgcgcccatgccatcttytggaaatmtgattgactttcctggtttagctacarcccacaccccaggtagataaaggtccatctgtgcatgaaacttctctcctgaagtatgaattttaaattaccatcttctccttacatatcccctcccatgcgtcttgcattgacctcaaatgtctcatgactaaaatcaacctcattagtcattaccgcaaacttccctctcctatgctttgtcttagttaaaggcccaccatccaaacactcacatagacctgggtgtcarcgtcttccacatcttgattcactttcctgttcttcttrgctctcctcctaagtctctctaggatgcattgataatggtgttgatatacacagaaaatctcattgtctcttgcttgaacaactcaaaagtttcctaattccctgctcttaatcttattcttayataatttataaaattatcttccgtctgatggtttcattctttcacatactgtactttacatttcttacagaataatgtccaaactttccaatatggcctacaaagctctaagtaatttgtacagctcattttttaccacttcctcctatcccccaacctataacacgactctctttaactactcacagttctccaaccagtttttttatgtctgtgtatctacatgtattttgtttttctattttactgtctttccttcccttttctgtttagtaaacttaatgttcattttcaaaaagtcaatgcagatgttgcccccactttgaaaaccttttctgacactcctaatgcctgggctttattagtctgtcagtcctctgtgctcccctgacatcatatgtttacttttatcacatttattataattgactctatgttcatctcctcaattagactgcagccctctcaatgataggaaccatacctaattggtgttttgacctcaaggaagtagtgaggaatggagtgagtgaatggatcaacaaatggacagacaaatgagtaccactgtagtgtagcagggcttctgggccctgaagatcactataatcttagaatcagaaacaggagagtgcaggggattgtacagttttggttccaccttcgtagagactagagcttgactagattgtggaaaagtggaataaaaaccttacctgagtccctggctggtactttatgaatgaaaggtagaaaattaggtagaccttttagattcctttctagtatttttgcaaggaaaggctcatggcctaagcatcgattgttaggcctttgagaggagacacctgggttagattaataagtagcaagaaaatgaagcaattcacagaatgcttgatgacaaaaatgcctccctttctgaaaaaatctactgcctgatccagtcgatccaattgttagagttctcacttggctcttactatttcctctgcctgaaacatgctcccttttctccgaacagttccaaggaccaccctttcattgctttctgtccaaactctttgccaatcattaacygtaccttgaccatccaatggtagcctgaattaaattgttctctaattatttctatgtaggctttatgcatttgccaaggttaggctgttctgtggtaactaacaaacccccaggtcccattggctttaagatataaaagtttatttctcacacatgcactgtttactgtgagttcagtggcccttcagagtagctcccttctaatcagggaacccagatcagtttgatcttgtgactttgccagcttgacacatgggttctagggttgctgacttacagacccatagcctggaagtaagcagtgccatttttcatcaagtccattggctgaaactagtcacatggcttcaacctaactgcaagggaagctgggcaatgtaatgaaacacatggactatttggtgtctgtctctacccctgttagattatatgctcctttgctgttcggaatatgtttctcatcttttgtgtccaccccttagtaccaagttcagaggagtggcacttaatatcatgttgttgttgctttttcccataataggactatttcaaccagaatataatttttaatgatgttataggatgtggctaaatattattaagcatttgaagtatctcttaacacttctttttgttcaagttagccstttttggatgttgtcttccttgggttggaaaaccttctatatttcatgctctatatcccttatattaatctagtcttcattcaccctggaaatgataattacttgacaaaaatgcagtgcatttctgaatgaagcacctcatttgtattaatatgtgattatgacagattattaactcaagtgcatttgaagtatgaaaaaaagatgtgttaagtttattttgttaataagacaaactatgcaacttggaaacaaatttgaatgttggatgattagtttatgtcttaacatttgaggatgtgcatggatataaarggcaggcagttccactctccttttccctgaacttgagttgacttcttcacattcactatggcaacctcaatgatcaacacatacaggagctctgaagtgcatgccaaaactttccaacgttaataatgaataggtatgaactccactatgcaagcttctctgaacgagtmactgcaaagctaatgtaattttagggtgtcgtttccttctcacagtacaccaccgcgaaggtctaatcccagacagcaatctttatggacatttgcttttccccycactacactacatgactaagcccctttggtctccacttcttactctgacattgaccagtatagcttgctttgcatcctctcagtttaaacaaagtaacattggaagggaaatactgttggagcaaacgactttggtataatgcatcttttcctttagtgagaatgcaagcctcagctgccctaatatttaactgaagcagatccccatttgcttatctgtttaattgcacttttatctaggccagctgctgctcctgctgctgctatagccactcctaattggaaggacgttgctgtggtatcctagtggtttaaaactgagagactgctacctagaacctgcacccacattggtatctgaaccgggctcctttataaatcatattttacattttaacataaaagataagctttcaggatacaattttatttcagccttctactgctaggcattttatcacagtacttttacgtgagctgaagattgaccattgatttcataaccaaaaatgactttagttctgcataatattacttaaaactcataaagacaattttatacttgagtagttattattccttccatctatttgggtcagtttaatggtacattaataattattaatgtgaattggaatctattatatggttgtattcctattagagcccctgaaaagacttgaaatcaaagcctctttctaagtattatttatagtttatggtttgctttattttctttttaaaacattgctgtatatctgagtagtgaacatagcatttgtgaaagtgaactttctccaaaatttgatcagtccaagcattttttagttgtaatgtctcacagaaatagcactttagtcacgatgatagggtaccttcaaaaactgtactggtaattacttttctgtggcccctgttgagataggcagtcttactggacattgatgtgtttartctgaatagaacttcagataagagacaaagcaaattgtgcaataatgtatgaattgagagccacttgtattgaaaaacaaaataggacagaattttatatttaaacaagtaaaaattatttaaattttcacttgaaatttaaagcttccatgaaaattgtttctcttgcaccaataatgcacattgaactctgtgctggcattaaagatggagttctgcaaaggctccaagcacctcagcaacaccacttctcagaattatattaagccagttgggacatgatgaaagaatgcaaggtataaaccccttgagggcccatgagtcaccatctagaaaggttcttgaaaggggaagaatgttttatagtttgatcaataggaatctgagaagtaggctgcagggtaaatataagttgaggattaaaaacttttggaaacttgaagaattgaattacaatcctaagaaagttcccaggagaaaaagagagatacagaaagagagactttttcatcccatctcaaccagcagccaacctttcttctaggtcagagtacagccaaaatagatttgatgataatcagccctaattatctcagctctattgcagaactaaggcatgaacagagttttctagagatccaagtgcccaccatagtagtttcaggtggataccaaaaggaagtaaaaatggggttgcaggcttcaaaacttagagcaacttttccatagaatactccatacaaaaaggtttcttattccattttttcagccagaatgaaactttactttgaaaaatatatgtattttcagtgttgcagttgggttttcctttctctccttaccattattttagtgtcagtgaacaggctattgcattagtgtgggtatgacagtttagattgtgtttataaaggaggcagtctgtttaatggtatagtcactgtcacaagcacaaaagcataaatacaggagcctggctaagaatttctgaactcagcagattctaagagttactgatactcctttgggttttgccttattcttagaaaatttacagaatcctaccatgaaacatgattaaataaaaacagacttctaggagctgctatttatgtggcacactcagcatgatcagatcagagtgcaaacagctctatgccgtatccatgaatgcagcaggcctctccttggcagagggtgaatgtggtggccatgaggacaggaagggatagcaaggagaaaggcaaaggggaagccctactaaaggactcatgcccttggagttgcatccagcacaaagccccttttcaatttttcctatctgggttacacagagaaggctttgtgtagagcatttcttaaagcacccaatcagaaatgtgaggaaagttgcttctcttgatgagacaccagaggaaggaagcaggagacaatgacaagggaggaaataaaggagggatagctaagtaaggtagacagctaagtctagtttgttcccagtgttgtaccagtctcatcagtgccgtgtctgggtctcacagcctctggtgttctatgatggatcctctcttctgccaagagctggccacctggcagccaaaccctgcacaagatatgaagagcctgtaaatgcaggacttctgttcctggatctgctcctctgatgaagaggtgcaagtgtctccgtagctacttgaccaccgtaaataccattgtttcctcttcctgggggtcacccagagaaccctcatggaacatggtgtgacaactactgacacatggggttatcataggttttatgccatgaataatacatttaaagtatgttgtaaaagacttactttgcaaggacctaaaaacacttctatgggaagaatcagaaaaaaataattatttttgaattgaaattcaggtgcacactcatttatgaacactgaacccaaaagagctgaggtttccccaattttggagctcgtgtagaaagctttcctcaatctccttggatggaaaacttaaactgctcccactgtttagcacttcctgcagtttatgactctcagttcaggctctaactcaccagtaggggaatagggatattctggtgtatatgggtctttctgggcaaaccagtgaagcaagtctcacagctgttctgtcaagaacccaaattcccctaacctgggttctaagactgggccagccaaatggcacttttatagaacctcttcccaaaccagcgctcttgggcgatctttcttctgaaacgttaygtgtttccaatagggaggaaaagaagaaatgaagtaactttttgtccaggaatactcctttgtaaaggttgatttcagggctagcaaagatgccttcatagaaggcagttatttgtgaaagccaaggtgatggggtttgaaattgacaaagggatgaggacttagcttttcttctgaaggtgactttctgcccatggatcttccatttccattaatcagaagtattcgttaaaaaarraaaaaaaagaaaaaaaaaagctagagagaaaagaaaaaacaaaccaacctcctgttccatgccccaggcaatcttcttgtgtaaagcaatctgtggcagctagtcaggtggcctggcaggagttttccccttcaactctggctgggagcttcttagaatctcttaaagaaacatcctgcagagctcccacttaggcctgctctttctgtcctgatgtctctctgtggcatcttttcagatgcttctttagaggatcrttttggatggggaaggtataggcctgggcttatgatgatgagggatttcctgtctgtctggagaagttagaacatgtataagtgctcctgggtatggggaaaggaggcaaagatgctgcccaccagttttccaagtgccgtgtgcgcccttatccccagaacgatcctttgctcttctactatagtacgcatttgaagatctcagggcccttataaccattaggcatttgcagggcctgaaatgtaatgaaggaattgttcttcctatttctggaggtaaactaaatatgaaaagaaaattagcattaaaatcaatcctgactcagtttttttttaagttccatctttaactcaaactgtatttctgccaaaattaaaaataaaagttatagccacttaacaaaaaacaattcacacgaaatgttgtactatgtataatttgctattgttacaaatcgtcaatgcagtacctttgttagcttagtgtttttagattcttaaaacgaggcatgttgaaagaaaggttgcatttagctttctcttatgcctataaatttagtgtaagcccctgttttaaggagctttatgtggtaggactgacattgcttaataaacaatggaaaaagttaagcataacctagaagtcatttaaaactgtgagtcactttcctgacaagccaatagggtaagagaaccaaggttgcaaaataattactagcccagcctgagggaccgtggaaatatattacaggtatcagttaagaaaacaaagcagtggtgttttaccactctgcagagaaagctaaggttgctaaccaaacaaaataactttacactgacaatgccaatttttacatttctttcagaacaagggacactcaaactaccagaggtaagattaacattttaaatattttttataacctttgcatttcaagttgtttgctaacttaaccaggcttgggcttttacactgttaaatgtgccttttaaaataaatagaaataaacagaaacagagggaacaaccaagtgattgtgaacaaaatgcaaaagttaaatccaaggaatgttcactgtcactgtccgaaggtcttaggtagagaaaaaatgtgaatatttaatcaaagactgtgtatgaaatgggactgtaagtacagagggaagggtggcccttatcgccagaagttggtagatgcgtccccgtcatgaaatgttgtgtcactgcccgacatttgccgaattactgaaattccgtagaattagtgcaaattctaacgttgttcatctaagattatggttccatgtttctagtacttttccattagagcagaaagatgatgattatcacatcctattgatcaaatgaagatctagtaacatttccttttggtttaacatagagtctcctaatggcttagaagtatgtaatccatgttacctctcagaataaagttactttaaaaatccaaaaaaaagttatttaaaaaaatacaraagatgatgggatatgtaggaagtaaacagcaagttgcccawcattaaatactttcctgttgaaaatactgtcaatggtgttgtttgatgttgtttatatagagttccccaaaattataaaatttcagacagaaaagattttaatggttcccagacaatcattgccttgaccttcaaccaaaaataacagatttcttacctgactgcccctccccacaaatggccatagcaaaacatttttagaaatcatagaaaaataaaatacaaactatgtgtgattagttatatgaaccaaaagtacagtaatctgaaaatttcaaagtaacgatgaaaattatgatttgtaaattaatatctaacaattaaaacctctctttaaaagtgatattagtatgtttttaatcyaacatctagtaaaaataagaaaaagtacagcaaaatataagaggtgcttgtctctactttttgcataagtacataatttgaacatataggatatcaagagtgtgatataaagaggctcatatgcacctaatcagtgcatctgttgattatattttaaaacctaaagtctagaccaaagaatgcataacaaggtgatttttttaataggccatatgagtttctttagagctaaaataaattaaccaaagagttcctttagtgtttcattgacaggtaagatttttcactagggctatcaggattcttccagcagtgccaaggatcttgcaaagcagccttctttcactttctcattgctattattatattattgagaaagaaaccttgtagagttctgaactttacctcagtgttacttaacacttatccttttagatatatatattattttttccaaggaagatggtttcattttaattaagtaatgtgaagtgggtgtgcttacagaaagaaaatatgccaataagaagtgggtaataattttcatgtgatactaaataattctcacaggcacttttatactttttaaattacatgtaagcctatgatacaaggaattaattttcacattgatttttaaaaatatataacatcagttttttagtgacttgtttcactcttcaatataagtataatttttatttactrtgtgactgtactaaaaatctctgttttgtgtggatggaggattatagtaagctctgaggctagtcaatccatttggaaacttgagtttgttttaagggagaaatacagcaaactaatattaagaagcagctctcaccctataccaggtgtgttcactctccaaggcagatgattgtatgctgctcaggaatcttctcataagtaaatagtgaarcacttttgtaatttgtaagctctgtgatttttattttttctcctctcttgaagaccttctttctctccatgtaccagtttataggcctcctctgcttccctttcaatagttatgattgtgaattttttttaaattttgcactttatttgcgaggtaggtcagttttcactagccacagaatccgtggggcgtccataaccatacctgggctgtacatctcacatcccattctggagtggaccttcggaaagttcctctggctccaagaagcaagtttatcattgcatacatatttagctactttaaatccmtttttttttagagggaaagaaagataaggcaatggtaatgaggcaagaaataactgccaagtgcttatagaattgagtttggttcctgccccccctccccccgccacccccccaaccagcccaccattgttaggtagatcaaaggagactgagaaggtcctggagactgattctcatggtggtgtgaagctgtaactgagagctccaggggtggctactagatgtgtcctctcctcctttccgttctcttcctgctggggacaagggcctgtccagctccgtcctagacttttgagaatatagattggggaggggagtatacgcatagagatgacagaatgacaaatgaaatttgcactttaaaattgttcaaaatwtgatctgctgaacatctccaggtttttcaatataaaatactttttaggttmttttaaagtataaaaaaatcttagcctctccaaatgcagttggtttaggggcgtgaaaattcctccgatgttattttttaaatacaccagttcatagtttattccactgcacacccttcctgtagaaaggtttctgttttcagagtgactgactttcagtggattttcaggaggaagaacctaaagtataagtagtaaggcaccaaaagagtagaagaattactttgtgtgaatttaaacatttaaaataacaaaaagctaataatctatcacttaataatccttaccatgtggctgtaactgttscaagcatttaaggtaaattaactcatttaattctcactgcaaaacctatgaagtcagtgctagtattatctccattttatagaggaacaaacaggcacagagatataaatttaactgtttgtgttcaaactgaatttgaacttagggagtattattctagaatccattctcttaatacttgcaatgtgtagcctattttaattctaaattcaaggtgtaagaacacagagttgctcttgaagtcagggtccccttttcacattttaagtttatagttcctacatgggactaatttaggcattctaggaatcaaaccaaagagttaaattcatttttttttgccttcctagtactttgatagtagcaggtataaaatcagtagaaagacagcttctattgtgcattaagaagatgatgggatatgtagcaagtaaatagcaagttgcccatcattaaataatttcctgttgaaaatactgtcaattgtgttgttcgatgttgtttatatagagttcctctaaattataaaatttcagacagaaaagattttttctttaaattagtgttctttcatattatcagacatgagtctgtaactcattatgcttccaatttttgtgccttggctaccaacaaatctagagcaaaattttcctttcattcacartgactcttgttacagcttttctagtgcagctatccatcttgctcarcatagcttcaatgctgattttaatgatcctagcagtcttttacaaatccatgttgaaagtagttggagtaaaaaccaaaattacattttaaaaatttctccaatttgctttcacctgagaaccctgcaagtctgctggatatgactttgaggcccttaggaaggctggaaaaaaacctcatttcwtccatttaacttgtgaatgaaaacaacagaaagaaccctgagagaaatccatggctaatgtgtgcttagcacagccaagtgtgctctgaatgaaaccaagtcttcacacacagatacaaaccccaacacataaaaagaaaattgcttttgtgaaaatctagattgtatgatagtcatagactcagcatttcatccagttgcataataaagaagtgaaatcaagcccttcttaattagtgagattactgtagttaggtgggaatgagtttaatgctttagaaataaaatatgtagccatgcattttcatagatttaaaatctcttgttttgtgtttcatctgtaatttttgtaatgcaaagttgttttcttacagattcattttctataataagaattcatttttatgattcacaagctgcatgtctgttttgttttttaaagtgttcagatacaactggtctataattaaaacactattctcatttaagtgttggctaaaatcagagcttcagatctttgttttgaggttgtataccttcttcagtctggtctgtgaggtcccataaatagctgagttagagttttatgagatcagtttaaggctgttgttgctcatatgtcttggctgggaacatattctaaccaagatggctgctgggctttgttctctccatcgtcactatgacttaacaaattgagtcccaatatttggagttggcaaccaaaaakattttttttcttactgttataaggtaccaacaacttatcaagtgtaatgatatacacgtggaagacttactagaaaaacaaataaaacaaactttaaaaccatattctgatcaaatttagtcatactttgacttggaaaatgtgcaacattcatttgctttccaaagtgccagtagtaatacaatttaatagtgcaaaattaccaacacatatttgttttgctttgttttactttactgcacagaaacggaccaatggactgcgaagaactcctaaacaggtggatccaggtgtgtttctgattaaaccttccataattatggcttcagctaagtgcttatgaaaggatatgggaattgctgtggaaagtgaggcatattgttggcctttgttcctcataatttggtgtataatgtgtgaccaggaggtcatggtctaacgtgtaaatcattcacatgagtaactaccagcaactaccagcattgcactctttccacagtcagcagttgagctggttatttgcttactgaacagcctcagggtgcctggttaatgctcacatatccagcaccctccctgtgttcctttgtaaatctagtaagaaaaccagccagctagctgscacttaaaaatcactgttttctaagtaagtaggggagagcataaaccagacaactggtacccaccctccatcagagaaaatttcttaattctatatccatgctattttataatagcagcatgttttttggggactttgtgacaagtttcctctccggagaccaattatttgtctgcagaaaacgttcagttgttttctatttagcattgtgagatttgycctgtcattatgttagtataattatttttcatccattatgcaatgccttctttccacagtttaattaccaaagattttttatgtatgtgatccttttgttgtgwgtaaaaggtattcacagttaaaggattccaaatacacgaacttgatgataaaccaaggggaacatgagaaatagagtagctttgctggaaaataatctggactatgtgtttcattttgttttcctatcataagtggtattcacctagttgtaaagtttagttttcaaagcattatagtttataactgaaaccacacccatggtagcattgccagtttatgagctgtttaagatttataggagctttgttgcctctggctagaaattgcctcacttgtgtcctgagactagtttaaatcttttaactacagaacaaatttgaagccattaaaaaaacrggggttctggtttactttttaatagttctgactttcccaagacwatatcctttgcagaggactccctgcaataatatttagaagtgactttctctattattttcagtaggggtatatgactgtgaacataatatttttgtcttattttgtgtgagttatagtattgctgtttcagaaaaattacttaacctttataagtgttatttttttaatgtattttttctttcttctcccctcagggaaatgcatttttgtatttgtagtatgtcaataggaacatatttgactcaaccatttatagccaaaattttctagaatcccttacattatttagattagtaaattcccagattagaaatatggcaaagtagaacaacaataaaacagatttatactcctttatcctaaaggtgatggctttgtataggtacagtttttttgttttgtttttctatttgtccaaagactttagaacttcatgaagaataaacttacaagagaagtgctgttgtatttatgtttgtaagaacatacgtggctgggtgcagtggctcacgcctgtaatcccagcactttgggaggtcaaggcsggcggatcacgaggtcaggagatggagaccatcctggctaacacggtgaaaccccatctctactaaaaatacaagcaaaaaaaaaatagctgggggtggtggcgggtgcctgtagtcccagytacttgggaggctgaggcaggagaatggcgtgagcccgggaggcagaacttgcagtgagccgagatcgcgccactgcactccagcctggtgacaaagcgagactctgtctcaaaaaaaaaaaaaaaagttttccattacgtataataaatgtatatgagtgtatttttcctttttccatatttttggaaataaaaaacccaaacacttgatgatcttgcctgttgaagctgctgatatagtaagcctatttcttcccacagctgtcttttgatttaggcttgacttatgtatttaaagttgcttgacttttggatttctgcctctttctgctggttagttgcaaagcttctttgttcaaagttaacccttgcttgatgaccagcgtgccttgatcctcatgtggctattgtttagagattttcagacaaaatgtttaaacaagggatcagtaaagttgagtctgcgtagacaaactgcttccacaatgcattatttgctgttagtatttctaccatggaagttcctttgatttttttttatcctacagttaatttacttaacatctccaagtgtcaacacatgactttgcagggcctcacttaaagtggcttataaaagcaactgattaaagagtttaggaggccgggtgtaactacttcaccaggtccaaatttcagagccatrttcaaaggtatattatatatattctctatagcccttttgcactggaaaggaacttaatgmatagtccagtgggtagtaggtgcttaataaatgctacatgaattaataagtgatgatacagtttttatgtatgcattgacattctttctttttaaattcctcctgctgatatgctaatgaaacacagcatagtctagtggtgggaagcatggctctgagccatgttgcctgggcttgggactggccttagctgtttacttgctgtttgaacttcggcagtttgcctcctctctctgtgccatagtttcctcatttgtaaaaggaaatgaataagaggacctaccttacgttgttgttgtgagcattacgtgagctaatatatgtaggccaggcgygttggctcattcctgtaatcctagaactttgggaggccaagtgggaggatcacttgaagccaggagcttgggactgtggtgagctgtgatggcaccactacattccagcctgggtgacagagcaagaccttatctcaagaaacaaaagagcaagtaaagtactctcaaaggtgcccaagtaaagtactctcaaaggtgcccagtatatagtaaatgctaagtatagcaattactatatcaactaatttatattagagcatgttctttaatattggactttttgtcatgtgaaggagaataatattaaatagaccctgaattttatgttgaatttctgttgaaataagaagctacataatcacagtcattttcagatttgttgttattcccccttaatctaatggctttcatgatcttttgcttatctttaccaataaacatagtcaactgtgatagttgagaggttttttttttggtgaaattattagtgtttgttaytgcaataaagaagcaaagaaaaactcccaatattgaaaacatatattgtggggtttattsaaatccaagaaagagtgaactgtaggtttgtgttgtagcttgttagcacatttaaatcattcactccctattaataattgtgattaatctttatagacaatatttgcaaatggctttgctctttattttttcttgtcttctattgtgtgctaataaaagtatcaacttataatcttggctgcttttataaatatagtaatgtattagatgcaaattctggtagctcttttgaatttcttaaatatagcagggaattttcatcagtttgtacttttcttcctaagacagatgttggtatcaggaaaataacacttgtaacagacatatcaattatttcaggaacacggaggtgctaggcctttttcaagaacatgagatcataaatctcaagaaaatctgagcactgatgtaatatttttcacctaaagtgkcactcaaggtcaaagttaccaattaaattttaatactgagctttaaaaatttccttctgtctcagtgtaggagatacaagatttatttcagtttgcatgtggcaaatctgtataccagggcatgtattcttttcactgggtccatgtttttagattattgcaaaattgtcttatatttgtggaactcatagcatcctgcatttaagcctacagtcactagcttttaaacacttcaggcgaccattctgtgttgtgctgcctaaagattatgtggagtagatgggaaatgtttaaatagcttacactctttctgatcttaagttattcttgtgctttgtgataaccttgaataataaatgaataggtaatgattaaattgataagagtcctttctgacaactcttgtttctcagatgctcattgttagactcttgattacaaagagttgcatgtggcttagaaaaactgtcttttcttattcaccaaggagatgtcttactgttttgtagcagagacatcttcaaagatggtcacttcctctttcaggtggataggattgacatataacgccattctcatttgttattgtatgaagaaaggaatctaagaaatctttctttcattaccaatttcatttcttatctgacattaagcacaggattgtcattaattataaaacatggcccctttccgcaaagaatttatrttcttcctaggaaaggaatagatatagacacaaagttctgattgcataaatgcatgtatataaatgtacatataaaatttttaaatattatrtactatttttgtgcagatttattacrtatagcagtgtcttaaaaacaattagtgaattgtttaataaacatataaaaagatctaggattacacaatacatacaagaaagcaaaacaaattgggaaacacaaatgtctcaaattgcttttaagctgggttacatataaatgttttcatttatataaataaaaatttttatactggtttattgtattgaattacaatttaatactattgttcttagtgttttaatttcaaaggattgtgaaatttattccaagtctaaacagaattgttgatttcttttagatttgcttttaaatgtaatgtcaatatgttcaatagagaaattttatatttttgtttccaaatagaaaacattgagaaaaataacaacagagtgttttcaaatgcacttatctaaaaatacattttatctcttttcttttttatgagggagacaaatgcatattcctgaaggttttagtaaatgagcttttgtctataataaatagtaaagtttctatagattagaatatttccatattaatcagtcaaacctgcttctgtcttttctatcacctctaaagctaatttctcatcaaatataaatcttaatctaaatattgggagcataattgtaaatgtgtaaaaatatatttcacattgaaagaaatgaacttgaaaaaactgggacagtaaacccagtgattaagattcattgcagagaaatgagaaatccaagctgtgaacaaatgctgaggagcatgctctggtttttaaaatagccgactttttttcaagcttctatgaaaccatggacaataagactagttttgcactaggacagttgatcttcttgtagtcattttcaggactacctttctgattcccttttccgtgataacagatttctgaaatgagcaccacagcctcttgctcgcatctttcttgkttggaggaggatttatttctccccttcaaggctcattccgagttcacaaaggatcactacttctgttgtctggcaggtctgtgcatgccttgccaagcctgtcttttatactggtcaggcaccttcagaatcagaacaaaggtgaggtgaatatctggagatgtgcatgggggtgcttttagatggaaaatatacatcagtaatatgactactgaaataacagaatgtttgaattatatttagaacctactctgggccatttatgcacttctaacaatttctattattgtagtagttatgttttagaagataaagtatatatctattaaatatttagaagaaaatcctgaaaaagaagtaatgaacctagtgagctacttsraacatttatcatcaataaactgttccttacttagaacgtcagatatggagtggacttcctttgccatatctatggttatgctggttgaataccattccatttcagaaaaagaaggatatgccattgtaatgctaagtagataaagaaaagtcagtaatttcttatgggccagcaacctctgagaggcagatgattttctttcagcacttaggtctgaagtaacttaaatgaaaggaactaactgggtcaaaacatattgactttgtataacaatwtttgatgcaaatgatatccaattgatttcaggagaggacattgataaagtaattcttaatataatttatgatcttatttatactacagttctatgtagaaatagcaagattattatcaaattaattagaaccctggagtgctatttgtggaatttctgtcaaaatgactcatattggcaattagttatctttcagcatattcaaatcaagttgacttctaaatttttaatttgaatgaaaataaaagcttatgtttggttcttataattgtttttatggatcgtttttcctttgaggctcattcattttcttctatataggtattagaaacgtggaagttcctctgcctttgaggaacttggaattttgctggagagttaagacatacaaacataacttgtcaaagtaatattgtagagtacatgatgaactaccaaagtgtgtcgtataggttatgaatgatctggttgactgtgaaggcagatgagggagaattttttgcaaactgaaggacacaggacaaggaaacaaaatatctaaaacagacatcagtaaaggtaaatttactagaactacatatgtttaaatgaagttatcagtctgttcctaggtttgggtcagttcaattatataccaaccaatatgcttttgattaccaagtgacaaaaatccatttcaaactagcttaggaaaaaaaaaagttttctgacttaggtaactggaattccaaagcattttggcttcaggcagagatggatccagggactccaactgatatcattagggttcagtttctctttgtgtcttagttctcctttctcctctattggcttcttgtcaacatgcacctcacagaggtttttctcatgtggaggcaaagttgtctgttagcagctcttcatgtacattgtccccacagctggttaattcagagaaaatagaacatctttctctcagtaaatccagcagaatcccaaggagagctttaattggcctagcmtagaccatgtgctcttctctgaagcaatcactgcagccagagtgctctgttgattggccagcctggcttctgtgctcacttctcaggtgggaagtgggattgaactagcttgtccacatggaattttttttctataattctgtttacaaatgaataagagagaggaaagagaggcttggttttagcagattaaaatgtacatctattattgtgtgcaacaagtttcagacagttttcatccttgggcatactgtgcctaggttttccacctctyctaccttgtcctttttccatttgtaggatcctctgtttgatagttctctggtatccaaaatggttgatgtggagaagtgaacctaaaataggaactggagattcccaacaaaggtttattccaactggaagctttttgtttgcagtggtaaaagaaaacactaattttcttgccacatatttgatcttcttgtagccctgtcatggtacctcactgtttttagacagtgatcatccttttttctactgttatctactgacatgttagcatagattggtttatcggattagagaactgaggaaacagaacctaacacagcatgttttgtggggacagaattgaagaaaggtgccatccttaaaggaaaggtcaggrtaagaatgtgggagagccagatgatacagctcttaaggcattaaatttaagccactacctgcttcacggcaataaaggagtaatgaggaaagaaagagaaggagagatctttttaaattttatctgtattaaacatrttcatgcataatagcacttttaatctccaacggtagccctgtgtggtggtatagactgagggttctacagtggcacagatctggatttgtgtcctgcctctctactaactagctatatagtcttaggcaaataaacctgcttatcatctctaaaatggaagtaatagtagcagccatctcctagtattattatgaagattaaatgagataatgaagtatcaaccaagtttagcacatactaagtgctctgaagattatgatgatagtggtggttattgatacatatagatacctgtattttctattgctatgtaacaatttaccatgaatttagcagcttaaaacgacacacatgtgttatctcagtttctgtgaatcagaaatctaggcatggcttagttgggttctgtgcttcagggtttcttacaatacttcacttaagatatcggccagggctggatctcatccgaaggctcaactggtgatgggttcactttcaaactcacttacactgcttttcgcgggattccattccttttggactgtgaactgagggccttatgacctggaacacttggccagaagctgtcttcagttctttactacatggacctactcaccatggatgcttgcttcatcagaatatgcaaaccaagaaggtgatagggtttccttgcaaggtggacattaaaatgtataatataatcacagaagtgacatcccatcacctttgccatattcttttggctacccacattcagggaaggggattaagtatgtcagtaccaggaggcaaggatcattggggtttttcagcagagggaaccaaagttctgagaggttaagtacttcaaccaaggtcacacagcacttggtgggtgccaaacttaattgcagcatatttggctttagagaccttatccttcgacatcttctgtatattttacttatgtcaagctttggacagagaaaagcttatttcctgtggtctagctgtatagttctgtgcaaattagcagtgggatctggtctgattttcagagttcattagtggctgctgttaccaagcagatttatgggtgattttattttatgcattgttaattttgaaaatgttaatctgaaattgctacagtatttcaattaatttgggtgattaaaacttagcaccagaagaatccctaccagaagataaggcagctaattagaggttctgaaacaaacaactgtagacactggcactgaaacacgccatgtgtatgacacccagcagaactcactctgcttaacagtttggaaatggaaagaataatttctgccagtctaaatattaaacttgaatgcagttgaattttttaaaagctattttaaggagttaactatttgaatcaatatatagtttttaaatatcatgcagttctgaaaaactaccttcagattattttgcagtgttggcttttggataactgcagtagtgacagaaatacaatagatatttgttgtccaagtattatttaaaaatgaggcagcatacactttttaaaaaatgacacttgagcttcttttgctagagttttgcattttgtaaagtttatcttaaaatattcggaaaatataaggaagtgtagaaaaagttctctggacaaattacctataatcctctcactcagctaatcaccctgtatacttttgttacacacttttttcctcatatgtttattttttatgtgcagccacatgtttattaaatgcctatgtttccagtttggtattctccttttatcacttaattttgtttcattgagcgaatttgttgattcatttgttctttcaactctttgacaagtatactgacttggtgttaagtgtacaagaatgaacaagatgtgttttccctcacacaactccctatgtcctggagcaaaggtaatggtgaagatttgagatyagggagatacagagggtatacttaaaagaggcatagactttagatatgtgagcatcaggaaatgatgtctaacctggaatccaggatatgagcagggatcaacagcatctaaatggagagaagaggkttgcaggcagagggaacagctccaagaaaggccctgagttggagaaggcacaggatggttagggttggagcaggagagccattcacaaagagaatggaaggaaaaccaaggcaggatcttggttgatgcacatcaaggaattggactttattctgatgaacagattgagcctttggaaaggttttatccagaggagtgacatgggcagctaggactggttgaaaagatcaccctagccgcacttgaatcttgagtcattaaatactcttcagaaaaaaggaagtgggttttagtataatttatkgttgaacattagtctttctaatttttatttttataaatgctttgaggaacatctgtgcatgaacatacttttccatatggctgattattatttaacaatggcgtcatagaggtacaatatctgggtcaaagcatatgaactcctagattttggatgtagatgttgccaaatttaccttttagaaatgttacattgaattatgtccccacatattattggggtatgagaatatgtcttattttatgcccaccaaccttgtattgttcttttcactataagtcattagataggaaaataatagtatcttactatcatatcatagtagttgataccataatatgaacttccttgatttttagtgagatagattattttaatgtttttggctatgtgtatttttttctgagaattatctattatgcttactccctctttctattcaagatttggtgcttttctaaattacttgtaagaatatatgtgtgtgtgtgagagagatcaatcttacatttatcgaaaatatttttatattttttttctggtgtatttgtttctatataaagttttaaatttaccaggagtcaaagttayagacattttatttatgatctgttttactgcttttatgcttagaaaattttccctcctctgacttattaaacacctacttataattttattgtttaatttttgtagcatttggccatttaacttatttttaagtaataacttatttaacttatttttatttaaggaatagattttaattctgtgactaattccaaatgtacattaaaatgtttttcaggatttacattacaagattttacagaatttaaatttatctttttttttttttttttttttttgagacagagtcttgctctgttgcccaggctggagtgcagtggcaagatcttggctccctgcaacctctgcctcccaggttcaaccgattcttgtacctcagccacccaagtagctgarattgcaggtgtgtgccaccatgcctagctaagtttttgtatttttagtagaggcagtgtttcaccatgttgaccaggctggtctcaaactcttggcctcatgtaatcctcccgccttggccttgcggcgtgctgggattacaggtgtgagccactgcacccagtctaaatttatcttttttgttattgcataacaaccacaattatattgtgtactttttgttttgtgctttattatacacatagcttgctaaaattgtaagttatcttgtgcaaagcatgtcacaatacatgttctgtatatataggaaattacgttttaaacaaatataaatacttaatattgaaatastcagttttgttttgttttttttggtaaaatatgacaaactaagcctaacttccccaaggattttcagaagtaggaagaaaaatattctrtggctctgccttttgagttcagagtagctcctcccgttgttcttatttccttttgtacatatgtgtctccctttattttacaaatcctcctcatcttaatttactctgctgctcctgggagtgagactagacctattattttaaaagagctttagttttagtaattcttcatctaagtatgaaaatttcaacttctactttatttgaagtatgcagtagatatgttctcatttcaaaaacagtgtggagattctacactttcaagttctaatttggcaagtcttatatgtcatcatgaaaatattaggtgtttaataaatagactttcttggagaagtcggttgtaagcaggtagaataatgactttggattcctgcctggcatgttgccccttatgatctgttcacagaacgtgcttctggatgtccagatattaaccgttgtgatcatagctacctcttatatcaaatgccccaacaaaatcgtgtgatgtcttcagttcaggacagagctttccttcttgggagtaagaattactctttcagtttgtctagaggacgtgaacatgattagataaacaaaacatgaaagtgtacatatatttctctacctccacctaccattataggcctaacattatagcttttcactcccagaggaagaaactttgccatttcaaaaaactgtaatgccatgctttggggatcccagatttaaatattttatgcatcttccatttaaattcaagcagtatccaagaacagaatctggccaatgattttgagaaaacgaaatggcaacaccttcttggaacctcaaactgttcaaggatttttttttctagcaaaacaggaagaaattgggggaaaagcatatggactcaggttgagcatatgatgtattttcaactcgagtcrgcactttactcatatttgtagtgtgacttaaaattaatttgggtgaagcactcagatttgagggaggaaaaaaaatccctatttgggactaagtcaacatttgtggcatctcattaatcgctgccttatgtaactgctttccccacctaaagagaagctactgggatgagaaaagtttataatattaatgccaagtacagatcttgcctctcccaaaaggagttcattaatcaccatcgaagcacaagaacaaacatacttcatgtctcttgccagtttttttcaataacatttctgaaaggcaaaaaaaaaaatatgtttaatcttcatttgcaaargttttaatttggctgttatttaatttgtgataatgttatgtaaatttaacatgctctgagaatgcccaggcatagggtatagaagtagagtgtgttgrttaagagtttgggcccatggatcagagagatctggatccagattcttggctttgttacctcctctctgtgtggtcataacacaggcaaagcacttcaagctcagtgcttgcttggcacgraatagctggcmaagagccagcagtgatggaaattcttactcttactggtaggaagcagtatgggcatcaagtttgaaaacatgaytttcagtccaagctgctgtgcaaatctttggacaatttaataagcctcagttttctaatctgtaaaatggagatgaaaatactcaccctacccacatacactggcacaaatgatataatgtattaatcaagatagaaaactgaacctagccatggcatacaaaatcatgtcatataattttgaaaagtgcaaagttgtgaaatcatctttattttgccatgtatctcagattctcaactgtaacattatttgggtgatcagtgtgtagtattgattatattttagtgtcagccatgtagttactctctcctctaaggagttttttattaccattcactggaaaatacacagctttttctttgcaattatttctttacctcttttcttctgccttccaatttaaaattcatgagtaatacagcacctcacgaatagatgaaagggatgacaatctaaaaaaaaagaaaaaactaatgtaaacctcatgctggaaaacagaaacaccaatttaaacaatcataaataggaaaaacaaaaaaacctgttgtgcaagaaaaggaggctctagtctacctttatttacaaccatcagctaccgagtatcaaagataggaatggatccatggtgaaattttcaggmattcttgaaaatgtgtttatttctttcttgtctttattagatgtgccctgtctccttcatttctttatttccatggcccctgctactagaagcattgtaaaaagccaaaagaagaacaagaaattctgaggacatgggtgaaaatgcagccttgaggtttctgaaaataacaggagacagacaaggctggtgtccagcaacaatactgggtagctctttttgtccccacttacacagcgaaggataaagaagagatcctatggacacttagtaaggattacttcatgttttaattcaaagtactttggaaagaagactttgagcagagtggaatagcaggaggtttttgtaaggtgaaatagaatgaaagtgcagccaagaatttttctgtcttcaattttaaagaacaccggcataactcatttttctttttttcccctgtgttctttttgaccttcttagcagctcctgactttctcccttggggatttttctctgtatagtcagcgctgactcccttagaaatcctgaaccccacacccgtatcgcgaaagagttgaagagaattcaaataaacacgttgagataagtagcttgtgaactaactgttacagcatgcctctgtaataagatactgccagctagaagctaaaataaagtgaaattccatttaacatgtgacaatcaaaactgtatgtttctcctaaaaatataagctaaagttaatgttagacattagaaattcatactgaaacacctacattcatttaatggtaaatttctttagaattgttagtttcctcctctctagactgtccaaacatagttcctgggaccacgcctgtagtttctttctctcactacaatgaggaaaaagttgatggtttgctaatctcttattctacacatttcattgtactccatgactgcaaattcatctttgtatgatttatatgtcaatcagcatgttggtgaagtagccatggaatgaatgttagagtgatatttgttgatgtactagaggttttacatgctttatttttaatttcacaacaaagctgtgagaggtattatgcccattttacagatgaggaagctacactgagagttgtgacaggtgtccaaattcrtgtaagtaataaacgctgaaactgagctttaaaccaaatccttataaaacttccatatatgtgtttccataactagaagaagcattgtatgtttttaactaatttagcagtcttgtaggaatgcattcattaaatcagtgcactttatcagaagatttattttttagccaggctggctacaattatggatcatgccagatgctcartggagggaggaagtgagatgaagtaggctaaagagaaataatcttggtcagattgaagaaggataagcactcttaattgtcaatatcaaatgaaaggagaaatatgaccttgatgtgaaggcttaaggcagggttgctatcatatgactgtctgggtcctggatgagagaggaccagctgaggtgattggagagcctgggaaagagcttctcggaagggcccagttgggcaaagggcaagcagacactgcagatggcccctcaagtctctgccaaccttgggatgctacgattccaagcaaggaaggaagctcattccacatagagttttagatctttcattagtgtgcctttgattttaacgtgattagaaaataaaatcatagcaaaatatcaggaaatgaccccaaactaatgtaataaatgctgcttctgtttgttttttatactgtcttttcccttaatgtcttcattaagatttgtgtagaaaacagggttttaagcaggatgttgctattttaaataatttatagaggatgattgtttttctgtgttgtgatttgtttgtgtgtgtgtgtgtataataatcctaacataaaccatcatcagcgaaaccatcactaatgatagcaataaaccttatcataaattcatttacattattttgtgtaaaaattgcatctcatttcctaggcacatatggagacattgttggattatatttcctgcattgctaccccattacaggcatgctcttacatgcatgtgtgggtggccagacaatataagtggttaaaaaattagttttgtagttagcattgcacagctcagtgctttttctcactacttagcagtgtaccctagtccatcctttgttactgggggtgttattagcatccaccttccagaatttctgtgtattgattaactgagagactatattgtggaacattagcacagtgtctggctctttgtccatactaataaatggtagatattagcatcacctgatttttgccaccatctatacattcctggagcagaggtatagaaggtgagctaaaacctatagaggcagcttctggataccagactctcgaggccatagccatgctgttgtcttgttttgattttaagtgtccagatccattagagcagaggcagcagtacaagctgctggctcttacatgtttggcttatgawgcctttttgaaaatcaatgatacagaaactccagagctaggctgcctaggtttgaatgcagtcttcactatttaccagctctgtgaccttgctsaagtcacttaaaccctctgtaccttaacttctttaaaatggaaataataagacccacttcatagggttgtcatgaggcttaaacgagttaatatatactaaggtcatagaacagggactggcacataatttatatatatacaaattagctgggtgtggtggtgtgcacctgtagtcccagccactcaggacgctgaggcaggtgaattgcttgaacccaggaggcagaggttgcagtgagctgagatcgtgccactgcattccagcctggtggcagagtgagactccgtctcaaaaaaaaaaaaaaaagtctcaaatgatcttgccatagaagtatgaaagggagtgagggatcagaagccacggtgatcttctgtgctgcttctggaaatagtggctcctggtccagacatcacagatttcacctacctgccatagttaatggccatcacagtcctgaaagcccacacaccaatttccaaattgcagatatcaccttgcttcaggtcactctggcattctccaagaactwtatttttgagaaataagacattaactcttatatttttttcccttaagagtaagaacattgttcgttattcatgagtgccagtagccagttctgtgactttggtagctcatttaacttttctggacattattttactcttgacaattggtgggttggatttcatgatttcaaatacctgttcacatcttagtatcctaatattctttctacagtgaagaggaagggtaaggtgaagggctaaaggaagataatgtgtgtggtgaaaatactggcataaaaacctctattcttcaggccacgtggtgttacttatgaacatagtgaccttgggagcattttctgaaaatactcttccccctccytgttttgattctggaayagtttcctttttcctcacaattctaccttccttcaacagttgcatttacagataatatccttcaccgtttgtttctttatgcatcactagtgtgtgtataaagcagagatggcaagagctgccatgcattttggctgtgtgattttgcaaccaggagacgacctagtaggtatgcagcaatactgacatggagagatccctcctccctctggatcaggctgggacagagtgtttctagtattggcctgcaagacactggctctgccctcagcagggatggctgtgtgcagtcaggtatgtaaaactagttrgctcccacccttgaccttgtcatatgaccgatcatatgaaagtgtatttgtgagctataattattgaggtatctgccttatctcccttgctagactgatagctcctttgaggacaaacacctggtctttatctttacatttcctagggagatttagtgcagaacccttcacacaaaagtgtttagcagtgctgtaccaaggagggtggatacaatgggagtagtctacctactagtggggaaggatattttatcactgacattgctgagaattgctggcccatgtgataagaaaaaccaaaccagctttgattaaaagacagttttattattgtttttaaattatccccagacaatgcaccccttgttgtccagcctgacatgaaccactctcaacccccatattttcccacaatctaacccttcttctacaccactggtatttagtaaattattattcaatttgtcagctgttgtaatagtctcccaattgttcgtcttgcctccaatcctgacttcttttattgactcctccagactatcagaagaatgatttacctaaaggagagacagcatggcctctcctacttaaactcttcagcgcatactcagaaccagtctacagtatattaactataaaaggcccccaggagctgattcatacctaacttatttctactactcctgcaatagcagagatctggtaattttccacatgtactgaattmtttcttgccactataccttgggtcatgctcttgtttctgaacaaaatgacttgacttctctatttactctacttctatatctggttaattcctatttatctatcattcatccatctaaacttaattccagtattccctcttccaagaatcctactttataatactccatatctggtgtgcattgtgggtccctctcccatgacaacattgctatagtattttttttaatggtctgggtgcacatctactttctgcaatctttcataagctccttaataactggagcttcatcttttcatatttatacccatrgtatctggaacatagcaggtgatcaggaaatatatattgaactgaattggaagcgcaactttataaaagggaacactggtttgtggtgtgaaaattctttaacctttttgaaaagccgacctatgctgctgctkcttatactttgaaaattaagaaaatggtttgttcaagcactgtagttctcacttataagtaggaactgaacgatgagaacatgtggacacatggcagtggcgaggaacaacacacactggggccttttgtggggggttggggagggagagcatcaggaataataggtaatggaagctgagcttaatacccaggtgatggtttgatctgtgcagcaaaccaccatggcasatgtttacttatgtaacaaacctgcacatcttgcacgtttactctggaacttaaaagttgaagaaaaataaaataggaggggagggcaaagagtgattgtacaaaacaaggtgaaaaatttagaaaacattatgtaatagctaatgtatgcttattaaaccattaagaaagagaagaaaaaaagaaaatggtttgttaatgagccagcagtcctattttactaattgcttatttttgagactaatgtacaaaaataatgaaaagcattacatttgagtattggtgagcccatactatctttgttaatttttttcatatcataagaacaattaataaaagatttcaaacccacagcatcatagaacacagacatgtcttataaagtgatattttgataaattttgcaagaatcttcaagtgaaaatcatttgtctctaatatcaaccacttagagccaaattagaacaataggagtttcatttaagatccataagtagctgcagtagagtattactatgacactatttgctgaaattataaaggggaatttgctggtaccgaaagtcaaggcaatcagatttttcagcggaggtaaaatactaccaaatgcttcattttgcaaattggcatttttttctttgaagctctgaccactttataggcaattatcttgaatcatgtggcatgtaagtctgcttattacattcttctagctataatatgtttggtgaaagagcttatcaaaccatttttttttcattatattcattttcratccaaagttaccaaggattcaaaaatctagagaaagtttatgggggttacagaagacccagagatattttcaaagcctttccaatagaatactatgcatatttatttttttaagagtaatatttggaccagaaatacttggtttaggacagacatttctcatctttctttcattataaagttattttaatgacccagatttacacaagcctgtaaaacagtgtagaagtctgtatcttagaattccatttgaatatctgcaaagggaaagtatatttttaagttactgaatacactttgcattaggtaattatcaccctcagatgtttccaattaatcctgactaaccagatgaactagagtaacacaatattccagtcttaaatacgttttttggtttatacaagaatgtggatttaccgcatatattcttaaaacataaattcttcaacatatttaaaatatgcttagacttgtaaagaactgtaattgaaaacccagggaagcttcaggaggacaagaccagcctggagcagcccgagaagtcgatgtgcaggtcattgctgtggatagtgagggtttcagtgttggggaatttctgctttctgattgacacctgccccattgtgaaagtgctttcaactgctggagttggatraggttaccaacttttagcttcattgctttgccccttattcatatgactaatatgtctttttctacccattaggcccacagaaagtgtgctttcgttagcgtttttctgggaagtatggtacctcgcagagctttcatttggttagtaaatgttcttgctaaaacgtcagcacataacctgtcaatctggttgcatttgggctataagaagctttaagaccagtggccttgaataaaatccattcaactcttagtgcttttaatgaaatagaaaagataactattgggcctctaaaaacattgatcattgaaaaacagcagcatttgtgctctggaaatgcactgtgtgtgtgtgtgagagagataacttatatccctgtgacattattgtctccacttgaggcagatatttttttttcccttatagaaatcctttcaggaaaaaatccaaactgagcagagtaaaaattgagacagtattcttttgtgcatgttttttgagcttccctaatgttttaactttatagtttttttataaaaacaatttgtcatattttaaaatgyaattttaatcactcggaggaaggggactaggtacatttgtattcatgtcgtgtggggatataagtttgttgacagtctcattttgcaaaatggatttaatgctgaaaaaatcatagcaattcattttttaaaaataacacagcctctttaaatacagtgctctagttttcaaattttaggtctatgccatgtaaacaattattcacattatgaattaaaattctgtttgcttacagagcagcttaattcttttgcttataggcacatagtgacttgaaaatctaagtaataattgttcatttaggagaggaaaataccttcctcaactaatctgtaataccaacttaattttccgtggtaggtagggaaattcggtatcaccaagtcctgtaacatgttagatatacaacagaaccacagttgtaatgatgttgttctaaggacttacagtctaaagccattccttatttgaaatagagaatttgacaacacatatacacgcagaatggccccatattgtcatatttgtacaagcaaaattagtcaagaaatgcagaaaaattttgttaaaattattttaaaatatattctttaatgataaacatgcacatatgctttcatttatttaacaaacttttattgagagattattggacaccaaacactatactttggataaacaattgaacaatttcatggtccctggccttgtaaagcttatattcaagtggggagaaagcaaaacaaaattaatatacaagttatgttaaataactataataaaaattcagaaacacagttgaacaaaggaatgttcagtgtatctgcctgggagggttgcgaagacattgcagaggcggtgcccttgagggattagaatgatccgaaagcatagccttgcactgtggaagtgagtggtttacttcgcrgaggatggtagcaagcactttgggtgcataatgggtcgtgcaagagtggcacctcttgtgtgtacatgtcacagagctgccccgtgaaggaggctggtggggactgagctccagctagcagatcctggcatgggaaagtgtctaccctggggcagaaacttttgttaaataatattataaagttaactacataaagtttagaaaatccatataaggaaaaaagttctcataattttacacatcagatgaaacattgttaatattgtggcctatgtctttatggattttttttctgtacttctttatgtgtgtgtgtatatagatatatttaaaaacaaaaatgaggtcatcttgtatacactgctgcttgtaacttgattttttccctcaaccatatgtttgaacattgtgccttccctgaacacttgatgagattatgtccttttggtttgtgcttccgtagcgtttgcaatttttctaatgtaaaacacataatgctttrtaatatttgcctgtataattttccttttccctgttagactctaagtttttgaggataagggaaaaactgccttgtttattatgttgttcacattccaagcagaaaataagcattgggtgtgtttttaaaaaaattaatatgcatagtgatgaatgaatgccttaggaaaagatgaacaaacagaagctgaaagctgaaataccaacaaattatctcctaggatctccttcactttgcagccacagtgaatgatgtgttccataaaagggaaaatgggtgtaaagtgaaagcttcagtctgtcagacagggaggctataaggccagtggtctgccttggcctggtgcgtatttccgtctttctttctgtgaagaaatagatggatgtctataggagctgccacatgagttagtttcttttctagttaccttgtttcaaagccaagggagccaaatctcaaaatgccttcccactcacttggataattaagatgaaaataacaattayataactgtgtagcagaaaagaagtctttaagtttggcaccttgaaagcagtgctcactgttgccactgrtactcgaaaagtaatgactctgtgggaaaggtctgcaaagaaaggaatctccctttctgagcattgcagggttcaacatgctatgacctgaaactggaacaagtgagaataaactgggaaagaaaaaaacatggagtggggaaagaagtgagtaaattgaaggtgaatyagatgatccgtgggaatactttttagatgccaaggaattttcatttcagttgtaggagagatttccctgatacatcatggcatttctgaagctttcctgtgtcttgaggtgggggaaagggaagtataaatgtttgccattaagaatttggtagtattctggtgatttattcattaacattgtgcggatgagggatggaaaaggtctagtttagccctcaccactctcccttttgtttctcattggagattttattacccaatcaatagattttacagaacactatttgcaggttttaactcatgtataaaaagaagccttcaacaaaaaccaagtgcgggtaacagcatatccttaataccagcatatccttaatactatacataatagctgatgtatagtagaagctcagtaggcatttcctaaaaaatatgactaaatcgggatacatttctgtagattccaagaaggttatgtaaaaatacaaaatatttttatgtttatctacatatatagttaaataaaaataaaagcacttcctcataaaaagaacaatcactttgtcagtgcttctgcatactttaaagaagaaactttggaatcccaggtggttctttttttggacattgtgaagagctgaagtctataggattcgtagaaatgtaagtagttatttttaacaggaccatctgtggccattaatatatttagtaaggtgaatttctttgatgaatttatctaatctccattcgcatttcctatgtatagttttgaagtaacaagtcaggmcttttatacttttttttttctgaaagatggtattttcaaaaatatcttaacataaaaatgcttagcctccaggtcttaaaaatataaaggattccctatttaataaatggtgctgggaaaactggctagccatatgtagaaagctgaaactggatcccttccttacaccttatacaaaaattaattcaagatggattaaagacttacatgttagacctaaaaccataaaaaccctagaagaaaacctaggcgttaccattcaggacataggcatgggcaaggacttcatgtctaaaacaccaaaagcaatggcaacaaaagccaaaattgacaaatgggatctaattaaactaaagagcttctgcacagcaaaagaaaccaccatcagagtgaacagacaacctmcaraatgggagaaaatttttgcaacctactcatctgacaaaggkstgatatccagaatctacaatgaactcaaacaaatttacaagataaaaacaaacaaccccatcaaaaagtgggtgaaggatatcaacagacacttctcaaaagaagacatttatgcagccaaaaaacacatgaaaaaatgctcatcatcactggccatcagagaaatrcaaatcaaaaccacaataagataccatctcacaccagttagaatggcagtcattaaaaagtcaggaaacaacaggtgctggagaggatgtggagaaataggaasacttttacactgttggtgggactgttaactagttcaaccattgtggaagtcagtgtggcgattcctcagggatctagaactagaaataccatttgacccagccatcccattactgggtatatacccaaaggattataaatcatgctgctataaagacacatgcacacgtatgtttattgcagcactattcacaatagcaaagacttgaaacccacccaaatgtccaacaatgatagactggatcaagaaaatgtggcacatatacaccgtggaatactatgcagccataaggaatgatgagttcatgtcctttgtagggacatggatgaagctggagaccatcattctcagcaaattatcgcaagaacaaaaaaccaaacaccgcatgttctcactcataggcctgttattctttagctatatattgtattattgtgtgtttcacgttgaacgtactttattgaggccattaatttgaaaggaagtacggttttctttcattagaaagagatattgaagtattgtgcccagtaggtaaattgaggcaaaatggcatttattgaaatgtttacatcctcatataaattctatgccaaaataaaaactaaaacctacattgcagattttctagtcgtatttcctctcgtatggctgtactaatagcaattagttagcaatttctcttccatgactgtactaatgattaagttgttgaacataacatttttaacaacaccagtgaagcacctgaaaatgcaactgaataacaagtatgaaaatgctgttttaatatccagttctgttttatgtttataattaatagaactttaatcataatatgtgttctgtgaatcccagagaatattttgctacaatctttgcatggaatcctgtgttttsctctccctatggtagctgtgtgkaacttcagttgacctctgtggtagtgtcatgctagatcagaagtaatacgtccaaagtgatatgaaccactgtggtgtctaagacaatatatacccagaggcaactctcgggacaaaacgtcaaaaaggattaagttcctgtgtataacaattctttcttagccgtccttttctatagtgctcattatttcctgagatagccagaaagggaaaattaagagaacataggccataacatttgaaattcttaaaaartaaaaactgattcttatttgtaggccatgatttaatacatgtggaattttcttataaagtcccctttatactacattgacctaactgctgttaaattgttttgtttcataagctgaagtcttactttaattattcaagatacagaggccgggcgtggtggctcatgcctgtaatgccagcactttgggaggccgagacgggcggatcacttgaggtcaggagtttgatatcracctggcgaacatggtgaaactccatctctgctaaaaacacaaaaatcagccaggtgtagtggtgcatgcccgtaatcccagctacttcggaggctgagacaggacaattgctttgaacccgggagacagaggctgcagtgagctgagattgtgccactgcactccagcctgtgtgacagagcgagacatcgtctcggaaaaaaaaaaaaaaaaaaaaaggattgtcttgactgaaaatgggaaatgtgtaaatgtgttgtgtgttgttgtatatgctgaggtcagaagttaggcttatatgcagragtaatgtttactctttttctactcttgggaaagactgtcataggtggtcagagaggaaaggacattgcaggcagcacagagagctaggataatttccttttttatatttttatttttattgatatataatagawgtgcatacttttggagtacctgcaataatttgatacactgatatagtcacatcagggttcattgggatatctaccaccttatgtatttatcttttctttatgcttggaacatttgaattgtgctttcctggctattttgaaatatgcaatggattaatgttaactgtagtcaccctactgatctattgaacatcagatcttctttctgctaagtatatatttgtacccattaatctcttcatctgctacctactaccccacttcccagcctctggtaaccatgaatatactctatcttcatgaattccacattcttagctctcacataggagggagaacatgcaatatttgtctttctatgcttggcttattttacttaacataataacctccagttccactcatattgctgcaaatgacaggatttcattcctttttatggctgcatgtatggctgaatgatgtttcattgtgtatatatgccacattttcttatccacccatccattgatggacacttaggttgatttccatatttcggttattatgaatagtgttacaataagcaagggagtgcaggtatcaattgaatatattgatttcctttcttttggctatatacccagtagtggaattggtggatcattctgtagttgtattttttagttttttgatgaggctctatactattttccataggggctgtactaattagcattaccaccaatagtatatgagggttcccctttctccacaccctcactggtgtttgttatcctctgtctttttgataaaagccattctaaatggggtaagatgatatctcactgtggttttgattttcatttccctgatggttattgatattgagaatttttcatatacctkttgacgactaatatgtcttttttgagaaatgtctactcagatctttagctcatttttaaattagattatttgtttcttcttagttgtttgagcaccttctgtattctagttattaattccctgtcagatgaatgttcacaaatattttctcccattctctacattgttgattgtttcctttgctcttcagaagctttttagtttaatgtaatcgtgttctatttttgcttttgttgcctttgcttttgaggtcttacacaaaaaaccttttcccaaaccagtgtcctggagcatttctgtgaggttttcttctagtagtttcatagtttgaggccttagatttaagtctttaatatagtttgctttgatttttgtatgtgctgagatataggggtctagatttttagttctgcatatgggtatccagttttcccagcaccatttactgaagagattgccctttcctcattgtatgttcttggcgcctttatcaaaaatgacttggctgtaaatgcatggatttatatctgagtttctatctgttccattggtctatgtgtctgtttttatgccagtgccatgctgatttggctactatagatttgtattatattttgaagtcaggtagtgtgatatctccagctttaktccatttgtccaggattgctttggctttgtgttatgttcaggtgcttttataaactgtgattgaacagttgtgcatgtgaactttgtgctaagtgtcactggtgttttagttgagaaatgaggcagaaataaaagttttatttcagtgtgtcatttctatgtataactcttaattttaccagtggactgcctaccagatgatttataacttcttggcacaatttgttattattttaacattcttatttttctttatagcctacagtttacatttttattgttgtatatttttattatacttttagaatgtaggtactatttcattattattttcatatgattagaagccagtgtatatctaacattttccttttccctgttagactctaagctttgtggggataagggaaaggctgacttgtttgagtagcttgttatgctacatttgaataagtgaaaaccataatataattttggtatttaaagttgattaaagaaactctttatgtagaaaaaagatgggaaactaaaaatttggggagataattagactaaggataaagtgagggaaaaargaaggaaggtcagggagagagttagtagttttcagattgatggttgggggaaaaatattgaagtatcaaaggayaaagcaataccagtactattcctaaagttaatattcacctacatttcaaatattttacattgaaaaattgtagatgacaaaagcttataggataawgccttaaatttttagtattcccaattaatttataggaaggagacaatatatatttccaatattataatcccagggttgtagagattttgagactaaatctctgaaattcctacaataatctaaaggatttactgttgtctataaaagctatcattctcactagaaaattttgagtctgatttcttttccagctttcttggaaaagagtagtgatgcattcattaagtattgaaatctgaaataagtacttgtgacctttctgtaatctaatctaaacttatttttcttggtcaatcaaagattccaccgttagtgggtaacaaagtgctttttggaaagaacaccacttttgcttttagctagaatatgcaactggacttaagttgcttcatatgtaaatgaaaatatttggctaaataagaaccttctttgacacaggcactgtgctagcatgtagtgttttcgtggtcagaacagtactacttcaaaagaatacacaactcagcatggtttcagatgttttcccctctctttattatagacactgttaagaaggaatgttcctgggaagggagcaattttttcagttaatgtatattcataggtaaatatgttggtggttgacacttggccccagggaaagggaatttaaaggaaaaattttatctrttttcaaaaaatgaagacacatagttagcctcctcctatgaaacattggtggctttgaataatagttatacatttgcttgattttaaactgataaatgtatatattcactctgctcatgtctgaatccataggattgtaactaaatggttctatctgacttgaattccttttttcacttcagaaaaaggttaaggaggaaaacttcaaataaaaataagrgagrgactaaaccttagagttacctgttagatattgtggtgattgcggatcctcagagtttgaaagtggactcatagaagtttacaatgactgagcaggttagaaattcttccaagtaagtattttaattgtagcaccattttataaataaaagactactcttctgcatttcccttgttctatttcagaagtttgttatggaagaatgtttgtaagaagggtagagagattgttcaatttatgtgcatttttctgtagatatgttgatagttgttctctgagctaagggctccatagcctctttaaaaaaaaaaatcagcacatcgaaatgatgrtgcagagtcatttgcattctctgaaactttgccagtcagaaataccaattgcacatgctcttcattttagcttataaatcaataaaccctgtctgcatgaatctgaatcttttgggaatgcatctgaatatgctctctactactcaagcagaagatcacaggaaggagggaggtcaagagaacagagaaaaataaagaaaagcaagcaaataattgagtgtataggaaataaaaaagttgggtgtttttctttaacataaatgatgcaagtcatctcatttaaagtgtattcaggatgagtataaattattaagagggccttastaagaacctttaaggaatatattagcagttttacatgtcaaaaacaattttatttttttggaaaatgtcagttacacttagcatattgatagttgggtagaagcacaaataaataaaagtagtttaaaagcaagtaaaaactaatgatcaagtggcagtttgtttctataataccaataatarctgaatatttgtatcattaaaagctaaatttggctatgaaaataaatgtttatcatacaaatttaggcaatataaatatatatatgaaaacaagaggagatagatactaacaagtaaacagataactatgtgaattgcaagttcataatgtagactgccttggctggacctgttacaggaaaggggtcccaatccagaccccaagagagagttcttggatcttgcacaagaactaattcaggtgagttcatagagtaaagtgaaagcaactttattaagaaagtaaaggaataaaataatggctactccatagacagcgcagccccagggactgttgattggccatttttgtggttatttcttgatgatttgctaaacaaggggtggattattcatgcctcccctttttaaaccatgtagggtatcttcctgacattgccatggcatttgtaaactgtcatggcactggtgggagtgtagcagtgaggactaggagaggtcactcccgtggccatcttggttttggtgagatttagccggcttctttactgcaatctgttttatcagcaaggtctttatgacctgtatcttgtgctgacctcctagcgtatcctgtgacttagaatgccttaaccgtctgggagtgcagcccactaggtgtcagccttattttacccagctcctattcaagatggcgttgctctggttcactcrtctgtgacagacctacttgctccaggtatttaaggaaccctaagaaagcatgactaaaaagagtgagcaagtgtgaggctggaacaagatgaaactggagagttatcaggtgccagaaaatatatagggtcttgtatgcagtgaccaggagttcaaatttaattttaagtgcagtgagcaagtttttaataggaaacttattatataatttattatttttttaatcaggctgctgtgtgtaggatggtcaaacattataagattgaatgaggaaaagccaattagaaagacagtgcttgaactgggaggtagaaatgaaggtggcaagaaatggtttgattagagagaaattttagagatataatcaagtatatgtgcatgtgtgtgcacatgcatatttggaagggtggcctttgggagagaaagggtccctccctccctccctccctcccttccttactttgtttcttccttcctttttgaaaaaaaataaataaataattgagataaagagcacaacctatggcaccatggtgtttggtcacagtctagtagatataaactctgtacgaagacacaaaaaaaaggtgctatagtctggtacctacactttatactaaataaatactgttggtgtattgagtggtactgaagcaagaagattgagtatctaaaggagtgtatgtttaaggcacttaaaatgcacttaagggaatgttggtaggtgttttagtctgtttaggctgctccaacaaaataccatasactctgtggtttataaatgacagctgacagttctggagtctaagaaatctacaatcaaggtgccagtagattcagtgtctggcaagggccattacagatggctgtcttctcagtgttctcacgtggtagatggggtgagggagctctctagggcctcttttacaagggcaggaattctgcacatggggctccacccttgtggcctaattgcctctcaaaggctccacctctttcrttcatgtccctacaaaggacatgaactcatcatttttatggctgcrtagtattccatggkgtatatgtgccacattttcttaatccagtctatcattgttggacatttgggttggttccaagtctttgctattgtgattggaaatcatcattctcagtaaactatcgccaggacaaaaaaccaaacaccgcatgttctcactcatagatgggaattgaacaatgagaacacatggacacaggaaggggaacatcacactctgggactgttgtrgggtggggggaggggggggagggatagcattagaagatatacctaatgctaaatgatgagttaatgggtgcagcacaccagcatggcacatgtatacatatgtaactaacctgcacattgtgcacatgtgccctaaaacttaaagtataataataataataaataaataaataaataataaaataaaaatttaaaaaaaaaggctccacctcctaataccatcatgttgggaattacgtgtcaacatatgtatttgggggtacataaacatttagtctatagcaatgggtttattagtagaaattatatatgagttttaaggagtragaatagtagttcagattattttttcccttgggttggtggatgagctgaatattcagacatcagtaagtatatgccaggaagaaggtaaagtatgttaatgagaacttgacctgttcaataaatttcaagtaattcacagaatgagtgtaggaaaggagtaataaaatgggccagaccctcaagactgcctattatcaagtttaaattttatccattgctttcatgcagtgtcactgaccttttttctgtccctcaagtactttcaagttctttccagtttcagagcattcacgcatatggctcagtttgcctgttacatttttcctcccaaatgcctactgtcttctcctcaggtcttaaccctgacctgatggcctacccttaaataaagcatcccccactccacacacacccctgtcactctctaatccagaatctctttctaagtggttctttatgatacttttatctggtattattacattgattcacttgcttttgtgtttgtctcctccactaaaatatgagctttatgagggagggatgtagtcagtcttatttatggtagcattcacagtgcaaagccaatatcaatgcatgaatgatctgtaaatatttgctgaataartgaatgaacccatagaacaaagaaggaaaattaggttcttgcaaagtgcccttaatcatttttacttttacgctgttatcttctcctttagatatcctttatgagtggactgataatggttcattttggttgcgagaaagaaaacatgctcagttgctctgggagctgggtgtttatggtaggaggttaacaacaayaaaaaaaaagccaaggggatcatctcaataatcactctggacctcagtgccttagaagaagggaagagtacaggaggctttaagggaatctttctggaccaaccattttataaactagtgatctcagtcatcttttgtttacagaagtcagaaattgttctttgctgacttagatatctgcctcctgcttccatgttctgtaagagcaaatattcttcaatgagtgctgctcctttagactgtctctcttggcctcctcttcagcygctggtgtctcacatgttaagcctatttattgcagtctttgagttaagttaatcaccagccctgaattacttgggtgtagtcagatgagcagaataatgtggtttaggtgataataaccttatgtagaaagaactccctgtggctgctaactcacacgtccacagagctgcatacagacgtgtcaggctctaagagttctacagattgtccaatacagtgcttgctttttktttgtttgtttgttttttgagggcttttgaggctgtttttagaatatattactgggagttattaccttcctcctggaatttgcctagtattggtgagctctcagttgttcaccacttgaagaaaagttctacctcctcctttcctgcttcccaagataacaccagacatgtggcgggtactcagatcatcctgaaacatacatcagccatgtcaagtggcctcttttctaccagtctcattccctgtaggttgcatagaatgaccaacctgaagtagggaagcctgaactaagagtctataaattggatttttgttccatttttgcttctgattagctgttgactttagacaatttattttagtatttagttttataatgtgacaaataaggtggttagactaggtgacaatactctgtaaaattgtgtaattgtgttctttttctatctttaaagaagatgataagatagctcagggctatgcttctgaaactggattccttacatccctgggaatagctgtttgccaggggtctgccaartacatggcattttctcctgaagctttgaccttaaatattttagggaaacattttttccaataaaatgtacatgtataacagaacagaatgttaaatttgcatggattttcaagtaacacatgaaattttatagttattttatatttggtagcctataaacacctttttaataaaggtgaaaaaaacttccaaagacattatcatatctttcatccttgattcatgattcactaatactccagtagacagtgccaaagagtgactagtcagtggttatgaagttgaaggaaggcatctctgcctcatccttgtttttatatgagctgtgacagtgctatttccattatttgagtcatcattgtttataaaaataatgtaggcttctctggtgaaaattttaaaaattattgatggggagtgttccctttgtgaacagtcagttctttagaccagtttgttttccaccaaattgcctgcttctgttgtagcatggaatttttccaccaaaattctatgccgtggttccttttactcctctctgaagaccagcagatcaatgaaaaagtcatgctytcttagaaagagccctataagctgtgatgkcaggggaatcccagcacctagcatcccaggctcaacctgattcttaggacctgattcttagattgtgaacttgtatcaggaaaggtccagatgttaatttataaagggttttttagttgggaggatgacaggcagcacttatttcactgtaattttctcaaaagcaaatttggcagtggtaggtgttggtcatggtgttttgcacatgtacccacaagaatgtgattcccaaacttggctagagtttggatgtcacacctaggaaatttatagaaaaaataatgtacatgttttaggktcctacccaagaattatgaaaggaaaatttctgaaaatttttatagatatgaacatttatttgttttaaagttccctctggatggaggtccatgcccagttgtattgttatctcagagttcacctgtctgtctattccatggactgactataggctgtttgaaggcaggatactttcccttgctttcttctgaaactgccatgcccagcacttatggaatgctgaagtcacatttgatgaatgaattaatatgttatgcttgtgatcagtttcccaggataaaacatctacatgttctgatatcttgtaaaactaattattttttaatgtggctgtgtttagattttaaattgggcctcagaggtgaaaggctagcatattacctacagcccatttatctagtaggcagtactctcctctaagttattgcctcggggaagcccattgcattagggcagtgataacagcatcatgaatagatactaatctatgttgtagcaatcgctcttcttgccctgcttggaagacacagtggttgatgctcctataattagctgttcagttcattgaagtttgaaagtttatgtgaaaattatcagtgaaacaatttatatctagaaaattttctaatagggttctacttagaattaacttttaaaaaaagcacatgtgtcatttggagtgtgtcactcttagcggtactaaattcagatttgaaaggaaattttgtttcaggtcccccttttaaaaacacttctgtattgttttgggaaactccagcattctrcatacctacatgtagctttagttttatttaaccagaaacacacgactattagtagagtgtaactatccttttaatattgctaatttgtttgttaattcctcctgcataagtttgacttgggyattttgtctgatgtaagaccaagcacaattactaatgtgagcaaaagttaatgagcaaaattgtcaagttatatattaagggcatagttagctgtacaacaaagcttttgttgtaggggataaaacaaggtaaaataattaaacatctggcaggagatctaattttggcttagtattttaatcatattctcttggataattataattgattatataaaagttttaggaacttctaagattgcccaaatacatatggtgaaagtacatgtgattattttgcatttaatgtctgaaggtagttgcaatataaatattcatatttgggtgagcaacactgtaactcagctaacacatctgttgtaaataaattctggagtggagagaaactaaacaattgttgggtctgtattttcccaagaagagagaagcaactttctgagattagttgtgagtttataatataatgaaatgtgtatttcttgtcattttttaaggaatatgactgtctgtttccaattaatcactgccagtgaggaaacttagagttcaagttttgtagtttacgctactttgcacctcagcatcctttgaagtatggtagccaagggaaaatatggagttttttaaggaactggtgattttaagcctgaacaaattttgaaagactaatctatgaaaaggagatttgccatcttcagcataattccagatggaaggcagtaggtcaatggagagaagttacgtagagatttttaagtaagtttcaagaagaccttattaataaactctgcaacaatgactgagttgtcatggggatgtgtggtgaatgttctgccctggacatttttaaacagaggttaaaaacctatcagaggcatattttctaaggggagaagaaaacctatattaaattaatactaaatgactgttcgaaatatraacatctgtaaatctaatttattctccgttcttgatctcatttgtgaagtgtgatgccttctgtggcagtagattgtgttaagaattttattgatgattgaatgctgacgtcaggtttaacccatttcctcttaatcgcaattttttgtcttccagttaatgtgagtgtgttcacattcttagcaatgtaatggtgcctttttcataagtggaaagatattaaagggcattttggatagcaaccatttatcccacctgtattgtagaacacctactatatgctaaaatcagaagcaaagagcaarttgtcagaattcattatatcgctgtgcccttgtttcattccttttatcctttgatctctgtacccctgacaacagatcatgctgaaattggaagtgctgacagtaagaaataaattgccaaagataaccctaacaaatgaccaaaaaaaaaaaaatacattccattatatcataaactcacaacccattccacaaaaaaccatatgagttgaagaaacactatactttgtaagttgattatggctgaatagaggttaatgacaatgtcctagtggctatttcctgggcttaagcataattcttggcaagggttacacatttttgctttggggaagaggtcagcaacatacctatagtagtgtgctactaggtgaacttcytaaatgaagctcataaccaagaagaaagcaataccmgaaaagatagagtaaataaaaaacttaggaataagtgggactagaaaagctagaatagctaagtcctattacttgaccagagtatactagtgtatactctgtatactcgagtatacagagtatactagtgtatacatactagtgtatacactagtatgtaccctttgtaatgttaaatataattttacatgttatgggcatgtggtgggcattccagtccatctacagaaagacatatgaggcagcattgctccatccctaacaccttacagcctcttatggagcctgggcatttctgtattttaatccctaatatatatttgggtggtgaaatgtcatcaaagttaattttttcctaaacactctgtgaattttcagttgtttcttcttaagaatgattgacttgggcatgttggcaataaagaaacagctctttccatcatttgtcacatgacgctgctccctttttatccctgtggctcttggcaacagaaaactgcagtgaagtccacggctcagaactggccccagtatttgagaccacatcagctctttgaggtttaaaagatcttctttcttgacttccgcctatatttaaaactgtcagaaaaacaaaattacccagggagtctaccaaacaagatgctttccttgccctaggtatgctcaataaaaaggaggtgaactgcaattctctcccttaaacacggagttaactatcatgcaaaccagactccatttaaaaaattattccactttatattacatcctcttccacctgttggagttcttaatcacttgtgtatgggatatttaggtttcattttaaattagcagtagcaacttaatagaatatgtaaaataaactctctatactaaaggcatttgcagtgtattgagagcaagtctgttaaacatttaactgagaggagttctcttatagagtgttgtttaggggaaagtcaatgaaatctgctgttggtgttagggtgagaccttataacatctggtagggaaatgctccatgaatgtgagattaaaatcatccctctgggggttctgcggcacaagaacagaagcaaaggaggatgtagcaactcctgacaagcctcagcagtcccagcagctaaactggggtgaagggcacagtgtttttcaacctctgcctcctgattggattgataaacaagtgttgactaaaacttttctagtctgttcagtttatagccacacttgtttttctccctctggcatgttgttcaaaagaattttgaggactttaataaactgtttgctgaagcatttcatgtagcttttgagagttttctaggtaacttggacatctagaactgaatgacagtcattcatccttctttacatgtttagtgcagcattttcagccagttacagcttcaccatggttaatcattagaataaaaagtcctgaagcttaataaaggcttcagtccttaaatgtgcaaaaaatatcatgtttatgagtggacctctcttasttgggagcagtttcacctgtaaatgaataagtgactgtgaggttgtccattgtgaccagtattgctgcacctagacccatgttcarttgaagctgctgttctctcaaaaatgaaatcgtgaactgaggccttcattgcacattcaaagaaatacaaagagaaggaatggatctgtatttcaaatatcattggtgctattggcttagacatattccctttattgggtctgttttgcaagcctaaatttgagcctgaagagtttctccatatgaatgtcttaagtattgcagtggcacatccatcacctttttgcttttgaattacaaagataaccttaagatatgatccatatactgggcaatgtgatacatacacagaaaggatgagcctcctcagtgatgaaatcagccagtgcccaagaggaaagtaataggcagaaaggatagagttgrtgaaaaaattgattcttttccattaaactgtacgtgatgtgttttttatgaagcaggcatcagctgaaggagaaatattttttcaactaaaaaagagattgatggtaagggagaggaaaactatgtcagggatcatgggataaatatgtgtcttattctattaccatctcatataatgagaaagttgaaaatcattctattatagttacttaaaatgtttacttggacttggtggtattaacactttttaatgttaataatgacattttttgtaaagttcatgtagacttcatgcatcattgttttctcarttctaaaacttgtttggcttattttcaggtttaccaaagatgcaggtcattaggaactattctggaacaccacccccagctctgcatgaaggacccyctttacasctccaggccggggataccgttgaacttctgaaaggagatgcacacagtctgttttggcaggtactgttgttgcaggaaaggggtcctgatgcagaccccaagagagggttcttaaatcttgcccaagaaggaattcagggcgagtccacagtgcaaagcaaaagcaagttgattaagaaagtaaaggaataaaagaatggctactccatagacagagcagccccgagggttgctggttgcccatttttatggttatttcttgatgaaatattaaacaaggggtggattattcatgtctcccctttttagatcatattgggtaacttcctgacgttgccatggcatttgtaaactgtcatggtgctgatgggaatgtagtagtgaggacgaccagaggtcacttggttttggtaggatttagccggcttctttactgcaacctgttttatcagcarggtctttatgacctgtatcttgtgccaacctcctatctcatactgtgacttagaatgccttaattgtcagggaatgcagtcgagtaggtttcagcctcattttgcccagctcccatttaagatggagttgctctggttcacacgcctctgacactatccgaattacagtttgttagatttaatgcatgatttattactgcttaaagaaaaatgactcttgtctttagaaactgcatgctttcagcttcagaaactttacatgatatgcggaaaatattttttattaaccttttttatatttactaatgccaaagttgcaacaaaaattggaacactagagaaaaatactatcagtgctgtggggtcataattatcatttttattaaaaattcctactttaccagagcattttttccaaaccraggacctctgggtatgatctaatttgcatggctttaatatattaacagttcacttcaggggaactacctaattagcttgcctgtggccatttctgaccatatttgctttttacctacccacagtaatacctggagttctcagaggtgctctggkcattattcataaaatctatgaaatgtgaaaagtaagtgagcatgttgatgtttgcccatgatgaaatctctcttggccggtggacctttttatttggttgaaactttttttgaacttaggtaaatatggtattatgttaagattgagtaaagctgttcattaaattctcgaatttcatrtgtatgttagaaatatttcccaatgatgttgaggaaagaattcgttaaaaaatctattgtgcattgagggaaaaataagtgaggaccaacagaaaggttatcacgagtgaaatgtggttagaggtaaaaagagagaaatcagagaaaagactgttggataataatcaattgtgcacatgcagaagggacagctattttatttgcttacatctattttattgtctgtcatcttgttatataagaatgcccaaagattgaacgtttgtctctaaccaccatttcaattgtggtagccagtgatttttccaaagctccaccattcttcttaagtatcccactccttccaaacttcatccttcccagaaaaagaaaagagagaacaacagacttgaattctaccacctcttcagaccacttctgtgtctgtcagcttaaccagaaaacatacttgcatttgtagccataaggttcctcacattcaagacttatctttcttcttggactttttatcccgtattccatcagctggcttttgactcctaaattttcaacttcattctctccactggctcattttctatagtatataaatatgctcagtctcctcccatattaaacacataactcagccttttgtctggtcatgccagacactctttcaccctcttcctctccacaaccaaagctaagcttgttggggaagtagtctatgctcactttctaccactccatgtcctattcataagccagcctcttgcagaaactactccttcttggatcattagtgcaactttatataaaaacagctttgagatggatggtaaactgtgcatagtttaagtgtacaatttgataagtttgaacacacacataygtacatacatatatataagtgaaactatcactataatcaggataataaacatatccaatatcatccctaaaagtttttgtgccccttggtaatccctccatcatgctccttcctgttgctttgttccgccttgcrcaacaaccctcagcaaccactgttctgctttcagactggagatgagtttgtatttttttagaatttgatgtgcatcacatagcatatattgttttttgtatggcttatttcacacaacatgattatcttgagattccatcacgttgttatgtgtaatgatagttctttctttttatcgctgattatcgttccatgtgtggagatagcacaatttgtttacccgttaacctgttgatggactttcaggttgccactagtttttggctattgcaaatraagcttctatgaacattcaaatataattctttgtatggacataatgcttttatttttcttagatactaatgccaagaggggaatatatagatcatatgtagatatacatttaagtttttgagaaattattaaattgttactcaaagtgcctataccatgttacatttctcccaactgtatttgtgagttttaggtgcctcttatccttgccaacatttggtgtggtcattcttttttttttttttttaaatacagggtcttcctctgttgcccaggctggagtgtgtggtactacaatcgtagctcactgtagcctcaaactcctgggctcaagccatcttcccatctcagcctcctgagtagttggaacaacaggcatgtatcaccatgcctggctaattttttagagatagtgtctagctaagttgcccaggctattctcaaactcctggcctcaagcatccctcccacttcagcctgccaagtagctaggattacaagcatgagccagtcttttaaattttatttattctagcaggtatatagtggtgtctcattgcagttttgatttgcatttctttaatcattaattcattaataatgttgaacatctttttgtgtgcttgtttaccatctatataactttgctggtgaagtgcttgttcaaatattttgtcagctttttaatgagccatgcatttttttattatttggctttgagagctccctagatattttgggtaaaagtccttcataaaatattttatttccatatgcttctcctaatctgtggctttttttttattctcttgataatgttatacatagaacagaagtttttacctttgatgtagtccartttgttaatttgttctttatatggatcatgctaaaggtattacatctaacaaatctttgcctaccccaaagttacaaagacattctcctttgttatcttctagaaggcttatagttttaggttttacatttagatttatgattcattttgaggtttttttttgtatatggtactaaggtttttttacatgtggatatctaggtgctccagcagcatttgttgaaaacgcaattatttctccactggattgcctttgtaagtttgtagataatgtgttgtccatacatatgtgtgtatatatatctttatgtgtatgtgcacatatatttatatgtactatatatgtgtgtrtatatatatatctttatgtgtatatatgccgtgtgtgtgtatctttatatgtgtgtgtatctatatgtgtgtgtatatatatcttcatatatatgtatatgtaggtctgtttctggactgttattttgttacattgatttctttgtccatctttgtaccaatgtgatgctgtcttgattactgtagctaataagacgtcctgaagtcagacaatgttagtccaaatttgttcttttccttttttcataggtgttttgggtttccttggtcctttgcatgtcaaatgaattttgcgatcaccttgtcaacttcaccaataaaaaagcttgttgagattttgattggaatctcattgaattgtagatcaatataggaaaattgacatcctaacaagactgagtcttctaatcactgaacatactatactcctcatttatttaggtctttaattctcagaagtgttttgcagttttcagagttaaggtcatatacatcttttgtcatatttatctgtaattatttcatatttcattttgatgctattataaatgagttttaatattttaatttatgttgttcattgtgagatatagaaatacaattgatttttgtatgttgatctcttattctttaactcttattaaattcagttgttcttgtagctttccttwtgtagagtccagcagattttgtaatatagacaccatgttttattcttcctttgcaatctgattgccttttatttctttttcttgacttgtagcaatggctagaatgtccagtaaaatgtcaaatagaagtcatgagagagtatatccttgccttattccagatcttagaggaaaaacattaagtctcttaccattaagtatgacattatctgtagtttctcataaatgcccttcattaagttgaggacattgccttctattcctagtttgctgcaagttttcatcagtaatagatgtcagatttttctcaaatgctcttctgcatccattgaaatgatgatataatttttgtttttattaatgcggcaaatttgactttcatatgttaaatcaatatttattttctatgattaaatcccaagtggcaattatatattatcttttttatatattgtttcattttcatgtaatacctttgtctggtttggataataatgtaatgttcaaggaatgaattgggatctagtcccttctcttcaactttctaaaagagatttatagaattagcattatttcttcctgaagtgtgtcgtagaatttactagggaagctatctaggcctagagtttccttagtggaaggttttgttttgttgtttgtttgtttattttgagacggagtctcgctctgttgcccaggctggagaggctggagtgcagcggcgggatcacggctcattgcagcctctgcctcctaggttcaagcaattaccgtgcctcagccacatgagtagctgggattacaggtgaacgtcaccatgcccggctaatttttgtacttttagtagaaatgaagtttcaccatgttgcccaggctggtctcaaactcctgacctcaagtgatctgccctcctcagcctcccaaagtgctaggattacaggcgtgagtcagcacgcctggcctagaagtttaaaaaaaaaaaattataaaacaaacatatggctattcaggttacttgcttcttctcctcgagtgagtttggtagattgtggttttcaaggaatttgtccattttgtctaagttgtcaaatttaatggcatgaatttttattcataatatttcttcattatccttttaatgtctatagaatctgtggttgtattatccatctcattcccgatatcagtaatgtatctctttttgcctggtcagcccgactagataggtatgcattttattgatcttctaatagaaccagattttggctttattggttctattgtttttttcccctatcatcgatttctgctctgatttttattactttctttctattcttttgggcttaatttgctcttcttttgctagttcgttaaggtagggtgtttgctcactgatttgtgtactttcctttcttttgctagtatagttagttagtactgcaaatttctttctaagtgctactttgctgccttcccaaaattttgcaaagctgtttattttcattttcagtcagttcaaaatacagatggtccttgccttatgatggtttgatttaatgatttttcaattttatgatggtgtaaaaatgatacacatgcagtagaaactatacttggagggcccatgcaaccattctgtttttcactttcagtacagtattcaataaattatatcagttttcaatattttattataaaataaactttgtgttgtattattttgcccaactgtgggctaatataattattttgagcatgtttaaggtaggctaggctaagctatgatgttcagtacagtaggtgtattaaatgcatttttgacttatgatattttcaatattcagtgggtttatcagggcataaccccattataagtcaaggagcatctgtactttctaattgctctttcagtttcttcttatagattgcttaggaatacattaattagctttgaaatatttagggattgcccagacatatttagaattattttatggcccatctccactgtggagtttctattctaatctgctgttgcatgatatctgagattaccttctaactgatctcacctccagaatcttatggtttattgtggccataatccacatcactgcaaaattcaaatgcaattccataatttcttgttaaagtctttcagtgtcttccttctaaccaggcagaattgcctcttatttattctttccttatagtaatgatgacaacaatagcaccaacaactaatgttcactatgcatttttatgtacaaggtagagttttaagaatatctttgttaatacccatgatactaatgaaaattctataaaatgaattactattattatcctcaatttatagatgagtgaactgaggcactgtgaggttgaatagtctgcccaaagacacacagctagtaacttagcagagctgttattcggacataggaattccggccaagagtccaatctctttactattacgctctagcacttcttttacaatcatgttatttatgatgaagctcatgctgccttcctaaacttcatgcaccttagggatattgggatggtggctgtctttatgctaattaaagaaactagttttgtgagtttctttcactgtcaccatcaaatttgtggcagtgtttcagttttgtgattttttaaaaaatttattttattatactttaagttttagggtacgtgtgcacaacgtgcaggtttgttacatatgtatacatgtgccatgtttgtgtgctgcacccattaacttctcatttaacattaggtgtatttcctaatgctatccctcccccctccccccaccccacaacaggccccagwgtgtgatgttccccttcctgtgtccatgtgttctcattgttcaattcccacctatgagtgagaacatgcggtgtttggttttttgtccttgcgataatttgctgagaatgattgtttccagcttcatccttgtccctacaaaggacatgaactcatcattttttatggctgcatagtattccttggtgtatatctgcyacattttcttaatccagtctatcattgttggacatttgggttggttccaagtctttgctattgtgaatagtgatgcaataaacatacatgtgcatgtgtctttatagcagcatgatttataattctttgggtatatacccagtaatgggattgctgggtcaaatggtatttctagttctagatccctgaggaatcrccacactgacttccacaatggttgaactagtttacagtcccaccaacagtgtaaaagtgttcctatttctccacatcctctccagcacctgtygtttcctgactttttaatgatygccattctaactggtgtgagatggtatctcgttgtggttttgatttgcatttctctgatggcaagtgatgatgagcattttttcatgtgtctttcagctgcataaatgtcttttgagaagtgtctgttcatatccttygcccactttttcatggggttgtttgtttttttcttgtaaatttgtttgagttcattgtagattctggatattagccctttgtcagatgagtagattgcaaaaattttctcccatkytgtaggttgcctgttcactctgatggtagtttcttttgctgtgcagaagctctttagtttaattagatcccatttgtcaattttggctttcattgccattgcttttggtgttttagacatgaagtccttgcccatacctatgtcctgaatggtattgcctaggttttcttctagggtttttatggttttaggtctaacatgtaagtctttaatccatcttgaattaatttttgtgtaaggtgtaaggaagggatccagtttcagctttctacatatggctagccagttttcccagcaccatttattaaatagggaatcatttccctatttcttctttttgtcaggtttgtcaaagatcagatggttgtagatatgtggcattatttttgagggctctgttctgttccattggtctatctcactgttttggtaccagtaccatgctgttttggttactgtagccttgtagtatagtttgaagtcaggtagcatgatgcctccagctttgttcttttggcttaggattgacttggcaatgcaggctcttttttggttccatatgagctttaaagtagttttttccaattctgtgaagaaagtcattggtagcttgatggggatggcattgaatctataaattaccatgggcagtatggccattttcacaatattgattcttcctacccagttttgtgattattatataacagtttattatttctcataatgctakgggtgataaggtggttcttctgcttcagttgatggttggggtggtgggagcagctgtaaggtctcgaatgcccrtgtccacaggattggcagttagtgttagcctctgtctaggaactcagcagaggctttctgcacgttgacctcttcagtggttccttatctycctcacagcatggtgatcgcagggtacttagacttcctatatggtagctggctcccaagagtgtaaaagtggaaactgctrgaccttcttaagcctaaacaccagagctggtgcagaattacttttgccrcttttttttggttaaagcaagacatggccagcccagatacaagaggaaggggaccataccaatcaaataccaggaggtgtggttcaccaggataccaaaataacagtgtgccacagacagaaaacattttgaagccgcatgagcagccctaagaataaaatggttttgtgagctgttccaagggcactgaaagccaatcagtttttcacaacaaagaaagagacaggaagtagtcaagccaaacacaaaatgttgaagatcttggtgygtataagtgrcttgcaaagtgtggtgtttgagatcactctgaaggtcatgcaggagtcctagaaccatgcctaatgtatgcttagaggcatttagctttagaaagataattttggaattcatatttttctaaccaagctctgtttcttttcatcttttttttcttaaaccttagatttgtaaaacttaattatgtatagtatcttttttcatttattcactaatttttcctatcacaggtttagatggtgctttcaattattttcatgttttgagattcattatttccttcattcctcacagccacataatgttaaaagtagaactataattgagattctgtgacaactagcccagtgccattttttactaaatrctactgcctcctattctttctagacaaaaagacattattagttgtcatttcctttcagcagcctataaacttgaagattttctggtatagtattagaatggttttggagacacttaggagaatcataggagaaatgagaacccatggatgacaatatatatgggtatgtctggggtatatgtaatgattagaaacaagtaaggctaatgtttagaacagagaaaaacaacacatttatttcagatagcaagtatgcattgagtgccaactctgttcactactcagacactgctaacacttcaattatcagttcctatcattggtttgacattaggtctcctgtctttagaagaatcattttgcttgccagcagccagtaatatgtttgagtttttgcacacatatttaaagttcatctagtgtttcccatacagatgtaacttgggtcagaattgcgttatggatacttctaagccaatcaaagaatttttagccagcaaatgctagttttattgaaatgaaccactggcagtatgagaaaaactaaattcaagtcatgtatctgtagccaaatagctatatggctttggtcaagtcatttaatcattatgtagcttagtttcttcatgtattacctgagtggggctataccagagcagtgcttaccaccctgactgaatcacctggggagctttgcaataatgtcaacacacagcctcacttccagagattaagacacagatggccttggttgagcccaggcataagtagattttataaaaccccagatgaatctaatgtgagccattgatttgattatctaattggtaagagwccatggtaattttgacactatccccagctcaccagttggtaattggtattattaaacgtagctacaaaataaggtgttacacttttacacygttggtgggactgtaaactagttcaaccattgtggaagtcagtgtggtgattcctcagggatctagaactagaaataccatttgacccagcaatcccattactgggtatatacccaaaagattataaatcatgctgctataaaggyacatgcacacgtatgtttattgcggcattattcacaatagcaaagacttggaaccaacccaaatgtccaacaatgatagactggattaagaaaatgtggcagatatacaccatgaaatactatgcagccataaaaaatgatgagttcatgtcctttgtagggacaaggatgaagctggaaacaatcattctcagcaaattatcgcaaggacaaaaaaccaaacaccgcatgttctcactcataggtgggaattgaacaatgagaacacatggacacaggaaggggaacatcacactctggggcctgttgtggggtggggggaggggggagggatagcattaggagatatacctaatgctaaatgacgagttaatgggtgcagcacaccaacatggcacatgtatacatatgtaactaacctgtacattgtgcacatgtaccctaaaacttaaaagtataataataataaaataaaattaaaaaagagaaagtatactagagtggaagaagaaaataagagaaaatttagatgtctccaaatttcttattcttttaccagttttaatgttatataatcttacaaatgtactgtgtagggaccatggaacagttagctgactctgctaaacatgtattatgcctgcattttagtaagtttacaattttagttataaaggtttagtgataaaattgtaatactcatatttaaatgtattatgataacaatrcatttagtataaatataaattttatatatctgtaaataaaacagtatattttatgtctcaaaaaaaawtaggtgttacaatactttggctttgatagttaccaaataaggggtacctttttgacaaattagtgtatgatttaaaaaatcacttgctaaacagtctttgtaccgaacttgatatagtcttctctaattgaaaaaagcacttaagatcttacaatgtttcaaggctgtcatgattaaattagcttttgtttcatagactggacatatggaaggtacatgtaggaaactgggttgaatctgtacttactcaatggcgtaatctggaatgccatgtttttaaaaaaattctgaacaaagacctttcctccttattgggtctaaatgtggaatcatgtactggttgatcctttgaagccatgtgtttttttaggcatgtttacagtggccccttttatgttaayttgctgattttcatactcaaagaagacatgtactttatggcttgaatcctaaaatatgtgactcccccactgggaatgtgttttaattgtttttgagaacatagtttttaagcacctmtttttggttccttcctaatcttcagagtctacacacttagctctggagaagcaagttatgtgtttaggaaataatagcttattttgctgagtgttactgactctgccatctataccagtgtgactttaaatagattacttactctgaagtgggcctcagttttatctgtcaagtggaagtaacaatcactgcatacaaaataaagcaaatacacaaaggagttctagcacagtgcccattaaatagtggctcctatccatccatccatccatccatccatccatcctccatccatcctccatcttcttccatctttttatcctaccattcatccattcatatacttataaagtgcctactatgtaactgastgtgtttcatgttgggagaaccagaaactagagaacccgtttctaacctggaggcctccatgatgtaaggaatgatcagaactcaggataggtaatgcacctggttttcattttgagttttktaattaaggtttttgtaaatcatattgttgcaaatatatctagcgttaarcctatagataaaaatctagaaaacttatcgagatgttacaatggctttgtatttgatttcaaaaatgtcttttgtactagttaggtgctttggcttatttggaaatttttgagaagttatgctttctgacctgttttctctgtttttgcaagttgatgacttcactcattagtgtgggaagtcagattttgtagtagactgtcatgttttccacatactctatgtcaggagaatacaaattatcctctactatatatcaggaactttctttctttgaatagctattaatttagtctgtattattattataacaacagtaatttctratgctattgaatgartgggctatctgcattttcattattacttctttcaaacaatgaattatcaattgagctgtaaaaatgtactctgttcartctttgcatttcaggattccttttggcagcattttcttttcttctttgtcttcttctttttttcttcctcttcccttgaaagctctataaaattgccttcaagtgaaatgaatataaaataggaaattggccatttggggcacgttttctagtgcaggtgtaaggcatagtttttactaagcctaacaacatgcaggacaattctgatcgtgtcatccaattgatgatgataaacatgttgcttttaagtctttgttgcaatatgtgataaaaaagtcttagtaactcctgagaatatccttcatgctggaagaaattgttcatattacaaactttattttcccagaaaagataactatacttatcacaaaggaagagagggcaagacagagaaacaggcaaatgtaaaattaagccatgtcatctatggtttctattacaatagaatgcatagaaaacatagaaatatgtgttttcttcttagaataaagactgtgaaacagtgaggattctgtgtcttatatcatggggttttatttgctccattgtcatttacgaatatccaaatgttccacagggagagttttgtaagctaattggaaccaaaaggcaattataagcagtagaactgtaatcagtgccaaaaataatatatatttttatccacaatgcaagttaaataacttagaaaatagttgtgatacttcaygcttactaatcatacatctacacgatctttattctaagaagtgaaaatgtttttacacacattccgattaattcacaaggtcttcataaagagggtaaatggaaaatcatgttaccttcatttagaactgtgtctttaaagggccaaatttatgacctgtttataaaattgcagttgtagagttaaaactagagtccttttcagacttgtggtcccctactttagttctatatattagaccattgtactttgttttaggagagtcatttaattttctaacacctctaagaaaaacacacttttaaaggcagttttgttattttttggtagaaaaaatagtaaacaaaacatcactttatgtataactttttgtgtaacaggaagagtcacacagaaaataaaaagtcagaaagtaagttgagcttagagagaacttggaggttctcaggaggaaggaagcatttctagtcatgctgatttcagaggcaacgaacctgggggctggtgggctcttgacttggccaggggcaaccaggtgctggattccctgctaccatcctctcagccatccagacacaatggtgatgaatgttctgtaagctggcctttgtcttagtttaccttgtcaataatttttacttcccacaggactgctgtatttggtcttcaaacagtccaggtgactygcttttttttacagatactttttcttcattttaagctgaatagaaaaatgaagggctgattagggggatctttttcacaggagacctgttttctcaaacctccaaccattgatgtatatgttaccctcttcctggttttccctttcacccccgttstgtcagctaaatccttccttatcatcaaggcacaatactgggttgccttttctgacgtcttctcagaaccaaaaaggcttctatcataacacccatcatactgtgtcctaagggtctttttatccttcttcctgcctggttagagcactccagaaatataaaagctatgggtttcattactttatctcagttcctagaataaaataggcattcagtccataggtctggaatgaataagcctatttagagttgtgatctccataaggtgttatttacaagttttaaaaggaattgtttattaaattatactttatgatgtcatttgaaagaccattaaagtattttttcatctgtcagatttaaatgtgccttttttctctcagaataattttaaaactacttaacattgtttcctcaaatttctcctctataaaatgagattttaattcttaaatgactcatggagtgttgtgagtctcataggaagtaaacttgaaaagagattgaaaaggagaaaaaagtgtatttgggtataatgattaatgattttgaaagacatgctttattttccrgaaatggaaaaatgataatcaggtattttttgtttctggttttgtttttaggtttcctcttcccaatatttaatgtgaagagtcccactggcacatatggtctcatagaagactattctgccttcccaattctcatacccagtttttgaaatttctttaatcagagattaaacttttacttcataattagacataaaaatgcaaatgatcaattctgaagagattggttgatttaaataatcatcagggtaaaaatcatgagcccttttctcagagcaggtttgattgaggaagacccaggatacctcacagagagtgatggagatggggaaggaaaaagagagakaggggtttacagaaaacaaacgctgcctagggaatgtgactgagaacataagtgatctgtgcaataacgcacaacccagaaaccctctgagcctggagaagggaggtgcagctgagtggagttagtagatctttccctccagcacctctccctgaaacttcagaartcagtcacttcaaaggattcttttcctttgccctagattaaaaggagacttctaatcctttctagaccacacaacaatattagctccagtagaattttctaaagctgtgtatttttcttcctgatctaaaattcaagtgttagtctgcatcatcatcagagkcaaagaagaacattacagaaatgtaagaaagaatcagatctcctttgttaagaaaactgattccggacaccaaaagactcattgctttgggttataaaccagagagtaaacatttcttggaactggtaagtgtttttccccttcagattcctatccaagggcatttcttcatgatgtctcaaactcagattttatcatggcaatgatccttttaaggcagtgttggagcttgttttcccagtgtcccgctgttcatcttggcttttcttctaaactgcctcttaccactgatttattaaccccatcccttgagtaaaatcagtagaagccaaggcagaattgaaactgtggccatggggataaaaagctatgtgaaagtgtagaggctcagtcggcattagtatgtcctgtaatcatgagaccttgattttgrcaggtatttgcctgtaaatactgagttaaatcagagtccctaattacaggaaaggagaaaaaggcagtatgtgactgcactagaacaagggaggccttgggagagatgattatagaagataataggcattagtaaaggcctgtaagaaacattttccctgggtgattgtcaactggctttgattaaatagatcataaactgaatttgcaggaatgtttccaagtgtacagactgtagtatgggaattggcaggcctcctgacaaagtgggtgaggtcctaattgttaattctcaaaatgggcatttttggttaacaattcttgtatttttccaatacttggtacagtgcaatgtaggttataatatacttagatgaggacastgccatctaagtagaagttcagacaatgaagtattatcyctttttttttcctgcagggtaagggagtaacattatgggagaaagttctgagaaattctgttgtggtcctttttcttccattattttattactatgtaagctacattctgccataatgactaaaagtttgtgtcaatcacagaatactttcagtgggcyatgaatttggaattccatctgacgtgattattgatttgatggtgcaagtggtttcagtaaagtatgcatgtgcacatgcccttaagagttgtggccaaataatttatcaaattatagcatatattgaattttaattattcatgataatttgaattcctgaagaatgaatcaatgaatgcaatttctaacaaatcaacctttatgtgcttcggaaaatagaccgcttcacactgagttaaaaacgtcactaagaagctgaaatgtccttgtcttctgtaaataaatgctatcagattaaattactggcctggcacagtggctcatgcctgtaatcccaacactttgggaggctggggcragtggatgatttgaggtcaggagtttgaaaccagcctggccaacatggtgaaaccccatctctactaaaaatacaaagattagccaggcatggtggtatgtgcctgtaatcccagctactcgggagactgaggcagaagaattacttgagcccgggaggcrgaggttgcagtgagcagagatccagagatcrcgccattgcactccagcctgggcagcagagtgagatgccgtcccaaaaagaaaaaaaaaaaaaaagattaaattactgacacacatcatccctaattaagaatttgtgsatcaaatgttttttggccaaccatgactgagtggagtactgtgggggcattgcaaaagtgcttatataayataagcaaagaacattggtggtagccgagacattggaaatccttaggtcgtgctctgtgtttcacaggtgaggataatgaagccaagaagggttgaatgacctattcaagatcagaaggccaaaaataaaacccaggctcccaactccctaatcctatcaaattatcacctcacaggttttttcctgatcaaaaatatcacaaaaatctatgaaaataaccaaagcaaaagtgaattaaggaaatggcattgtctgaatgagatccttgaagattgtgtccacgtctattcatttttaattccttagtatgtaacacagtgccttgtgcatattaggaagtcaataaacttttctttaaagcactacttttgcttttagtagaaaagtaacattctttaaaaatatctcatgctgccatgagcatttagtgtttatggtgctatgactcagaatattttctttgtaattagttatgattaaaattgccaaggatagaaaaacattcatttgttgtctgccagtattagaaaagcaaatttctttggacctttgttaagcctggattggttttgggttatatggcttctcaccaagatatggtagaacctgattctttccagattttgtattgagtaacaacgtgggttttggcttacctacatgtagactggtttttgttgccraattttttttttctatcattaaaggtattctcttgtttctttcacacacacacacacacacacacacacacacacagtcataagactataatttaggattgtatcatgtacatcccacccagtgagactttggagaaaaarcattaagacacccatgatcagaggattccctttcttgctgcagaaacacagggacctcaccaaatacatttttgagtaacaggagaaasactcggtgaagtctcattccagtgttgtattcatctcaaatctacagcttatggcttttagtgggttttttttctcagtatacatttcacaacttttaatttttaagggtttttgacacttccatctgccaaaatttcagagatgtaataaacacaattttgtgtgaattggaaaaaccatcaactataattgaagcctttgtcatgtattttgatgactcgatgcaattataaacccatacaaattgaaggtaaatttaatttcagagatcctagaccaaggtatgagtttcttagacttattcagaattctaagccaatgacagccactttacaagagaactatgccagagatagggacattttgtactgtcttttgaacaacctcatgaactttcactgtttatacattggacaaaagttaaggatcatatccccttttgactaagaaataacaaaaatgcatagcttatggttttgttcttttgtatgtgtgcatgagtattttggaattaatggtagtggccatcatataaccatatgcaggtaggcttggcaagttttcaaagtgttcactgatagaaaatgcatatcttactcatcatataggaagcaattaacaatgaaagaatatgtgtactgccaagaaagcatttgagtaaaggaatggactgtcaggaatataatagttcccgttcaggtgaaagtgatatgagagtctatgttccttgcggcttagcaagtttactgaaatataaagagtggtaggattgtacataggattagacatttctrttttaataacacatgaatgggccaaataaaaaaggaaaacttagaaatgaagtaagtgattgacaataatcaagaarcaatattatagataaaataaaacaagtatttagcatttgcaaagtactttcatgcatattaattctttgatccttgtaacaacctagtgagggatgtgtggcagatcttgtcatcatccctgttttaccactgaaacttgcaaaaggttgcacatctttttatagcagagctagaaatagaacaagctcttctgatgacacatcctatgatactgcctttgtgtgttttccaagaactatcccttatgtatatgtaactgatgatggttacaatatggctgcagctgtgattaaaaatctctccttaccaaaggctagtttctgactcggtcttttcctgatcacttcctctttgctggtttttttcttttattgcatgtcctcacaaacttcatcagaataatgccaaaaacagtgtgttcatctttccrtccatccttccttccttccatctgcccatccaatcaataaactaatttgtgtatacagtgtattcacctatattcccattattcatggccatgctgtacatcttctttccccaaacactcaacctgtgtatttctgacagcgggaagtgactgggcagggtgacagtcgctytgaccattacccatgtgtgataaattgcttagtaatctccacagcaccatcgtgcatacattgagagtgtttagggcattgtaacttgggagaatttccaatcgttcataaataaccattaatctgtcccttttacattcagctttccacatctgtttcaaattgttcagtgctattccaggagtgcattaaggctccaatccaggtagtattaaggggataaatgagccacagggaagagacactgtatttttctcaaagcagttctttctcctttttacagagttaggagccaagcaatttatgatyaagattttcagaagatatgttttgtcattttaagccatccttgtctgtgggtttaaaaatgaggttttagctctagcatcctggcataccttaatgtatttctctgtacaggtagattgtgaatatcatttctaccagcaaacctgaagtagttttaattcattatgattcagtgtggattcttattgaagaaaaatgaagaatagttaaaacctaaggtcagttagaaataaataagtgccagagtatgcatttatgtttgtgatgttcgggaatgtcagaagaagttgtcaataattttagtttgatacattttctacaggaaaaaaattgcttttcaggaaaaaggcattgttattttatgaattataatttaatattatgttgctttatgtctgctccagataattgaatgaaaattatacaggtgcatttttttcttaccatatagtacccataagatattttctcatgtgctttccaaagaatgtattttcataagaatgacccaacctgtactgttagatttacaaaagtctcatcacatagtacagagatgccctgcagaataaatgcatataaagatagcaccgtatggtatatcagatgacacctaagtatgagagaggaatgttttcaagttgaccttgaagatgttcagggacttacagaacaaatacgaggcaggaggataactaaaagatgattccctatctttggcatttgtaatactcataaaagggatgacaagctgattatctgacccagaataaaatgcccacagagtaatgtaaagaagaaggaaattcagttgcatgtctctcaccaaggttagtaaaaacctcatatcatcacataaagtgcactaaatcattggatttgaggttggtctatgtcatagttacagtctgcaatttcatccaygcataggggattgacagctgctccacccattagtattaatgaattaccaacgtacatcccacacacatccaccaagaaaccaaagaaagccctcctacacactactttgttttgaattctccaaatgttgtaggatagctatctttttaataagtagaagttattatatagctaaagctgataagactaggaattagtaagtaattgtaactttattcatacgttaaaataggttaaattatctctcacctctctgtcatctamrgaatgcctatgaccatttaagaaatgggacctgaactgctagggcattttattaaggaaaaaacaattcagaatgacattggcagcctgtttagtgaaattttttccctcctgaaggacctccaagagtgtcctttaaaagaggtaaaaaaaaaaaaaatgagttttgatatgatgaccatgtgtacttgtttacccagaacagttcartttataccatttkttctggcatagttattagtcactacccatttactctcaaaaggtcctgatttgaatggaaaattatatgttcatctagttttagagcatttcttatacaaccacggtctcttcctctacccctctagtatgatttcrgttcccatttatgtcttttgtgtggaacacctgtttctacaaaggaagaaagaaacaactatgccagtccatacactttcatcagctaaaaaattcatctctttttcctactcttttattctttgggttctcatcctcttttctctgctttgtgacattgcactccccaacgctgtccttatagaatatgtcagggacaggtcaaagaatgtcactatatgaatattttcctatagaaacagtcagcttaatccttgtcagtgcttgtctgtgtgaacaaaaaaaaagtgacatatagtcatgagttacttaatgacagtgatacatactaataaatgcatcattgtgtaaatgttatggagtgtagttatacaaacctagatagtgtagcctactacacacctaggctacgtgtatagcctcttgctgccaggctacaaacctgtatcgcatgttactgcactgaatattgtaggtagttataacatttgtgtatctaaacatagaaaaagtacagtaaaagtatggtattataatcttatgggagcaccatcattataaagttagtcattgactgacatgtcatcatgtggcacatagctttattttattctttttaatgaagaggaatttagggccatgctcctcattgacagggaactatcagattgagttatatctccccttagaaacatttattaagggcccactctgtgtctgacatcttgttatacaaaaatgactgagagattatcccttatgccaaggaactcacagtctattaatagagaagaccatgttgaacaataattacatatactactaggagtgaatactrctaaagcactactacttcatgtatcaccaagggtatggaaaggtgtgcatgggattcaatctgggatctgctccttggggaagagatgacagagtaggtaatgtgtgaactgagttttggaggaggaacagaatgaaggtatcaatttacatgaggggctctgcatcaggtttgctctgagaaagtagatagcattacattggccaacatacactgtcacaaaatrtcacttattctcctgtacactgcattctatagattaaagccttttgttgttgttctgaagaagagtggaagttgacagtttactatttataatagccataattttccaatttgttgatacaccttcaaatacactttggaaagaccattacagagctctctctttggcctttcctcgcaaaatagacttatttcctttatgtactctcaaaggtcttgtttgttttttaaagcattcttattcttttctcttctgagcttaatcagtgtatggttcctaccacactcctttatattttgcactcaggtagcattgtagtgygtttatatataaaggtctggctagtggtatagtcccaaataccatacttatttacttgtatctcactgcctgctgaaaacaaaccattatagagcacttgataaacacagctgaatgaaacaaacagttcacccaaccttgtagttactgctaccatccctcccaggtctctgattcctctctctcctgatcgtttctttctgccttgttgtttcactagtttctgtaaattctgtcttctatcttctctctacattttttccaagtgatgcagccttgctccaattttcagattcctctctaagtcatctaagtctgtgttgtatggatggattctctagtcacctcctacctccattcttcatacttttcccagtctttaactcagaaacagatcatcttctcttcccatatctaatccactggccagttcagcagacttagttaaatagtgtcttcagcatgtgtttctctccctccaattcctttccttaccatgggatcagtttccttgtgatattctcaactcygaaagtgagacccatctaggagccatattccacattggtgcaagtttaagtcttctaaaacatacaacacctttaaagaaatgccatcaccaatgayagaattcagctatcactgtcaaattgtttcctaactactttttatatttaagtcccactgtctttcttcatgagtctctattatgcttgtacagagaggcagtgcagagccctgaagttagaacatctgagtttgatttatggctctgtacttgttagctctgtgaccatgggcagattatttactttctctgtgtctcattttcctcatctgtaatgtggggatagtaattggacctaccataaaggatcatagcaaggattaaataaaacactcagagcagtgtctagcwcatattaaggattcaataagtattagtatttttgcagtttaatgataaaaaccacaattacttttgcaccaacctaatagagtcctattctccaaaatcttacggtcttcttctgttaataagtatcctatttctttttcttaaatctgaaaatcatccaaaacttacatttcactgttttctattttcacatcttgaaatctcatcttgctagaaagacattctcatgtcttctcttagaccggtagtatccatttatatggaattcrtaattatatgccttcacaaaattcatatgatctgcttatgccaatgaatataaaggtgaaagatagaaactgctgttatctctctatcgtaggtgtccccaacccccagactgtggcctgttaggaactgggccacacagcaggaggtgagctgccaatgagcaagcgttactacctgagttccccctcctgtcaaatcagtggcggcattagattctcataggagcgcagacttgactgtgaactgcgcatgtgagggatctaggttgcacttcctttatgagagtstaatgcctgaggtggaacagtttcctcccgaaaccacctgccacgcccccagcacccacctcacctcaccccacatccctggggccaaaaacgttggtgtccactgtgctataggattgagagatataaagctaacaaaattgaagggtagattgaaaaataaacttgaattattttatgatcatgacctgaaaccacatgtaaagttgaacaaccaagaaaactatctctgcttttgcttccttttytgatccacagtaagttaatgctcaggactggatataacacataaggaattctaaggatcctaagtaacagtgctatgtatggggcatcatggggttatcatttgtggtaaatttgttctcaacactggcattttttttttttccttagggcagaaatttagcatctggagaggttggattttttccaagtgatgcagtcaagccttgcccatgtgtaagtattagtatcttaattttctcttgcttcattttgtttttgatcctgtgattaattgtgcaaaaatctacaaaggatactggccaggtcagttattaattttattaatattttctggaagaatcattattttcaacatcattatagttctattgtcagaatatgttttttaatattaagaaaatatatagaagaggcaaattttacttagtrgaatttatataactaagtagtctaaaaggttttagaagaaataaaccacagctacaaattagacgcattgtrcaggtttcccctttcccactgaactgagaatggtacggtctgcctccagtcacttgggttacagggcgatattacacttcagctgatgtctttgaaagcttgctagaaaatgaaaagtccacaaatttttcaatcaaatgtctaaatatattttctatactttagtgtgacattactttttatataatgtcataatggaattttctgaaaatataaaacacagataaaaggagaataaatgaacatttcctcaattaatattacaggtgaatgtaacctaaaatgtactycctggtgtgttatgatactgataaacttctgtttagggtaacatgattttagtatcataatatggtattatgggtgacgttttccacacaactttttaatttattgactccaaagtaaatgaaatttctttactaatacgatggagatgattgcctgaaggggaaaaactctccttaatctatcgtgcttgctatatttcagtagttactgaatttccaaactggacattctttttactgttagaaacatgagaatctgccatccttggctctagaatgtgccctataggataatttactccactcattcaagcttaattactttcaaaatcaaagagaatagaaaagcgtctgttactctgttggttttgtgatctaatatcacatttgtttaacttttattttaggtttaggggtacatgtgcaggtttattatttgggtaaattgcatgtcatgggggtttggtgtacagattattgtgtcactcagtttctaagcatagtacctgataggtagtgtttagatcctcaccctcctcccaccttccaccctcaaggaggcccctggaatctgttgttcccttctcatgtccatgtatactcaattttaactttcacttataaatgagaacattgttacttgcttttccgttcctgtgttagttcactcatgataatggcctccagctccacccatgctgctgcaaagggcatgatcttgtttctttttatggctgtatagtattccatggtgtatatgtaccatattttctttatcctgaaacatatgggcatttagattgattccatgtttgtgaatattgctgggatgaacataagcatgcatacctttatttgtagaacaatttatatttctttgggtatatacccagtaatgggattgctggctcaaaaggtaattctgctttaagttccttgagaaattgtcacactgctttccacaaaggctgaattactttacattcccaccagcagtgtataagcattcccttttctctgcaaccttgtcagcatctgttatttttttactttttaataaaagccattcttactgatgtgacatggtatctcattgtggtttcaatttgtatttctttaatgattagtaaaattgagcattttttcaaattttttttggccaattatatgtatgtcttctttccaaaagtgtctgttcatgttatttgcccactttttaatggagttgttttttggcttgttaatttatttacattttttatagatgctggatattagacctttgtcagatgcatagtttacaaatattgtctcccattctctatgttgcctgtttactctcttgatagtttcttttgctgtgcagaagccctttagtttaattaggtcccatttgtcaatttttgttttgttgcagttgcttttggcatcttagtcattaaatctttgctgggtcctatgtcaagaatggtatttcctaggttatccttcaggggttttatagctttaggatttacatttgtcttcaatccatctcgagctgatttttgtatatcatataaggaaggggttcaccttcagtcctgcatatggctagccagttatcccagcaycatttatcaaatgtttagctgccacttacaagtgagaacgtgttatttgcttttcctttcctgtgttaattcacgtatgataatggcctgcagctccatccatgttgctgcaaaggacataatcttgtttctcccctttactgaacagggaatcttatccccattgcctgtttttgtcagctttgtcaaagatcagatggttaggtgtgtggcattatttctgggctctttattctgtttcattggtctataatgttacatattttttgtcttatattacattacagtcttgaaagattattgaagtttgataccactcttatttaattagataagctaaaatgattctctatctagtttttggactttgtatgaacaagattcaggcttcctatctgtaaagtagtgatgtatatctgtaggcaggtggcaggatattatacattctaacattaagaagtttgggaacctaaagacatcaaatcaagaatattaagcattgaatgtaccatgtactgttttctgtttacatcctcttgaataaggcataaaratgagcacttgaagttttgttttagggatagtctmgcacaaagtaggcatttaataaattactgttgaatgaatgaacaaaggagtgaaaaagcaaatgcaagtccctasctgtatatagaacattagcaatggtagatactaattaaatcagcctgtagaatcatattgaatgatatttgctgacccaagaagtggctagaaggagaaatatgttcagaaattttaagatgacagagaagtagagtaacttataattgtaagcaagactactaaatatggttgttttatattagtagctactttaaattttactgcttaatgaaattatagattttttttttaattatagggcaagttaagtgaagataaatagaggggaatttgaagaggaggggatagwttgagggagtttagaaaatggtattgcttttgattctgggatatattgtttatcggggtccatgagtagtgctgaatgttctaytctgggcttaaaatttattttcctgcatttgctacatccatctcctcaaaaattctgatataggcaggtagaaaccaagaactgaggaaaacacaggcrgttcataaatgggtcaacttcatttctagcaatatggcaactagagacaaagcctggaactgcagcacaatgcaaacttgggtatatccccgattccaggagctcttggtggatgaactaggagaaaacccatcccactgatgatgatatgcctactttggtattggttcaggattggaaagaaaaaaggaaagcagtatcccctgagaatttctaatcttaaatccaaaaccatccagatgaagggctggaattcataccagctctactacctaaataattctaagctagaagtgtagtttaaaattattccagattattccactgcactccagtctgggtgacagagcgagactccgtctcaaataaaaaataaaaattaaaaaaattattccacattgattattctcccaatgaaaattcaaatgctgtctggattggagcctctttgcacacattcctcaaaggatttttaacataaagtcctaggcaacatacaytcacaatttgaaatcattaaatcaatccagaaacaaaccaccttatgccaagatcagcagaaacaataaaatatataattaaatccacaaatatagcagatatttgaattttagatactaaattcaaaattttatacttaacatggtttaagaaattaaagggaacaaaaatctaagaggaaaggaagacactaattgggtatatatgaaaatgattcaggtatagtaattgaaataaaagccttaatggacatattacatggcatatcagacacagttgtgtaggaaattgaggagaaatctgaagaaattgctcaargagcagttaagagagattaagaagttaaaaataaaacagaaaatggagtgatgagatacaaatacatttaatagaaggagagaatagagataattgtagaaaagcaatattcaaataaacaatgcctgagaactttccagattctataataaaactaatcttcagagtcaagaagcatatattaaaattaatcaacacctggatgcattgtaatgaaaccagaagacattaaagacaaatattaaaactgagagaaaagacagattatctataaaaggttgattattagacccagctaacaacagaaataatagaagcaacaagagtttccacttctggtaactgttgaatagctcctattggaccaatactcccacacataactataacttgtggacaaaatatcaaaacaaaactatctgaaggcactgcccaggagaagattgacacttggaaaaaggaatggcactaggatgagtttctttgttttatggctagctcaaaggcaggcactggattgtaccatgcagggtagctaaaattcagatagaaaccttatggtatttctggcttaaagaaccagattatggagtgagtttaaagcagtctcagcagctggaaaaggaggtaggaagtcttaaaaagagtcagagagaggaaacctcaaattctgtgtataaactttaaggaaagccaggttcttttttggaacataagaaaatacagagcctctacagtttatcattcattcaaattgtccaagatacaatataaaattactcagtatgcaaaggagcaggaaaatgtgaaccatacttaacagaaaagagaatgaagggagatcaaccctgtgatttcctgtttgatgacttaggaaaagattttaaaagcagctgttatcatggtgctcaaggacacaaaggaaaacatgttcataatgaatgaacagaaaacctcaaaagagaaataggaactacaaaagaaccaagtagagattgtacagtgtgaaactacaatgtctgaattaatatctgaaacaataagaatatgttaaaagttgtgagagaaaattactatcctcttagaaatttctcaaaaaaaggatgaaatcgtgatagtttattcaaacaaacacaaacttcacttctaagtgtgccatctagcttcataaggtatacttcaggaagaagcacacataaatagacacatatatatttatttatatatatatatwgaccmatataaatatttctgtatgtatgtgtgtgtgtgtatatatatatatataattttgtacggatactatattctcaataaaatgttttttaaaaactacatgttcatagcagaagttttgcagtgttaatggactatggtgctgggagaaaatggcattagagaaaaatagtaaccatatactcaaagatgaaaaagttcccaaaaggaaattaactgtaatcttaaatatgaagtacttgccagacaaggacccatagtacacagaagaaagtgcagagggcctatgactgatggaaaaggataggaccccacctgagtaatatggatcatggctgggaaggtagtcctggatcttcacatgtcagaatgcacccactgaagagagaaaagctctagtgggacaccagggtggaacagcctcagttacctgttctgttttagaatcttctktcactgtttccttttttggatctccagcctttttaacagccaaaggagtccacagccagaatattttgaaattctttactctcctccttcctgtctccttttttttgtttgtttgtttgtttttttttttggttctctatggaaagcttggtttaagaataaatatatacattatacttttaaagaacacagggagagggaaagaggaaatatttttcgcatcacatttcagaagccatgtatatcttgtcatcaaagggtgaactattgaagatcagtttatttgtgaaagcaaagttatgtaagaaactatttgaatgattagaatgggtataatttaccttcaacattaattgctgtttattaggattttacaaagttgtgattttaaaaatgtaatccataggataaaaatatttgaatattaataatcaaagaaatgttctgactagaaagatgatttttgatacagtttgagtattcctcatttgaaaatctgacatctgaaatgctctaaagtccaaactttttaagcactgacatgaygctcaaaggaaatgctcattggagcacatacgattttagatttttggattagggatgtggaatgtaattcaaatattctaatttttttaaatccaaaatgtgaaacatctctagtcccaaggattgcagataagggatgctcaacctgtagataactcttaacctggaagggcaaaatagtaacagcacattatgaagaccagcatggctagagacatgttcacattggctagttctctgaaatactatagtttttactgttccaaatgagggaacagtattttcaatcaccaaatataaaaatcccattaatagcatggaatgcatatatcagatatttggacatgagacaaactatctgtactcctattcgtaggaatttttaaagtaaccctctctatagamtgtactttatttcttatttttaacattaatatacctgctttgtctttgttcattttctatttgaccattagcagctacaagttttctttctttgtttgaatagcaaatgcaatatttttccttgtgcgaagctctatgtgaaacaaatggaaaaataagtattttccatgccttttttctgaataaaaggttcttagttggtagatttttaaatcagaatttggaatttattacaaaataagagtctatatccagtgtatattgtttattttgcatgttttcccaatgtcttggaaaagtaaagagctatttggttttcttaataatgttttcactttaattttctttgataagattaaattgccttgataataaataataaaatattaaaaatattaaatacccacatccagtgtatattttttattttgcatgtttttccaaggtcttggaaaagtaaagtgctattcggttttcttaataacgttttcactttagttttctttggtaggattaaattgccttgataataaatattaaaagtttccagttcatattcgcctgctatctctcctcttagagttacagtggcagtaaaatgaatgaaagaatgaattaaagtgaaatgaattattttctacttatctgacagatactatgattcactctgtataaaattaccaatggatagttccaggactgtgccacttagggttttatagagctgagtcagctgaactgaattaatgattgatttctaaaagcttmccttatgtaaacttaatctgtttttgcttttttatatcctaggtgcccaaaccagtagattattcttgccaaccctggtaagtattaaaaatgtttatgtagctaggttgaaataccatacccttagctccaggatgccttaaatgtgggggtagtaaaccatattccatttccatttgtctcggctaaaggtgttttcagatgtaacaaaacaccataatgaattcatgtattgctgacctttccatatctttatctgcgaggggggtgtgtgtgcatgcgagtgcccagtgccctwgactgataatttaaagtttataccagccacagaaaggaatggaacatacgcatatgtatcttatattttacagatttaataaagcagagagaaaaatatgmtttcattgtctaaaaactaaaaattagctcaaaaaggacagtagtagtttttttttttattttttatagttttagagatkggrtcttgctctgtcacccaggatggagtgcagcgatgccatcataacccattgcagccttgaactcctgggctgaagtgatcctccaaagtgctgggattacaggtgtgagccactgcttctggttgacactagtagcttctaaaaataaaatttacaacatatgagagcaacaaaatataaggatggggcacccttaccacttggaggctgamagtatcattaacaaaacctaggaagtgtaatggatagtaattattattttctagatatctccaactattaaaaaatatrtttaggatttagtatagtcatgatgtcataataactaatatatactgagtatttactatatrtgctttgtactgtacatgttttgttttatttcttcaacatttatataagaaaagtggtggtgactgttgttattttttatgggtgaagaaacaaagaaacagagcatgcaactagtgagtggtaaagccagaattccaagttatgccatctgtacattgctatactgcccccaaaatgcagaatgtgaacacattactcatttctatttgttttcctgaattttgtrtttgacttctcttaaaaagactgaatctatttttaatttattggtattaaaatacatgcatagaaatgagatatcagaatacatatataaatataatatcctgggaatatatagtactagttgggtttgcatgttaccaygtgagttatctgatattttttacatgttctgattattttctgttctataacaaaagcatggaaaatgctgagttacttttcaaagtgtaggaatccactgtgcaatgtatgggactctcctcgggccctcctccaccttccctcctctggcagtcactctgccttctgtagttactgtctacccttcctgatatccctccctgggcctcagcactgagcttgctgaagaaattgtggcaggtttgtgatagaactgggaatgtgcttcatttttacctgattgaagacaatttgaagtcattagtgtctgtggaattttaaactatagtcctgaaagaaatttaatttgaggtctagagctgatagcattgataatcaaactgaaaaacatcaggaactgttaaaaatcttgaaagtgtgatgattaggtttcttctcttataccatttttcatgtaactgggcattatagttacaaaggtaatgatttgagagataaaatgctaatacctcaaactgcatggattttatgaaataaacttattaggtacctaagaaccattcagggcacccgaaggtaggttttgtacccttagttttaaaatgcacccttgccaatatgtaaaatcctactgaaaatatgaccagttagaataatattattcttataaaagcaagatgttcaggcaaagggagagccttgaaaataggaagaaataaagatgtagtagaattttaaattacttttctttttttcttgagcaacctggacaatctatttaaactaagcaggcagtttgatgtgaaatgtcttctgctagggaacaaaatgatcaactcccccagaaaatagaaccttcaattttagaaatactaaactatttagagaaaattactttgcttgatggcatggtagttctcaagtcactgagaagttaagtatcaccaactatattatctactcattatttctacatttaaaagtaagttgtttgcacaaggtaaattttgtctcttgcatacagaatgaaataaaatagaaaattaagatgattgtcttcaataatctatgtttcggggtatcaaaagataggaatgagatttgggactgcaaactggggaactatcctaaaatctgtatgcagaacaagagatagatgtcagggtccctgccttttcccatggtagtcyggacaaattgccctttcctgcagtggcaggagacactggarttagaaggtatattatgtggaaaaggtgaaccatgtagggcctagatttggaaagatcaagcctagcagagactggggagatgccatagtgaaaacagagggctctgtatactgagtgatgatgctctccagttctcttgtgtagctcagtttcagcactgtgacagctgggtcccatatacacatactaccctgtcttggtattcagacaggaatttggaagatttttggccaaagaaacgaaatagagttaaaaatctaaaatccagacctttgggtgtttcccagctcagtcttcaggttcttgtcaaatgatcagactcagctgggcgtgttgactcgtgcctgtaatccctgcactttgggaggccraagtgggcggatcatgaggtcaggagttcaagaccagcctggaacatagtgaaaccccatctytactaaaaatacaaaaaattagctgggcgtggttgtgggtgcctgtaatcctagctactcgggaggctgaggcaggagaatcacttgaaccctggaggtggaggttgcaggcagcygagatcacaccactgcacaccagcccgggtgacagtgtgagatttcatcttaaaaaaaaaaaaaagatcagactcctacccagtggacctattttggtgctcacacacacagagtttccagtcaattgtggatgcatccttcttaagtaacaaacaacaaagagtaaccatacatttgaggaaacccttgaactaaaaaaaaaaaaaaaaaaaaaaaaagaagaaaccattggagtgagcagacaccttaaaaaaacttttatttacatcttcaaaattaagagaaaacttaagttcattggaagtaagctcaatgttttagaaaacagtcaaaataaaaaggagctcttataagttaaatattatagaagacttgggaaataaagtttagcaaatcttccaaaaagtcagagatrgataatatgagagaagctatatggaagctagactgttgacccaggggatacagcattcaagtagcaggaattccagaaagagaaaaccaagggcagcaattatcaaagaaatgatacagaaatttctcagaaccgaaggacatgtggctccaaattgaagatacttctgaaaggcaaggacaatataaaaaacacattatcaygaaattttgcagtatatagagaatacagaaagaatttgaaggtttctagggagaaaaaaatcaggcaacatacaaagaattagaaatggtattgaatggaaattagaagacaatgaatcaatgtattaatatttgagaggcaaaataatttctcacctagaattctttacccaataaccaaactatgaatattgcaataatattcatagccaaactatgaattactaggtaaaataaaatattttcatagatgtgggactttagagtgttacatcctgtgtatgtttagaaaaagctgaaggatgagctagtaaatcaaggaagagggagatatagaagycaggaaaggggagcaaagagaagtcccaggactacagtaattcaacaggcttagtagagcaagcagtatcaattagaagagcgtggagggctcagaagaaaaggctccagagaaaattaacaggtagattatgtggttgtcttaattcaattaatgcagctataggttgagtatcccttattcaaaatgcttgggaccggaagtgttttgaatttcagattttttcagattttggaatatttgcataaacatcatgagatatattcaggatggaacccaagtgtaaacacaaaatttatttatgttttatatatatcttatacacaaagcctgaaggtaattttatgtaatattttaaattttgtgcatgaagcaaagtttcgactgcattttkactataatctgcattttagtggaaacatgctgactctcagaaagtttcagattttggaggtttctgaatttcagattttaagattagagatgctcaacgtgtatagtagaataccacagagattggttaacttataaagaagatatatttatttgtctcatggttctaaaagttgggcagtccaaaatcgaggggctgcatctggtgagrgccttctcattgcataataacatggcaggagatatcacaaagcgaggaagcagtgggagagacagagagagagtagtggatgaactcattctttttatcaggaacctactccaaagatagctaaccactcctatgataaggtcattaatccactcatgagggcagagcccccgtgacctaatcactttttaaggattctacctttcaatactcttataacaatacttaaatttcaacatgggttttaaggggacattcaaaccatagcaatgttgttgaaaaatgtatttttgggaggtatatttggaaagaatctgtgatagagacagagaacttgaacaaacaaaaacatgagcaattttattttggagggcagatattctttgaatgaacaccctgccaaaactaggccagatgacagcttggctttgtagaggttacagaaagacaagagtgaggaacagcactataaaggagtgagcacaggtggcaggaagaagatggttttccttccttatgtttaaaattgataagaaattgtcatataattgtttagaaatacacaagtagaaataaaaaataggtacagtgtttgaaagggaacttggagtagaatgctggtctgatggaatactgctgctttttcattattataatgtgaatggacttttaaaactatattaatgcatagctttgataaaaatgcatacactcaatactaattgtgataagtgccacaaaaataggaatactgtaatgagaataatggagtaggtagtacaagatgcaggacaacattctttagatggtatggtcagagaagacccctctaaaccttaacaatgagaaggaatattgtgttgatagggtatgagtgtttccagacaagagtgcagtctgtgagaagaccctaagcgcaaaaggagcttgagaaactcctggatctgaaagaaggctggagactagtgatgaaggtagatgtaagagataaggttgaagagaggtaggcatgagtcagattatactaggtcctagtagttcatgagttgttataacttttcttttaacgcaaggtaccatctgcataaaatgcctttagttcctcttttatactagatggaaacctaacatgtcctccatcaacaaacttttgctgaatgcctgtcatgtgcgttttaaatgaatattaagtttgcattacaggtggatgtttatacaaagttacgtgggtctatatgtgaatcagaggattttcggatacattaattattgactagctttgaaagagaaccaatctaaacagaatttttcttttaagttctattgactaaaatctctgatgtaacttgccaggagattttacacctatgtatgatttgaggggtcattaaagattattttaagattgaattttggccttttattattacagttattatggagtttctgtatgtttaaggccagcaaagtctagggagattgaattctggttttgaaaaatatcaaccacaccggtggtatcaactacttgggaggctgagrcacaggcctcccttgaacccaggaggcggaggttgcaggcagctgggatggtgccatgcactccagcctgggcaagagagagaagctctgtctcaaaaaaaaaaaaaaagttactagcatgttaaatagactgcattgctttgggcttgcctgtatttagcaaataaagagaatgagaaatgttctttctatgcaaaaaaaaaaatctaccttttaaaagtaaattttactcattattactaattgcttaagaaaatttatcaaaattgtggacgaatgaattaatctcataacaaaaaactatttaaaataacttattgctagaattttctttaaaaagatacttaaaggagatttcatttcatagtatatatagaaaagctaaaataaatgtgtctgtgtatcttatacagggcagtttctccctacaagtctttttccttcctgtccctaagctccccacaactgtctttttacccaatacccactgactcctctgtgtcccatttatttactaggtgcttagtgggtattaggcattgttcattttgctgttgttagttttgtagagcatttgtgtttggacgtattaaaggacctttttctgatttatttttcttaaacaatgtaattagtatagaattaccaacagctcagatctgccactaaattaaatattgagagatacttacttttagcctctgttctcttccaggtatattatccaaattttctgtgtcattgttttttacaggtatgctggagcaatggaaagattgcaagcagagaccgaacttattaatagggtaaatagtacttaccttgtgaggcacaggaccaaagagtcaggagaatatgcaattagcattaagtaagtaggacaagtacttttacagaaatagatttcctgttttcataattgcatagaccatctgacatgtataacactgaaggtgaaaaccaaagttctaattgaaggagaaataatgcatctatccagacagttcattaatacttgaaaatatatctttgaaaaacagtaaaaagtgttataggttgctaattggcatattagatttctttcataatattgtgttttggtggtttgatgtgtgtatatttctagtaaatactaacagtataaatttctagatttttgtcttatttttctrtattctcaaactgaacttaataaattgtgcataatgaatagtcaaatccaacctcccttctcacttcaaatattggttgtatcctcaaccaatccagtaaatatattttgttaattagctgtcaccagtgtattggcataggtatatatttttgtctgcagaattaattcctaaaatgttattggggcatgccctctggtaattattgatttctactgattaaaaacacatttatattcataagttattcattgcccacaggtacaataatgaagcaaagcacatcaagattttaacaagagatggcttttttcacattgcagaaaatagaaaatttaaaagtttaatggtaagcattgattatttcttttcaatctgggatccttatttttcttttgttagaaaggtcattttaattctatagtttcttggaaattttgctcactgaaaagttatttaaagataatcatattctaattttgcaacaaaatcctgaaaattctaatttataaatctctaagttttatattgctcgaatcrtaatcttcattgtaaattgtttgcaggtttagayagagttttggtttgtgtttaaatgatacagcagattttaaatatacctttctttcctctttttttcttcctttgcctctatgtcctgattcaggcagaggacagtattttaaattataacacaaaaagttgtaattagtaaaatatgtctaacatttaggttcattttttataaaatgcaatataaagtcaaattgaaaagatttttgtattttttgctattttaagtgatctctaccatggttctcattcattaccttagataattatgcattaacaaggtaacatttttgccacttaacagttgatatttcataggaattgtatatttaaatggaaatagtatattgtcaaatcacatcaaatgaataaggattattcccagtttaaaaaaaatagaacttattcatacttttgttagcatataagaayattttgtgtatgtcatttaaacaatgtgtatatatcatcatgtatgcgttgctaacagtaaactctaaattcacatttccttaagtggtctcaagtmtgtttctcaagtttggtagtttctgagataatgaagagtttggatataggacataagatgcatttgtactgctaagtaccttgagtaacattgggaaggaccactcattgaatgaaccatcaatcaaatgatacatactgcatccttccagaaaacatctcaaagcactttgcagatgttaacattaaagttaaactgagtgtaagggagccttacaaaataggccagcttgaatgccttatccaaaaatgtagaactgcttcaaggcaggtgtcagtgttttaaagaaattgaagcatcttgagttgaaagaaaaataagaaaatctctatggatgtaaagatcattcccagttcaaaagctaaggatgggcagcaaggtcrtgtcctggaaaatgtaaactctgtcaaatttgtaaccaagatccaggcatcctccctgctggaagtaacttacattctgttgaaacaagcaggctgagcacagagagaattggaccagaggaggttcttcataaaatgaaaacttggagggaggtggcaagtggatgcacaaataatgaatgacagacacagctgagacatgataaaagcaygcacaggggctctccacatctctgcaagacgtaccagcttgagctttcacctgcagaacttccttggatggtaatgaggctgctccacagtgttatagttactatgggacttaaaaaactgctgcagagccaaagataactgccagccttgcagactttgaaagtagcaaaagtaactcccatcagaggagacaagcaaagaagatgaaaggaatcgtcactgaaaagggccaatsaatttagctttgtgtcacctgggttcagctcaaggcagttcttcagaagccaaggttagatgtgaaaagccagtaataccacagtgacctggattggtagacatagatacatgagttcctatctgcatgtaaaagctgtgattatagtgaaagcaatagagacccagcattaaaaaaaaattgtgccagagagccttaaaagtttctacaatgatattctctggaaaaataactaaaagtacttgtcacaggactaaagtaagcttttcttatatgttatgtataaaatctcagcaatgccactattagagacacgtgcatatgtgttttyktctccatatctgggcatcttttgtaaggaagcacgtatcacagcgtgttaaagggaagggactaagaattttagcaaagcaaaatgaaactaacaaacattagcaaaggatgtaattatgaaaagaaaaacaaggagctggaaaaaaaatctcaatatcagaaaagtgcttttatcaagtttagtaaatarctataaaaattgctgaagaggcagctgaactaatctgaagctacccctccattttgtttctgttcatttgttgagmaaatttatattgagtccttacaatgtgaaatcactttctggagaactcaaaaggacttaaccattctaaaaagaagcttaagaatcagtaaatacgtctacaccaagaacctcaccatagagcagtccttggaacctaggctgggaaatgccacatggatacttggtcagaaggaatggctcatgttttagcaacctgaacttctggaaggaggtagaagatgattaattggtgtgaaggtttctcaaaatcaagatcatacaracttcatggagttaccttttatcatgttggagtcaaataacacacttgtctattataagtaaggagtgatctgtggatttgagttgtttcttaagaatagttcagtatcctcttrttattgrtattagtttactcttctatctgtgaaacacaatagggcctggaattaaatttaaatctggaaagtgtgtaaaacataagcaaactccagagcttcttttaaattaactggtttctcagtgagaagattggccttaggtggttttgacctaacctttttcccttgagtttcaatagcttggttaatcagaatctttgtctttcttagtcattaaattcaaatcctaaatgaatttctgtatccagattacaaggcattaattttgttctaattttcatgtatgcgagacagtccatgtccaaatgctgtttataaaccatctccattgcctgtttccttggtaattggaatgactggctctcactcattatttttragagacttgaattgttgacactgctgtgtcagtgtgagataaggaaagcttagcgatttcttttgtttagagtcttcttatttacttgttgtacctgaaggtcaatgactgttaaggcaggggtggattagactaaaatacagaaagcataaaggcaaattggaaaagatccatggtgacactatttagttctacccrgttagaaacatgtaggaagatttaccctcgtaagactgtaaaaatggaactaaaatatcttccatgcttagtgaagtgataaagagtgttttgcagcttactaagtaagccgcatgaccctaggccttggaaaactcattttttcttccataaaatttgggggtgggcgagtattaaataatcaccaaatcatttttcagtatgataattctatggtttctagccaaattcacataaattgtaattcatagcaaaaatcataaaattcatattacctataacaaaattacgttgaagttcaaagctatggcttataattcctttcaagtttgttttcacatttgctaaagaaaataacacattttactcaatttaagtaataagactaggagaaacttyggtatcgtttgtatcagtgacattatgtatacgtgtgtgtgtgtgtgtgtgtgkattccagagacctcacaaaattttgctttatattttaaaaaaatgaatagcaatattggtcactaagtagaatttaattctataccttgtctgcgcaaaacatgttaaaattcaccaaaatacaaatgcatattctgatcattgaaaccattttggagatacaaacttctacatggtcttttgtttctttttctctttgcttttaaaggtcggtctgattacaaatttcttgcttcaacaaggacccacattatctgggcccaaggaagaaaggaagaaatacatatttttcaagttatagatataatatttggaagaccctaacattttaagtctaagaaaacaaagttcctagtacatcatgaacacatagcaaaaactatttcacttttgcctccctgttttttgtgtgtgtgttttttggtgttttgttttgttttgttttgagacagagtttcgttcttgttgcccaggctggagtacagtggcaaagtctcggctcactgcaacctccacctcccaggttcaagtgattgtcctgcctcagcctcccaagtagctgggatcacaggcacctgccaccacacctggctaacttttttgtatttttggtagagacagggtttcaccatgttggccacgttggtctcaaactcctggcctcaggtgatccgcctgcctcagcctctcaaagtgctgggattacaggcatgaaccaccatgcctggctcttgtttttgtatttacatttgctaggcactatttgctaatagtatgatacagttaagagcacaaactttggataaaggcgctagctatgtgactttgcctaagttcactcacctcactgatatttgagcttcaatgggaataaggcccatttcataatgttcttgagtgaaagttataaggagccatgtaaagggcctggcacatgggataatggggtagctgttacagtttttcacatgtattaggtactttatatattctttgttatcatctgtgaaatggtttattagccccattttataggtgagattgaaaaattgccatttcccttatccaatgctttagccaaactatgctgcttttagcttatgaaaggtggtctttgtttatcacctttatgtctgtttccagcctgcctgctctacctaaaatgatctttccctggttcctggctattgtaattttactagttcttcagtttaagccaagctacttgtattacaaaactttctgtcacccttcccattggatacacaaaacaaagttctctctcctgcctttgaactttcccttccaagatgagaattcctcaatggcaggaggcttatctttataatctctgtgacctctgaagctcctggtacagtgcattccacaacatactcaagttttgtcataaataataaatcattgatgattctctttttcttctttcarctgatttttggactcattgatttgtctggggaactttgaacataaccactgaacagagatattaagttgatggcagtgggatttttagaagaaacaagtggtttttttttctgtttttttttttttattttttatttttaaaaaggcgctccaatagaaacattgaataattaagttaaaagtgatttttcgtttattttcatttcagatatttataagaaattttatatctacaggactcatttgatgataagatacatttttattgtgaattattattcagtttcagtttacagtagagagattcagatttctgcagaatctatgaaaccaacctgygaaattttctgaaacgatagtctgaaggatggcatgtggttattacattaggtttagatgtatttaagacaaattatttataagagaaaattggaaagaattacattgacctctgtgagtagcagatatgcggagctatgacaggtactatacttcatcagaaactaaaaasagtstcaagtaccatttgtgctttatcaacttttgtttaccacgaaaaagcataagtttgtttttctgccattttgaaagaaaataagtgcaggaaagtagaaattgctgtatattcagcaagcagctgttccttttattttggtttagaaaggcaagtatttcataaataagaacaataattactactctgaaactgaggtttagtattgtttcttttcatttgctacatctgactgaagacaggatgttctccatctgtgaataacaatagggggtaactcatattattaatggcctgagtaacaaggacagctattaggtaggtgtcatgtacatccagacagcagggagagattatcatttgcttaatcttccatatacctatggaaaatttagcattaaattggtcatccttattgtatttatgtgctcaggagttcatgtgtttgagaacaaaartatccttatcaaaaatatgttggattcttttttccaaaggarcttgtggagtactacaagcatcattctctcaaggaagggttcagaaccttagatacaactctgcagtttccatacaaggagccagaacattcagctggacagaggggtaatagagcaggcaacagctgtaagtattgtaattgagaatacaatttgctgtcacttaaaaattaggggcacaataacattaaacatcttccttccaaattttaaaatataaccaatggatgcgctaatgcatgagcaaggacttcttttctggagttaagcagagtcagatggaccaacaggcttgtgaacatgtctaattatagatctttatggcaaattaaaaattatgtttatgtccaaaaatccagcagaaacgtaaaagatatgctaatatttacatttcatacttttcattgacttttatattaactaaactctttttaacttacatgtaatgtgtgaggtcataattctgtttgagtaatagtatttaagcagggctggtacacagctctccagttagcctagtatctcaaatctgcttatggtctatttcaatgactactttaagaattttgacattactaatgtgtttttttggatgctagtatttctaaaaccatacattggccactttctttcagaatgagctgtgtgctacaactaatcacaaaagattagcatgcaaacaaaagcatgttatggttggactgtgagtctaagtcgaaaaccttttctctcatcgtttaatgttacataatcttcctggagatagagcatgtaacaaaaaaattgaaaaatgtcatcaagaaggtgtgattttattttcttaatctgatatcactttattttttttaaataagtgttttggggaagaagtgaatacaatttcattactcttagaatctttagcctaagcaacactggratatctagaggtatttgaaaacagaatttgcgtcggtttaatataactttatatttttccttgaaagcagaaactgaaaggggaacaggtaatgctctgggtttcaacaacatcagtgaagttttatacatttcaattcaagtaaacaaacaatctgtcacatcaactgacatattttttatttaagtaacttaatatatgttttcctcacagtgatcaatgatgtatgcctaagctcgtgcaatgaaagtagagcgaactttatgttaaaactttaaacacctattagattttatggtgttattttttagcccaagattacctgattattttagattctcaaataggcataatttttgctcattcaaaaatggaagttttctccaaaaaaacaattttcctaccaatatcttaaaactctgttgaagctatgacatttcccccagcatgaaacatgtaattttcgaagctctgtttctttgccttcccagcagcaagagataataaaagttgccagggaggtcagttagatgaaaaatcctgtttgagttgttcacttagctctagagagcctaggagggagaagtggggcagacagggagaacagatgtcccatattaggtaggaaggtcactaaccctcatatttcactctgtggttcactcccagccaattccttagtgtttagtacatggaggtactcagagaatgtagcccggcaatgaatgaagttgtctaacttaaaattatgtctcatgtttaatgaagtatttaatgctcaacttgtttgacaactaagaagggaattacaggactttttcttaaaaaaaagcatagccagtagaatgtctttgaatatccatgctagccccagataaatttttcagcaaataaactcatgagttcaaacttccctatccagtctttttaagagattctgacaacttgaatcaagccactaaaactttttttttgtaattgtgaagggaaagcaaacaattcattgaaaattttatatttgttatmgtttggttttgttcatcaattattcattcattcgttaaacagatatatattaaacacctaacacatacaargcactgttctggttctgggatatagcaattaagaagacaaagttcctscctttatggagtttacatttyaatggggaaactcaggcaagtctggtttggaggagtttcatatttttatatagagtggtcaggtaagatctccctcgtaaagcaactcaaaaggagagaaggggtgtaggttggtaatgattgcacagtggttaacactccaagattagtcattcgttactgcaaagaaggattacaatcttagatcaaatttgtgataccattccagtgttttatttactttatactaactttgtataaagttagaggaagactaagatggttctgaggactaaatgaggtgttctatataaagcacttagcatagtgctcttacatggtaaacagtaaaagttactgctgactctacaacttctacttcctctactactgctgctacttctaactcttattctaacacagyactttcctatatttctaaggcttgaatacatttactaattatgactcatagcaatgtacatctttgcctttatgattttttaaatataacttgcttatttttataccaagtcttgataaaagctcacccttaaagaaagactgcttctatttttatgcattttatacatcccaggaagtggtaaggaggaaatgctgcatgtttgtatagaaagattgtgcaagatgtcttcatattgcttacctttggttcatagctttaggtatgctgctatcatctaaaaataacatttgccaagcattattaccttgggatactgggttggacagaaatggcatctccattacttctaaaagtccttggaggatacagagcaggcaaggtaaagcttggaaccattctgtgttctgagtagaggttgagaatagaacttcaactcctgaaacctgctgtttattattgttattatttttaaataatctagtcaccttggaaaagaaagccccagggcactgtagtggccacttacttttgggctactctaggttagaatgttcgtagaatgtttaccaattattttttcaagtatgtacaatgtgataagattatgacaggactatcttatgcaaattcaaagtaacatctaaaaagatattgattagaattaagcaagtgtccaaagtattgggcaaggagcataacattttaaagttaggggcccattgtaggctgtctctcagcctctctcccagagtgatgggattttatctttgtctttggaatgacttaagagcatttctaagggagaagaaaagagagaaagaaaaagaacaaagagagaactcaggcatagcagggagctcttgggcttcctctagaaacttcagtgactccatgaaagatgttctatggatctttgtaaaaatcccattattttccaaaatgrtcatctcaaacctgccttagattgctttaggtttacctgtagggcttgtatatttgaagggcattaaattgacttttgcatttcttgctctacaatgaacacataattattttgaggtctgccagagtagctgtctgaccttaggcgagtcacttagcctgtctggaccttagctttctcatctgatgaatgaggaatgaaattagagattttataatgttcttttaaaaatagcatcttaggttttttcctttgtttgcatgagagaagcaggtaaggtaatgttaacagattggtgcattaggaaaagttgtatgtttagctattttgtgacccataagcagaccttaaatattttgccaagtttttatttgtagagaattagttgggccacagagtagagttgggtaatttttttaaatggctatcactrtatttatataatatccaagtatcttctgtaagaacttattaattacaaaagggtaatagtaataaccaagtgattgaagttaacatccctaataatgggacaaataaatatcatgtacctcctaatataatgctccaagcaggacaaaccaacactttggtggtattattgtccccaaaaagcataagtggaatctaatcatgaggaaacatcagacaatcccaaactaaaagacattctgcaaaataattggtctatactctaaaaccttcagtgtcattaaagaaaaagtctgaggaactgtttcagattaaaggagaccaagagatgtgacaactacatataacatgtggtcttggattgaatcctagaacaggggttgggaagatacatacacacacacacacacacacamgtatgtatatatatgtgtgtgtgtatagtaacatattttgtatatgttataaaatatgtgtgtatatatgttgctataaaagatgtgatacaattggcaaattttgaataaattctcttgattaaaaaatagtaccgcatcaatgcaattttctgcttttgataattgtactgtggttatataagagaagagaatacctttgtttttcaggaacgtgtgctgagtatttagcaataaggggcattatgtctgcaatttattctcaagtggctcaggaaaaatacatagattgataaagcaaacatcataaaatgttaacatttggggagtctgaatgaaaaatatgtgggaattccttttgctctccttgctactttaagtctgaaatatttcagaatagaagttttcagttgtggagatgatcccatttgctggctatatctgaagaattgggaggtagtgacagtgtccttcttttgcctgcttcagacatagaagcgtctggtccattgatttcaggacgtgtggaacactagcatgtactgaacagatcatatttgaagccatcygttccttacctgtgacctcattggatttgcttcattcattcattcattcatttattcattcattcattcattcatccctttatcctgaaaatattttcagtacttagtatgtgctaggccttgtgctagatacttgaattataatagtgaataagatacacaatctggtgaacaagaacagacaaaaacaaacaccttcaataatcacaaattttgataatccttatgaagctgaagcataagtgcaaggaaatgggagcagggccatttagccttcagggtcagagaagggctttttgaagaagtgacagtcaggctaaacttaaaggatctacaagagctgacagggtgtggggtggtggccaatagggaacctgcatagcaaagaggtcgtttgtgtgaaggttcataagcattagagaacttcatatttttaaggaactgaaaaaggaccaatgtgttgtgagtatagtaagtggattctgatatttgcactaggaaagtattgaagttttacagacagaaaatggcatgaactaatttacattgtcttaaaagaccactgactgttcctgaggagtggcctagagggaggcatgcacagagggaagatgagttaggaggctattgcagatgtccgtgagagggataagcatgctttgaacatgagttgcatagtgacagcagagaaggatagtggcaggtttgcgtatatcttagaggttgagttgattggataaaggatttgaaatcaaattagtacaagtatggtacataagtatttgctttggacaactggcaagtgataaaaccattaacaatccaggaaacagaagagatagaacagatttaagagaaaagagaatatattcagttttgcacagtgtttaggtacctgcggatattcaatggttcaggatgcagctggcactgaggagagtggtctggattgaaggtagaattttatgaatcattaatactccatttcatagttcacatagaatatagtgatgtgagaattataggcatttgtatataggcttaatttcttctggtgcattgtttgctggagccctagaagccaggaccctttgcttgtcattctcaattgtacttttgcacatgccttgcatgaaatagcctcagaaggggctaaataagagaagtcagagtctaaggttcacaggagacacagcagatattagagtgctaagttgaaactggaaaagcrtgggaatatgggtgagtttgaaaacaaagtgtagatcagcatgttcctttcagtgtggtgacaaatagtgtagcaattcttcaaagattgacaaaggctacttttgtcattggagccataagtttgaccttgcaggaagaagtagaagccagaacagagcctaggctgtctctccctgggtgtggtctctttcctgtcacccactgtccccattattctattcaccatccaacaacatgcttatccttcatttttagtcagtattttgggtagaaacagaaacttggataatttgtgtcgtatttatttaactcagtagaacataaagtagcattcttattcctgataattccttaaacatcctaataattccttaactactatttattagttatattacaatagaatagagacaatatttattatctccttcgtacaggttcctaaccatccacttaacttagtttctcccttgcccttttaattcagcattcccatattcacctgcctttattttctgattttattgtatcctcagtttttttgtcatcttttcctcggtcattttgcaattgggtttgatatgatctaattttattctggtaatttaaatatttgttttaatctcattatattggtttcctagtactgctataaaattatcacgaaccaagtggcttaaaacaacagaagtttactctctcacccttctggaggccagaagttgaaaaccaaagtgttagcagggctaattcttcctggaggctctgagggagaatccctcccatgcycctctcccagtttctactggcaatccttggcatggcttggtttatagatgcaccgctccagtctctgctggtcttcasgtcaccttctgtgtgtatcattgtcccttcttttctcttatggacacctgtcattggatttagggcccacccaaatacagcttgatctcattatgagatccttaactgaattacatctgcaaagacccctgtttcaaataaagtcacattcacaggttcacaggtcctgggtgggcatatctttttgaagggccaccattcgacccactgcagttccactgtattaattttaaacttttctctaaaattttccatccttattctaatttttctttttgtcattttgtaacttggagttataagaggactttacattattacagcagtcaggcagtcagtgaatgagatttatacaagaaaaacactactttaatacaaaaaaaaagtgttttcaatgaattgtattgcctttccatggtgaaatgccttatctttctgagagactgcacttctagccaatgcaggctcctaaacaatacttgaatgaccatttgtctgaaacattgtattaaatattttatatggaataagagaacctaagaattctgaaattcaataatttgatgattaacaggacactcttacttttcaaaccccttttacaaatatcagatcaatatctccaatggagtattccaggaatctctagccctgtgagaagtaccatgaaaagatttcttttgtcaaacagatatataagaaatgctgctagtatgatgtattcccttctaggaaagtgacagtttatctagagttttccccagtttatttcatcatgcaacactgtctcatagtgtttaatgctcatgttaggaggcttaaaagagttagtaggtgtgaaatactgagaatagcatctcacatgtgggaagtgctatgtgttttgctcctgctattactactgctgctcctgctaccacttccaatactggtacccagtgtgaagtgttacattagcctcatttgacaattttaagtatatttataaagtccttctccttttccctgatactttggtttcctacttctatttcctggatacacactattccggtatacacactattctatggactaagttagttataacatattgctgacatttttatattcttctctcttcatttatgatgtccacataatttacagttcttgaacaactgatcaactgcaattgyacatcttcattagtaagtgatgctgggcttcccttttttatttagttacttcaggatctttaccagctactctaaagcatttttattctgagcctgatggctttaaaagttagcaaccagtatccaggatcccttcagaatatggcttgcaggtgtaaattctacagattcagataacctcattcagtgctatcttttaaatgtttcaaggctcagagcagtacttatgatcttagaatttctcatcttttatactgttcattaatwcttttatagtgtctcatataacctcatgttctaaattgaaaactggtctcggccaggcagagtggctcatgcctgtaatccccagcactttgagaggctgaagcaggtggatcatttgaggttaggagtttgaaacctgcctggccaacgtggtgaaaccccgtctctactaagaatacaaaaaattagcccggtgtggtggcacgcatctgtaatcccagctactcgggaggccgaggcagaagaattgcttgaacccaggaagtggaggttgtagtgagccaagatggtgccactgcactccagcatgggcaacagagggagactcaatataaaaaataactacatacatagatacatgcatacatacatacatacaaacatacatacataactggtctcaatgcagttaatttaccatagtgctttcatataacagccctgatccaagaatttggttttactagtctcttgcttgaaaaacaaacaaattcatctaaatggggagaaattcccagtttttcttcctaaaaatttaaccaggctcctagttatgaggatcaatgctgatatctcttttttcctgatatatgactgatatttgattttccctgctgaatcccaaatctgcataaggtagcaggttttaactctgcagctctcttgctcttaataacattaataagctgactacatattcggctagggtttcctttcattaagttatwctttcattcattgcttcgtgcattcaacatttgttgagcctctgcttgcattaaatactatatcatactcacgtctcaagtgttacatacaatacagcttaacatctaaacaataggtaggaatgccagagaaactcttcttgtatctaggcacttcaaacttaccatccccattagccctaatacaagtttttttaaacgttctgtaacactcctgagaagtcatcatcaggctttgcttgaacactcaagggactttatgttcaataccacacaaaacaccctattttctgaacaaattaagtttttttcttttattgatctagaaatttgatgtactatagctatttactgtgattagttcaaaataaatatatattcttcctaccaagataaccccaaatatactataaaaataatgcattgtacattcaaaataaatatactatatactctccctctcatggtaacttttcatctggtatgttctttccccttccccatgcttccttcctacctcttcattccttccttttctttttcaaaataattaatcaattcctcatcatgtaaatggttgtcaatttcccaccatcttcaccaccctctgatagatgcactccaatttgtcagaccgggcacaaaaatttcaatattgcctgactgattggctcagatttttctttattcaaaactcattcttcaacagttaatttccacccttccctttctccttcctcctcaaagggtacagttctacatatttcagtcgaatccaagcacttctttcctcatttactgtttagttgttgcatcttcaccattaacctcctccatagttccccacattcattcattcattattcattaatgcattcattcaacagatcttaattgagagcctacttcagggcaggcactgttaaaatacagcagtgaatagcatggataaaattccctactctaatggagatgccacttgctagtagggaaggtagctaatggatttagaaaaataattaagtgtattatgttagacgttactgagcgctctgggaaaaaaaaaaaaaaaactatgccaagggagtggtactcatgagcgctgagggatggcttacaatttttaactgggctggttgggtgatgaaaaacaaaactatagtctcattttccctctttctggtagcgtagcagaaagctggttcatcacttctgagttagttcaatggtagagcaggctgacaccagccactggctctagaagcacttctttctarcaggccacttgtgtgaccagggagcttctgctattataagtttgcataaatatcctgtcaatacatagagcaggatgctgaaactgtaactacagtgtgtgtagagcatttgtgcctcacctcagcagtaggacaatgggagtttgggagattgcatgcacgctacctacttctctgattgtgtgttgttcccacaataagctctgtttctgtcaccatcacatggcactagtggtgtggatccatgacttttataggacatcacagcaggtttcattgtgaaggttgcatttgaatcaagactctcaaggaggtgaaagagagaactgtcagtgctaagggaggggtatgtctgactgggcaatgtggccagagcagaaggaccaagaggaagagtagctggagatgaggttcaaggggtaagtgaggccagatcacttaargccctaaaggactttagcttttacccttgaagaaacaggaaaccattggagggatgtgggcaaaggagaaacatggtctgtctttaaagttttaataggattattctagtttctgtattataataaaaaaaaccatgaaaatagatgacagagtaggcacaggaagaccagttaggcccatacagcaatcaaggtaagagatgatagtggcctggaacarcacgtagccatataggtgactatatttatattttgagggtgatccaaaaggatattatgacacatcagatgtgatgtataatagtaatagaagacttaagaataattctaaggtttttgctctgagcaactgggagtttggaaggttttgttttgtgttgagggctccaatagagcctaaagtctaatcatagcattctcaatccaaaatcaatcatttccatatctctacataatttctgtctgtgtctatctcttcactaatttctaagctcctgtgatgtcagaggctgtacctattcattatatctcctatgatatcttagcagtctttggcacattagcaatataatacatgtctgccaaatattttttaaatatagatttagaattaacatcttgataagccatatgcatataaataatctgaaatccctaggcagttttccatagcaataagaaagaccttatacttagtttgttttcttgttaatggctttatatgtttatactctgtagcattgaatactaagtagtagtttattttttacaataatcctagacataagttttccttgttacagctttggactttgggttaacagaaatttgtctacttaccagatgtcagcattcaattaaatgaaattaatctaaattattcctagttttttttcagtgacaatatataaaatatacaataagcttttttcttgtaaatttgtttgagttcattgtagattctggatattagccctttgtcagatgagtaggttgtgaaaattttctcccattttgtgggttgcctgttcactctgatggtagtttcttttgccgtgcagaagctctttagtttaattaggtcccatttgtcaattttggctwttgttgccattgctttggtgttttagacatgaagtccttgcccatgcctatgtcctgaatggtaatgcctaggttttcttctagggcttttatggttttaggtctaatgtttaagtctttaatccatcttgaattgattcttgtataaggtgtaaggaagrgatccagtttcagctttctacatatggctagccagttttcccagcaccatttattaaatagggaatcctttccccattgcttgttttttgtcaggtttgtcaaagatcagatagttgtagatatgcrgtgttatttctgagggctctgttctgttcctttgatctatatctctgttttggtaccagtaccatgctgttttggttactgtagccttgtagtatagtttgaagtcaggtagcatgatgcctccagctttgttcttttggcttaggattgacttggcgatgcgggctcttttttggttccatatgaactttaaagtagttttttccaattctgtgaagaaagtcattggtagcttgatggggatggcatttgaatctataaattaccttgggcagtatggccattttcgcgatattgattcttcctacccatgaacatggaatgttcttccatttgtttgtatcctcttttatttcattgagcagtggtttgtagttctccttgaagaggtccttcacatcccttgtaagttggattcctaggtattttattctctttgaagcaattgtgaatgggagttcactcatgatttggctctctgtctgttattggtatataagaatgcttgtgatttttgtacattgattttgtatcctgagactttgctgaagttgcttatcagcttaaggagattttgggctgagacagtggggttttctagatatacaatcatgtcatctgcaaacagggacaatttgacttcctcttttcctaactgaataccctttatttccttctcctgcctaattgccctggccagaacttccaacactatgttgaataggagtggtgagagagggcatccttgtcttgtgccagtttgcaaagggaatgcttccagttttttcgcattcagtatgatcttggctstgggtttgtcacagatagctcttactcaaacaaccccatcaaaaagtgggcaaaggacatgaacagacacttctcaaaagaagacatttatgcagccaaaaaacacatgaaaaaatgctcaccatcactggccatcagagaaatgcaaatcaaaaccacagtgagataccatctcacaccagttagaatgggaatcattaaaaagtcaggaaacaccaggtgctggagaggatgtggagaaataggaacacttttacgctgttggtgggactgtaaactagttcaaccattgtggaagtcagtgtggcaattcctcagggatctagaactagaaataccatttgacccagccatcccattactgggtatatacccaaaggactataaatcatgctgctataaagacacatgcacacgtatgtttattgcatcactattcacaatagcaaagacttggaaccaacccaaatgtccaacaatgatagactggattaagaaaatgtggcagatattcaccatggaatactatgcagccataaaaaatgatgagttcatgtcctttgtagggacatggatgaaattggaaatcatcattctcagtaaactatcrcgagaacaaaaaaccaaacaccacatattctcactcataggtgggaatcgaacaatgagaacacatggacacaggaaggggaacatcacaccctggggactgttgtggggtgggagrarggggggagggatagcattgggagatatacctaatgctagatgacgagttagtgggtgcagcgcaccagcgtggcacatgtatacatatgtaactaacctgcacattgtgcacacgtaccctaaaacttaaagtataataataaaaaatatatatatacaataagcagtaaacaatagggttttaggtcattttgtttgggagagattggggagcagatagttgatactctgtctatgaattttgcagggcatctaaaacgatatgcctgagttctaaaataaaaccagggtaaggatcacaaatttaaattaagcattcattaaattctcagcatgttctctggtgttaggccatctgtagacaatcttggcaaaacgaacctcctagactgctcatcaaagcatcccacttaggagtacagttcttcagcaaaacatctagggccactgctgggcagcaaacgcaagtgatcagtgttgacagtaccattgacccaatcttctcatattcttactaacaactttttgttacctgagtgagaacacatgtgcttgttacaactaaaaactgagtgttaaggaatgtctgtcccagagaatacttagcaagcaacttagggtaatgttctctgatacatgtaaaggataattattagttcaaaaatacttaggatttgataactagtacctgaacgaagagtgtcgattaggttggtttccaatgtgtaaaaatttcaaatattactgaaaactgagtaaattttcatctgctcatgaacattaatagcacgatcaaggcagaacataatactttaaaacaatccttagccttggcaacaaaagtataggcatcaaatatccagtcactagtacttttttatcctaccataaacactgtgttctttttctttttaattggcattcttctgtgttttgtggtgttatcttctcagtcaggtctcagaactgaataataaccactaatgatttgccagtcagttattatggctatgctgataacttctattccaagtttatttatttaacagataacttctatttatattaggtaatgttagtacttcaggttttgcttaacttggaaaacttgataaataatatttgactgtgctcttaatagttcctaattggaaactttaagtcactaaattatgagccactgagtcatttgctaataatgccccatgtatgttagctcagttgagagccaggtgtcatacacatgcaaaataaccagatacctacctaagtgtgatggtctctctaagcaaggtggcctcccttgcctatgctaatatggagttgaaagtgtttgtaaaagggggaaagttatgccgttaaacgaagcatccagtttgcaaatgattacctattgaaaaaggtcgcagtattggtgtaatattatctaagtggatgctaatatgcataaaagagttctctttcaagaagcttccagaacaacatgatgcaggtaggttrtctataatgttargcagtgaatgaagagtccgggagatgataaccacctcaacgttcccatttaaatgtcactgttactgggccctttttaattctattccaggacgtgtacctaccaataatttttactttagaagtttcttggtgtggtaggaggagtttgatgatgaaaccatgcatccatatatatagaaacaagtggatatattatcagtatggatggaaatatattttacaggttaaatcattctaaaaatatttttatcaaataccttattctgatattgcttacatctgggtttaaatccatactttcctggagaaacatgttatcttttactcttgtctcagtaggtgccaggcattcaaatgctgtttttccagctcaaaggaattaaggacccaaaggcatttaccattgatatataggaagagtggcaacaataagtcacgctacagtgtgtagaaaagtagaaagcatccctaccaatccttaaaatgtttggctgagagctatacactgggtggcaggagaaactgattaaccttttactcctaagaagattcctcaggcatagagtatggttaatgccgtgagacatacagtatttaataggtgttcagcatctcagaaaaaaaaaataatagttattttaggaatatcactgatagatggtggtgctcaggaagcctgcggaatagaacccgaatatatttcgctttctttgcttggtgttttgctggcctttgttggaagtcttatggagcagtttaagtgagcagaagatgagctaaaggaatggaaggaggagacrtaaggaacttgcagaattaaataccctgccgagatacttgtccattcagcagcttcagttgcttagcactggacctgatcctgtggaggatgcagaagcaatattagaactggcccctgccctccagaatcgctgtctaattggggatacaacacagaacgtacagtaattaaatatcagagccatgaagtgccatgatgcaatgcctaccagagggctaggaaaggtcaaagaaggggccagagtgttgtctggattgtcagggaaggctcctgggaggggtctgggctggacttttgagacagggaagttaaggtcagcagaggtcggggaaggagcagcattccagaatgagcagatatttggagttggaaatgtagctgagggcctcaggaggtagtaggaagctggtctgggtaaagagaacacatgtggaaatggatgcagatttcattagagagacaagagtggccagattatgaattgtcatggaattcaggccaagggtttggatttcataatttagcaaatagcatgatagactttacatcaaaggtgagctgctgtgaggcagtatttagaacagaagagaaagaaagccagaagcaagaagaccatttggctggcagttttctgagagtaggaatgatatagatacctgaattgggatggtgcagctgagaattactrwacgattaacttcatattgcagagaaagaaagcactttacttagaaaggcgacaaggagggctgaacggtgtactaactttgcaaggctagttcacagagagaacaggagagttcttgcaggggggaaacatgggactttgagctagattacagggaataagttgaggaatttggtttcagacacattaaatcagacataaaagctagtcttcatagcagtgtcatgaaaacatttgaagccatagtctgaaattcaggtgagaagccaaaccatatcgaagaatctcctgcattcataagggaaaaacattagtttaagtgaagacagcagcggggccaaagcctaactgtgagggctaactactgtttgggtggaattataatattttagataagatttaagaggattctaattctagctacttgataggaatgcgaatgatgataaggcttttagagttagataagagagagggctarcaccctgatattctgtaattgaaacagagtttcaagtcctttggtcaagtattacccttattccttcaggaatagtagatattttaagattacagataggttatcttatctaatttacctacctattgttgaaattatttaatttgcatttaactgtgttttcactggcttatcatttctctcttctagagctaacttatctcttgttatattccagactcttggtgtaaattaccttcattgaaaattttggagaaatatagtgttttatttctttatggataaaatagtcccagagagagagacacaaggatggacacttagaaaacagtcccagctactcgggaggctgaggcaggagaatggcgtgaaccckggaggcggagcttgcagtgagccgagatcgtgtaactgcactccaaactgggcaacagagcgaaactccgtctcaaaaaaaagaaagaaagaaaacagtccaaggagagaattctaatgcctgacagaagtaatgtttagaatgagggcttctaactgaagttttcacagacataggatagaaatcttagcaccagattttctgccaataatagagttagatgtgtgtcatttgctcattaaaatggaggtggcatcctgtcctctaaaattatatcatgatctcaagaaaatgaaaatgtaccatttctactgcatggctgaaaatgatttgggctgattataaaaattagttgtaatggcatgtatcagtatacttaaaaataaaaaatgtactgcagaatgtgcaatggaatagaaaaggactttgattatcaacaagagtatacttcatggtaggtgaaaagtaaacatgaggccattcatgagaaaagtctgtcattaatgcatcagtgtgtatatgagggctccaaggccattgattctaagaataactaaactccctccaattctcttggccagtctgtttgggtggtgtctgggaatctccttaataagtcactgctatccacaaatatcactaggaccctttcatgacaagagtattaactttggaagaattctgtggctgtcaagtcaagcagttacctgaacagaggcagaatatattggaagatgatgtgaactcattcccagttgtcttagctcacttttacctcatgcttggctgtagaaaactttttgtcacagttcagattaggccatggtacaagtaacagcaacccaaaaaccttaaataggcttcaagaagataattatttctctttcccaaaaaatcctagaaatactccagggctggagggcagggctggtcatctctgttccaggaaatctttagcgatccagtttctttcaggctcatgctccaccatcctgaaggggaggctttcctcctcatgaaccaagatagtagctttcatattccagacagcaggatagaatgaagagccaaaaagaaaggcaaaggcgtgtgtccactgtattgttaggaaaggtcccagaagctgtctcatgacacttttgtttatattccattggccagaacttggttgtatggctataccgaactgcaagggaggctgagaaatgtagccttctctctaggcaaacatagcccaatgcataatctaagacatgaaagaaggggagaataaatactgggagaaagtatacaaccacaccttccttttccattgcagtggcaccatagtatcagcaggtcaatttatatagctgcctgcggaggtgcctgaagcagagtggcagttgcacagtagtgcagcagtcgctaagagcaggtaccctggagtcacatcacttaggtttgagtccagatttttctcatatgtaaaggggaaataatattagtaccttcctcttagagctgtgacaattaagtgaaatactgagtatggcactttcagcatggtayctaagacttcaaaaccatttgataaatgtgattagctcttatattaaaagtaaaatgaaagttttagagcatccatagacatgtaacttttctgtacatctctacaatgtggaggatgtatttacttttttccagctataagagtcagagtggttttcatttctaactgcacttttctccttttgaaaataagctgggatgtgcatgcttggctgggaggatggaggtggtttgtaacaaattgtatgaataattttcttgaattttccatgggttctgcatgtttcattgataccatcttacaggcttttctttataatagttttgatgtgaaggattactttacagtaagcatctacaggttacccctttccactgatgtaacaaagtgggaattgggcaccacatcaaaaggatgaggccattgttggccatccttggatggatggggttcaaagatggcaatgtggagtgggtattctctgtgtttgcctgtaaaaggatagacagctctgaattgcaaaatactattgtctatcaaaatgtaaaagtttggcttgttcttcatttagaaatggtgataggaaagaagtgggtgaaaatggttgtgttgagatatttttgccaatacctaaatgctcttttgcttctctctttttctttctttctcaaagccccctctttgttctgtggcttttcttttgtaactcctccagactacagctttgttcccccttcttccactcctttctggtcaggtactgctttactacttttatttgtctcttcaacttgcttctgcttgcaaataaaatatttgagttccatgtatggcttctcatacggatacatctcctcacagacaatccctcgagttccattaccaccatgcactttactcttctctgtcatagtcaccgttcatcatgacatttcactcctctggtgtttgtgtgtgtgctcatgccatgagacattctataatttatctgttggggagagtttgcagagggatggggctgaaagtataaagggggatgaaaaatctataaaatcattatttttcttgaagaccagaaagtttagttgaaaaaagccaatgtttatgtattttcatgaagaaaataaatagaaataaaatcccaactttgttttcaaatataaaagtaaaattcagtacacattacttgaaaagatgactggcgcccatgaattctgcagttcttcggtttgtgcatgggcattttggtcttgatttctgtcattacccagagagtttaatggctatttacatgacatttagggtatacattagataaagtctgttttctgaccgatttttaaaaattaacctgcacatcccaataaaaatcatagaatttaaaactagaaaaaacttagaagtcatctagtacaaacatttcatttcatagatgagaaaaaatgtggccttgaggggttaggagacctatgcaaggtcaccacacagttgatgattgggtttttccatcataggggtgtttttatgtgcaccgactctaacagtagtgccccagtaatgggacagttttcagtgagaaagctattaaagtggtttgtgtcctgaacagtaaaacaaaatgacctatttttactccctttacagttctgaaatctagagtattgccattcatttatttcgtgatggacacctggagtctaaaaaaatttctgtcattacaaagccatgaataataggtcagagatccctgtggccaagtgggcaggctcttccagggtaacacaggtcataacttctgctgcctgagccctgggaactgttaaaaatacagatggttggtgtttcccatttgtctctttttcttacacttaagttcctttaccatttaagayttataaagtttcaccaacctccgatgagtgattctcagaatcactgaacatataattgaaaacactttataaccccaaagagcaacaggtagagaagttaatataaagcgtgccatgaaacactagagactaacaaacatgaaccactggaatggagttttcttttcagaacagggccagcagggccagggagaaagttagctcctctcctgccatcgaatattaaacacgcgcgcgtgtgcgcgcgcgcgygcgcacgcacrcacacacacacacacacacacacacacasagagaaactcaactctgaacacaggatatttaataccctgacatcttatttttgattagatacatcagtaaagtttttctgtaaggcagtatttgtttcaaagaaagaaaatatagatggtatttgtgtgttccttctctgagacctgattcacacctcttcacttaggtgaattatatasaaaacaataactaaatttatccccaaatagttttaacatagaaagccttgttagggaagaaagtgccacttaaccagaagtgataacatagatttgacaagagactgacatcagagcaaaatatttcgttgttttgagtgttagttaaagcagttactggataaaaacataaagctttaccttggaggtgctggttagattactgggccatcaataggaagtgtatgatgaaattattttagaatctatctccttagatacttagatattaacgagtttttttaatttgtttttttgttttgttttgtttcatttttataaaaactagtccttactttgattgaggttcttatgaagaatggaaaaacaggacaatggttctttaaacttatgaagcgaatttgcttgcacctgattgaattgaaacagcaattctgctgctttcaagctcctctgccattatcgctggtctgtaatgaaatcacgactgtgcatttgatagcatcaataacattcatctgattaggttgttatggttgttaacgaactgcaaacctactgtcattgcttgtcatttcttgacagtgttaagtccaaaagtgctgggcattgccatcgctcggtatgacttctgtgcaagagatatgagagagttgtccttgttgaaaggagatgtggtgaagatttacacaaagatgagtgcaaatggctggtggagaggagaagtaaatggcagggtaagttrgccctctcgatgtgctggtgcatgtgaaagaaggggactgagcagttgtttgcacccattgtggcaccagggagaagcytctatactgtattacagctttcagcccacaggcctctgccctctggaaactggtgctgtgttttgctgataccagggactcgctgaaaatatttgaaatgaatatgatagtgacataaataaaattcacctgggcaagtgggacagcttgctgcttggaaaagagtcgaggagcatttcagttctttttagaccctgagccatagagctaaactttatgtgtattgcaaaatatctataagaactgctgatgtaaattggaaagaatgggacatagtacctctgtcttttcatcctgttctacagcagaaataggaatcattatgcagcagagcccccctgtattatacttaatttacatatttatttgtgtgctagtggattagaacactgtttattttattcctccatttygatcatttactctattagrcttctaagagcagttaaaccaatcttctcacctacaatggacataaaaccccagtttaattggggtgttatgaaaacaaaatactctgtttgtagaatyctttgaagtgtcagatacaaagtcatgttgctgtgttggttgcttttcttttttaggtgggctggtttccatccacatatgtggaagaggatgaataaattcaaatcccgtgttgcaccctgcaccaaaaatttcagagaagggataaatagaagcctgcacagcatcgtgaattaactraagtgtttaaaaagctgcatttctggctgttcaacatcctccctccttagcccctcctaagtcttaatgctgagatttctaaagatgctggtactgacagattaatggcttgcctagagctgtgcaagaaacagcctgccagtctgtcattgtcagggaccagggcaaaaccaagagctgttcttcccagaagagccctgcaaacacattggttcgtgcttccctttacttcttctggtcagataccatgaatgccagtcatcagtaaatcttaatacacttttgctttattctcacatgccattcaccagattatttgatggtacaaagaagcagaagtgtaattttccttttcccagcatgacgaaaaattggagttctgccatttgagcagcttactggaaagatccagccttacttgtcttaaattgtccaacaaggtgactcattgccyggcaaacacttttaccctcagatgttactcatgatattataaaatatgaggccagtgctcaggtttgcatcataagtgagctatccctgaagggttttaattacttatttggtgtcctgattatatttgcaaacttctttataaaaggtgaaaaaagcacacaaaagagagggtgtcttcatattaaaccttcacaaccttcatgatttcataggattattttggaaatatagcacttgactttatgaaaggatctgggctaggtatattargggtagttgccaataacctgaagaagctggcatwgtttacagaaacagatcaagggctataatttatgtcattttatagcagcagtatctattaatacatgccttttcctcccatccacctcccccgcacacacacaaagatgacctgggacatgatttttttattcccacattttcttggagcacaaacaactttgttgaggattttggaaggaaagcacaactgggtcctttattcatttctgggacagaaagagggtcagtggacttttgtgggcctccagcttctctcagagtctccccctctgcagcccatcctgggagtgtattaactggagggaagatgggtcttgcagtacatttgttttgcccagccatcactcttttttgtgaggagcctaaatacattcttcctggggtccagagtccccattcaaggcagtcaagttaagacactaacttggccctttcctgatggaaatatttcctccatagcagaagttgtgttctgacaagactgmgwgagttacatgttgggaaaaaaaagaagcattaacttagtagaactgaaccaggagcattaagttctgaaattttgaatcatctctgaaatgaagcaggtgtagcctgccctctcatcaatccgtctgggtgccagaactcaaggttcagtggacacatccccctgttagagaccctcatgggctaggacttttcatctaggatagattcaagacctttacctcagaattatgtaaactgtgattgtgttttagaaaaattattatttgctaaaaccatttaagtctttgtatatgtgtaaatgatcacaaaaatgtattttataaaatgttctgtacaataaagttacacctcaaagtgtactcttggaatggattctttcctgtaaagtcttatctgcgactctgtctcgggaatgttttgtctgttgccgtcagccgaactttgttatggagggagcagcctcacacaagcagaaacactcctgtggatggtattgtagcatgtattgtttattttagtcaatagaccctctccttataaatggtgtttagtcttcctgttgcatttcatgggcctgggggtttcctagcagaggatattggagcccctttttgtgacattaccaattacatctttgtccacgtttaatactttgttttggaaaatttaaatgctgcagatttgtgtagagttctaataccaaagacagaagtaaatgttttccatatactttgtcttgcctgtatgcagccctygtgtaatayggtgaattagagtggtatttcactttgtattattttgtaaatatgtcaatrtaataaatagtgactaaattgatttctaagagttggagtctttttattgaatgatccctgtattagtcagggttcccctgaaaatggatggcactggattgtygggcctgtaccaggccatcgccagcagtccagagtgaasagaagcagtgtatgtgtggaggtcaccacccccccgcccgccagccccgtggacgctatgcgtctagtaggagggccgctgcggtgagtcttgaagcccagggctgggcccgggcagagccgccgcaggtgcagatsttggtggtagtagcacatattctaaagagaacttcaaaggccgaagtggagaagggttccatgtgaacagcagttggacatgggtcattcggtcctgagaaataggtgagcgccattctgaatggacaggcgatggcctctgttgccctcagccaatcgaaagggagtccggttcagatcccgaatccggagtggcggagatggacactgccaagcgtccagcacagtaatgcgaaggatcccagagaagccaatggaagccccggggagagttcttttctccttgtgaagggcagggcgccctggaattgggttcgcctggagagaggggtccgcgccttggaaagcgtcgcgcttccagcggcatctggtgagctctggagggcccttgaaagtgcgggggagagggtgtaaatctcgcgcccggctgtacccatatccacagcattcctccctctggaactaagacctctaggccagcacaacagaatgtcgcgggaacaggaagcaaaaattttgctagtggatcacttagggtgatggtgagtggtgccacttccacttccaccccctgattcctggacccttgaatcctggccatgggagaaacagtaccatacattggacactgattcagagcatacacggccttctaaagaattttgtcccatccctgcaaagtattgtcacctagttggcattgtaattgtgacttcaaaaggccattccacctttctatcaattcagctgcttcaggatgatggtgaattccatgagcatgagcccactgctacacttctttagccataaagtgagtgccttggacagaggcaatgctgtgtggaatagcatgattgtggataaggcattctgtgagtccacggatggtagtcttggcagaagcattgcatacaaaayaggcaaacccatatctggagtaattgtctattccagtgaggacaaacttctgccttttccatgatggaagaggtccaatataatcaacctgccaccaggtagctagctgcctgatcaccccaaggaatggtgccatatcgagggctcagtgttggtctctgctgctggcaaattgggcactcaacactggctgtagccaggtcagccttggtgagtggaagtccatgttgctgagcccatgtgtaacctccaaccctgccaccatggccactttgttgatgggcccattgagcgatgacaggagtgactggagaaggaggctgagtggtgtccacagaatgggtcatactagccagttgattattaaaatcctcctctgctgaggtcacccattggtgagcactcacatgggatacaaatatcttcacagtttttggccactcaggcccatccacatacctcttccccagatttctttgtcaccaattttccaatcatgcttcttccaggtccctgaccacccagccaaaccattggctacagcccacrtatcagtatataatcacacaaccaggtgcactgattgaagttctgcccactggaaatatttcccttcagcactgtccttcagggatgtcttggaaaggggctgtagtgctgcagctgtccactttgggtgatgcctgcatatcatgaagaaccatctgtgaaccaggccctagtcttctctcctctgtcaattcatcatagagaactccttatgcggccattggtgcaggctagggaagagaaagcagggtggcaggagtagagaccatgggcgtttgagccacttcctcatgtaacttacttggccttcaagacctgctcgagcccgatcacgtatataccactttcatttgatgatggaatgctgctgtgcatgacccactttatggctagatgggtcagaaagcacccagttcatgataggcaattcaggtggcatggtgacttgatgacccatagtcaaatgttcagtttccaccaaagcccagtagcaatccaagagctgtctctcaaaaggagagtagttatctgcagaagatggcagggtcttgctccaaaatcctggaggcctccactgtgattcacctatgggggtctgccgaaggctccaaacagcatccctatctgccactgacacctcaagcacgattggatctgctgggtcatatggcccaagtggcagagcagctcgtacagcagcctggacctgttgcagagccttctgttctggaccccactcaaaactggcagcctttcaggtcacttgataattgggcaggactaatatacccaaatgaggaatgtgttgcctccaaaagccaaataggcccactaggcattgtgcctctttcttggttgtaggaggggccaaatgcagcaacttaccctttaccttagaaggactatcttgacaggccccacagtcccataacacacatacaccagccccataattaacatggggattaagccctaattttgtttaagtttagctcaggattgctgcctaagttatgaacagtgaactacaaggtaaactcaatagttgccaataacatgtattggcatgcttaccatgtgccatgctctgttctaagtgctttatttgcaccaacttacaacaacccccaaaggtagaaccccataatattttcatttgcacatgaggaaactgaggtacatcaagaggttgcaactttcccaaagtcacacagctgctaagtgtcagagctgaattctgacttgggtggtctggctccagagtccgtataaccactaccctatcctgccacactttgtagggcaagagagagatttcgtacatttttaaacttacataaccgagaagaaactatacgatactaaacagtggtttgaacaatgaaaggttaacacagaattcagaaatatgccactattcctgccacctaaaagaaaacccaaaaaagatattgcctagagagattagtatcagattgaattttcgtttctactttgattcactcttgcactagaaaatggctgctaatccagagaggcttggagtcaagtttcccttggtggagcaggccagctgataatccacagtgatggagtctgtcttagggagagggtggaatcacttcattccttctaaggaccaggaaaggccatggtggtagcttctgcttgacttcaccatcacaaccttgctacaaacacaaaattcctcttattttcattacgatacagtgggttatacagccctgaatccattatttgaggagccaactccgttggtatctttatcacttctctttgacatattaacattacgtgactgttagaccttgtatcagttcatcaccgtcctcaccactgccaattgtactcaccgttgctccctttatttgctagttaacatgggaacacagctttgtaacaagtattttgtcttccaccaaatgagtgaagtaaaatatgctggtagttagtttttcgttgtttgtttgttttgagacagagtttttctcttgtcgcccaagctggagtgcaatggtgcgatctgtgctcactgcagcctccacctcccaggtccaggcaattctcctgcctctgcctcctgagtagctgggattacaggcacccaccrtcacgcccagctaatttttgtatttttttagtagagrcggggtttcaccatgtttgccaggctggtctcgaactcctgacctcaggtgatccacccacctcggcctcccaaagtgctgggattacaggcgtgagccgccatgcccagccactggtagttagttttgaggcatcttgctttgttctacttaatctgacagctgtacagaagagtgaaaaggtatggccctataagtcagactgactgtctcagtttatatctcatccctaccatgcagaacctccaccaatcagtaccacaacacctacttcatagaacggttgtgtgacacaactgagatcatccacataaagtggaacagtggctggcatatacaaagccatatttgtcattatcatccttgttgtgattgtcagatgggtttgctgacaagtttggatagttggcatcttaatatttgaaattctttagcataaattaggctcatttattggattraggagaaaaactctgcagattcgaaattaacctttctaggatgggaattaaactatttgttcataggaagaaggagggttttagcatcagtcagaccggggttcaaaccccaaccctgccactaacttttaggagcatccactacctcttctgtaataaagggatcattaaaagtgcctgagagagctgttgtgaagaataaatgataacatatgaaaaaggtccctagtacagagcctcacacatagtaggtatgcaagaaatattggtttccctccctttatgaaagataagatactcaggtatcaaattatgtacttgctgccgttattttgaatattattgggagtccatgctttgttttttacatatagtttaattttctgcacttaaattatggacagagtaaaaagtatacatgttcaggaagattaatatgcaaacccacaaacaatctcagaagttgaatttaacagctctacattattttgactaggaaaatggaatttttactcagctcataatcatttagactgagtccattagtcacttcatttttcactgaaaactagtttgctgtgattggttggactctgattagaaatgttacgcacccacatctggtctggcaccttattctaagtaataaggtggtttggaagccaccttattctaagtaatgaacaagtcccagaaaggatatcataaaggaattctgtctctcgttcggtgccattgattaaaccagatcgagggaaacagtgacagaaaacaaactccttttgaagcactctagacactggctgtcaaagtccctgaatttctaggcacaatgcaactacaaatgatgacccaggcacatggccagatgggaagagtcctcagtgcagaaacacagtgtacacaaaagtcacttcacaccctgtcctctaatggatgttgcgatccacgttgagagtcctgaataggagggaaggtggactccagaagagccaatgtgtccaattcatgatctggcttgcmcaaggtcatgcagatagaaaatactgtcaaggtaaagactaaaacatgggtgtctcagctgtaagtcaaataaatgctgtctctattcctctgtcatacatcagtactcaggaccctctgactccagtattatttcctccattcttaaggcctttcttctgggaatcattctgggtgactgctgggatcctagatcaggtaagaatatgactgagtcacaatccttgcacctcttgctatcaacctgtcttgatgactttgaaacgtgtcaataagaacagtaatgactcgggagtctgatcagtaaatgcttgtggattttcctatttatttatttattttttgctttaagttccgggatacgtgtgcagaacgtgcaggtttgttacatgtgccacgtatggtttgctgcacctatcaacctgctacctagacaaggatgaagcttgtggattttcttgtgatccaaatgacctcyctatagaaagtgatttttttttccgacgataatttatagtccatctccttttctcttttggctgttctttttttgtactggtatctgccagacagtatgctaggtatttgtcgtatattatctcatttatctcatataatccttct

SEQ ID NO: 9908 - DNA, 105550 bp, Homo sapiens
aagtttgtgtcttaaaccttcagccatgctctaatcccaaatgtcaggaacaaagactctgactgatcaggattgctttaggtgtctactacggggtcgaatcagtcctgggcatgggaagtaggggtcacatagtacaactgtggctgccagaagctgctcttcacaatctggatgaaatattcagagaaggaactataacttgtgggktgggccacaaatccaaaaagggtcttgtgagtattatcgtcactgaataaaytctcaggtgctgyaaagagaaaatggtgttatttctagtcagaatatacaaccatctcacaatgatactctaaggaatcaaggcatagtcctatgcaaatctaaaattgtccattgaatagccacrgtccgagtctacacatttaaagttgtcttattctaggattctaatttgtcagagggctgtgagagtcaacattctccattctctaccttagcaatactcttttcacctcctccactccaacaaaagcttccaaaggaaatcttccttcttaaaagaaactgatttccatgattcagaataaaatttagtaaagactratgaattaggactccattaatttagcatttttgctacatcaagaatcaaaaagggattaaacttttctatccccatatctcttaaagccaggaaagatttgctaagtgaaataaaaatgtgactttggacaagttttgtaacctctctaagactttgtttccttatctgtaaaatagaaattaacttttcataggattgttgtgacaattaaatgacattaggcttgacatgtagaaagtactggctattagctatgatgttgaagataatgttggttgtagtgatggtagtaataactctagtggtgatggtggataatggtagtggtggtggtgatgatcgtggtgatgatagtggcagtggtgatggtggaggtggtagtggtgatgatggcaatagtggcagtgaaggagtggtgatgattaattatgacagaaccaagaatgtataaattgttctcagcacatagtagtcacatagtaaatgagtgcagagaacaagcaatttttagataattacaaggctcttagttaccatttacataccaaccatggatatgtccaaaacaaatcatgcttaaatgttcatcaaaacagattcctaaagccttccaatagatgtttaaccactttgtatgaagtggagagaagaggaataaatatgaattttagttactacatgaacataaaataaatataattaaaaataaatataattacattcccttaartaatagtgcataaaatatagactgttttgcttgtgttccttccagttagcttgctacataaagccacataccattaattcaaatttcatcgtcaaaaattcacatttctaagtttgttatcatccaagtctaggaattgtcctatctgcatactattttaacctccaaaggtctgcgtaaaacccattttgtggctaacatggatctatctaaaaaatccagttgcatctctccccttgggacttccagggtgcagcagccacaccaatttctttatttaccataatttgaaagccttattaatcctaaaggctcagctctataatcacatttggttagcttgagactaatccttagaggttatttatttttcatgaagattgcttcccagctactggtttatttagactttactaataattatttcgcaagagcttttttcaccactgctcatttatatgtgtagaattcacactgtgaatatgaactaaggatgaatttttttaagagttaaggtttaactggaatgtcattttttctttactgtgccagatcattccttttctgggaagctgtcccgtgaaataattaaatattgtccctttaaaagagtctgtgacctgctgcatttgtaatccttgaattccatgattcagcccaagatctcccagctttccatttcacactcctgctcacatttggtttagatttggcttttctttgctcgagaggaacaggatttattactaccagtcagaagccatcagkccccaatatttcagcaaagaaccctagtctgccagagtgagtaatgctctgtttgcactcaagtctccctgaaccagtcaccccaaataggatgtcactgcttgcatttatttagaaactgtcaagttgtctatgtgtttcctcccaccagttcatgtgattcctgaaacacccctatgcgctttgatgggagggaaaaaaaataacagtccctcatacatttatgtaatgcttatttatggagcacagtgtatatgttagggactgagagctgagtatgtgctggcaccccagaaggacatgtccctgttctcaggtagcttagaggtcattgagtcccaccatgaggcaggcacaccaggaaatggtcttgatgtcttctttcactgactactcataataaactatgggaaaggtctgattacccttgttttgtggctgggattaccgaaactcccagaggttaagtcatcctctgataagggggaaagccaatgctcagacctggactttctyggtccaaggctgctgattgaattctggattcttcccaaatagtgtaatctcgtgtcaactcaaatcaattcaagtttcctttccagtttcccacatcccatggtttggcttagaaagaaagatggtgcaacacacaacagatatcaagcatctaagagtttgggaagggtttgtgtgaccagtggtgtgggcagggtgtctttagaatggaaagtggatgagaggggagctcaaagaggtgatccaggaattcccaaaggtggaccttgactcagtaagtcaccaggtctgttatttgaaatgagtcatttgtggtatgggggcaaatgacctcagtccctcaccaaactatcgggaagcaagcaaacaaaataatccccgcttctggggagaataatcctaattacagcccctagaatttgcatgcccttctacagtttgcaaagcactttcacacctatattttccttggtggaattgtttactgcactaatggagaagggaccaggacttgatatggcctagtttgttggtttttatatattttttaagaataatcatctgtcaaaatgtaatttcatgcaatagtctggtatataaaactgatgcaagtggaacttctgtggttgggatgggkcctggggagggagaggcacagcttactcctcagcttttactctgaccactaggtctgcttctgaggggtctctaaggaacctccaggttccatgaaacacagtaagacagacattgttcctagtgactccccacgtcacttcactttcttgctccaagaaaaggaagctgaaatccctggaggttgcatgaggtgaaaaaagctgctccttgtcctgtattcttgtgcatggaacctaccagggctggtttcctcacatgagtagggactgaagccttatctgrgagccagtttgcccccagttgtttcaagaaataaagtgtcctcttggtcacagacagcagcagtaacaactttttcctgcggactggcagcattttccaagcacctgctcttcaggtgggagttacgggtcactgycttcattccagacgggyrgctctttgagtcatggcatgccagcttctgagtggctgaggactagatccagacaaggatttttcagtcccaaacactcttcctgaaaatgcaagaggagtagtctttagtcaaacagaatctccacaactgaaaaatttataccggactagacagtggtagtggttgcacaatattgttaaagtactacacgtcactgctataaacacttttaaatgggtgaaatggtaaattttatgttatgcatattttaacataacaatgataataattttaactaagtacgttgcctccttatttcctacagggycaagttcaaactccctggcatagcttacaccttgtagtccccatacctgtaacctcatgtctgctatcttcccccagccccttcatctgatctatgttcagatcagctcacattgctctctattctctggacaagccatgttctttcacttttctatgctcaaacacaattttgcttttagtaatgatagcaaacacttatttaaagtgcttactgcatgcatatgtagacataaatctacggcttaatacatgcagggcttttgagtcatttaatcctcaccaattctatgaagtaatagaattgtaatagtaataatagatactattattaagcccattttatacttgagcaaattgagctaattgccttaggcaaggtcacacaactaagaagcagccataatagggtttggatctaggtgttctagctcctgaatccatgctgttcgtcactacactgtactgcctgtggatgacttacttgtccctgtagtttcatctgaagaattcctcctccttttcctttgaggcctgcctcaaatatcacttcccctgtgaagactgcctggtgttctccaggagagagtgtgactcccttctctaggaatggtagcaccccaaacacacacattttgcagcatatttcaccttgcatggtaatggcctgcttgtgagttttattccgtaccagagggtgagggctctgaagatagcgccaggtcttatttacctcgataccccacaacactcattacatgtctgatgaatgaatgcatagggggatggctgggtgcatttctctcaacttttcaatttcttgaaataaataacaaaatcttaccttccctcagaagtcctggcrtggttcctttcatcttgccacagccactgataatcactttcattttctgtgtaactcaccaggcaagaagtccatgcagatttacttktagtagttcacatgacaaataaatactgcgtttgatttccaaacattaaaccatagtatattatagatagatatagagttatcattcaaagtatgatatttcaatctcaaaaggcttcccctgaagaatattacaaactcttcctctctttaagatctgctgggtaggaaagatgggagaaaatgaattaatgtttacacagaaaggaggataatgggggcaaaaataatagatgaacgtatgggtggatgagagaatggataaaatgataggtggatatgttgatcttggacagatgggaaatgagtggatatatcaataaacagatatgtgggtggatgggtggagaagaggatggtggatggttgtggttttatgaagagatgtgaaaaaggaagtgtggaatgatggatgagaagttgtatgggaagatgaatagaagaataggtggttgaataaattaaaaggtgtgtggttggatgaatgaatgagtgggatgatagatggacctaagtggttagtggatggacaggaggatggatggatgtgagagccccagaaggacataaggaaagatgggtggatagatggatgggcggatggaaggatatttaggaggatgaatgagcatgtgtgtggagagaggtgcccattcacactggcttgaacacatgggttagctgagccaaatgccagccctatgacaggccatcagtagctttccctgagctgttctgccaagaagctaaaattcattcaagccatgtggacttgttattgaggggaaaaagaatgagctctccctctttccacttggaagattcaccaactccccacccctcactccccactgtgggcacggaggcactgcgccacccagggcaagacctcgccctctctccagctcctctcccaggatatccaacatcctgtgaaaccmagagatcttgctccagccggattcagagaaatttagcgggaaaggagaggccaaaggctgaacccaatggtgcaaggttttacggttcggtcatcctctgtcctgacgccgcggggccagcgggagaagaaagccagtgcgtctctgggcgcaggggccagtggggctcggaggcacaggcaccccgcgacactccaggttccccgacccacgtccctggcagccccgattatttacagcctcagcagagcacggggcgggggcagaggggcccgcccgggagggctgctacttcttaaaacctctgckggctgcttagtcacagccccccttgcttgggtgtgtccttcgctcgctccctccctccgtcttaggtcactgttttcaacctcgaataaaaactgcagccaacttccgaggcagcctcattgcccagcggaccccagcctctgccaggttcggtccgccatcctcgtcccgtcctccgccggcccctgccccgcgcccagggatcctccagctcctttcgcccgcgccctccgttcrctccggacaccatggacaagttttggtggcacgcagcctggggactctgcctcgtgccgctgagcctggcgcagatcggtgagtgcccgccgcagcctgggcagcaagatgggtgcggggtgctcagcgcggacccggcggcagcccctccggctgagtcggccctgggggactggagtcaagtgagctgtctgcgaagtgcattgggctccggaaagcagggctgggatttgcgcyaaaccgttggagaatgtgtctgtggaagcaccatttggttgaaagaaaaagagaaagagaagaaagtttgttgggcaggctgccggcgcgcagttttgggcgaggtcgctagagctgcagcacatggcagaaagtaaccgttctcccggatgcgcacagtcgttgtctggactaacaggctcctgtgcccaagggctcgccaagccccaccrggctgtgtctaggcagggcagagctgggcggggcagagactggggctggaacagggcgagtggctgttatcaaggtggtcacagaagggatcacaattccaagtgtgagactagctggcaatgggttttccagaraggggtcctgggttctcccagctccccactgagccttgttccaaagcttacagtccgcagtgtcactgccaccttagcgctgtggaagcttgaaccagctctgcggtgaggtcttgggtctccatgagattccagcctgggatagggagcatgaatatgagaggcaaccactggaccagctgcttggtcctcaccacctcctgcttctgccaatcagtgtggggaaatctcaacagtaaggtggctyatattccctgcctggcagcctcagagcagagagaagagccttgataccagggcaacatcagggaccctggagctagggctccaatatctcatccaaacagggtcagtgctttgtggtggctatggaggggaggggctgcgtgtaaggtatattctagcacggctcaactccaagcattctctttctttgtctatgtatgtacagataattacatggccgatttgcttatcgctggccaaaattaatctttcttttaagaagtgccagctgggtcattaagacagctcagcctgcatgcagtaaattctactcagcaaatatttattaacccagttccacgggagtactgagaaattgaaacacayagtctcacccaggtagtttagattgagtacccagtataaagtatcttgaattactttctgctttctctatcttcctactttctgcagtaggaagaaagtgaccctaggtggaggctaggcaggatgagttctctgtgcatatgcatctccctttctgtgtgagtgagaggtctttgctaggtggggatttggggatctaggatttatactactgaagctgaaataataataataatgatagcaacaacacagcctgtcatggtggcccatgcctgtaatcctakgactttgggaggctgaggcagcaaattacccaaggtcaggagtttgagaccagccttggccaacatggtgaaaccccatctttacaaaaaatacaaaaattagcagggtgtggtggtgcacacctgtagtcccagctgcttgggacgctgaggcaggagaattgcttgaacctaggaggtgaaggttgcagtgaaccaagattatgccattgcactccagcctgggtgacaaagcgtgactctgttaaaaaaaaaaaaatgaatacagtgctagctaccatttactgtatattttcactgtgccaggcattatgttaaatattttccatgtgttatctcattctaccctcacaatggcctagtaagaagcttcctgttatcaggcctgtttgacaggaggaaaactgatgcttagagacgttaagtgacttgctggcattcacatagccaggagcagtgctggatggaaacccagctccacygagctccaaagcctaggcttagaatatgttagactgtataagatggacgaacttggaaggatttcagggagggaaggattttggtggactctaggccttagggaaagttccaaaagggactggagctcaaataagcccttgaaaagtggaaacattcaggatgggagagaagagtcaagctggagatcagggagagccctgggcctggcctgaaagaagagggccctggtggtttccctatagtctctagggaagtttatttgtatgttacctaccagtgccatcttctgctttgtctttgggcattctgacycctgactccttccaacctgtctccccgttccttctaaaaggccccacttccaaatatttggcactgtcctaacccttgaggttctcccagagacccgcagtctccctcctgccccgtgtttccacggcccctttgcgcagcatcatttagaggaagtacaatgaagtgccagtagcaataactgccccggccctcgctttcatgtgcttgtaaagttgtttggcaggaactgggacttggaaaggagacatgactttgtcagagggcttggggctgggcatggtgtgrgtggcgaaggggagaaggaggaaaggggaaggaaaggagctcttgttgccccattctggrgagtggtggactctggacaaccaygaggaaactttggaaaggagcaaggctttgaggaggagtccagtctttgtatgggaaagcaaaaagtggagaaatggccaaatgtagttaagtgacattggacccagaaactctgagttggggaacagatatcttgaattcggggtcttgtgcaggaggaagaaagtggcccttggtggaggccaggggggatgagtccttcatgcacatgcatctccttgtctctgtgggtgaggggatctttttttttaattattattatactttaagttttagggttcaaccattgtggaagtcagtgtggcgattcctcagggatctagaactagaaataccatttgacccagccatcccattactgggtatatacccaaaggactacaaatcatgctgctataaagacacatgcacatgtatgtttattgtggcattattcacaatagcaaagacttggaaccaacccaaatgtccaacaatgatagactggrtgaggggatctttgcttgggaattgcatgcctggtgttgagaaagaggagagcgtctgagagccctgggtcttagggctggcacacacctttctgctcccttctctctaattgagcattagagactccgccccytgctgggagttagaactttagctgtgttttcccatgtgaaggagcaaagaggcaaagcttcatctctgttggggctagcatcaactaattcaggtattccccatttacacattggacatctacttgctgcaaaggcatggtgacaagtccttgtgtgggaggctggcagccagtaggaaaatgttccatttgttttttcccaaatttccccacaaaggaggggatgctggacagcatgaaattcttagttcatgacagattcccttccattcattcaggaactatttcctgactcattgtcatagactcagagatgggaactctaaggatcatttagaaaatctgaaagagagggactagtgacttcccctctctgcgacttgttaagatattagggcagggcatttctctcatgtatctctatcatgaggactgtgggagcctcaaccccaccccctgcagtgggtggggagggtgtggtctactggggtaacaacatttgtttcacaccttaaatactaccttacagactcattacagttttatatattactctacaatatacccaatttgagtttaatacaataataatgatatatatttttgaccatatagcaatgttggtgttcgacaatgattctctgtattgtcctggggcttctagcacctcctggaacatcgctagatggtcaggagcaccaaagttttaaaaacctgatgctctgctgtggtaccatatggtcctgtgtaaagcagggtcctaagtcctgagtctctaggaaatactgctcagtgagcactgactctatactagatgtgaagccgggggtagcacaggatatcttatctaagcctcccaacagcccaatacacctagcactctctttaactccattttctagataaagagatcgagacttgtggagatggcatgacttgccccaggatccagtggtggagttgggatttccgcattatctaacatcctcccatgttagactccaatgcttatgctccttcaattcattaygtgtctggaggactttggaagctatacgtggctctcccacactacctgtcccctgtggccagcataagtgaactcttgcatgggtggcttctctctccatccccggcaggctgtggactcttggctgccctgccctggcctgtctctccccaggtttggccaggtttggccacagatatcagagatgccaaccaagttatttgtaactaaaataaatcacatcccttatcagagtccagctgccctcccagatatgctctgatttacaggcttggaataaagagagaggtggttgcttgtctacaggacaagttagggcaatgccctctgcctgaatattaggaaagcagcattacaggagctctcactctgaccaggcaagcatttcacatgcacagacccagagacccactcctcacatgctcattagtaggttgtgcgaccctgggtaggaggctgacatgggtcttgaactgaaacccagtgtgtggctctaggtgacatgtggccacccaagtgaggtttcggatccacctgcagtgtcagatgcttcaaggctggggtcccctgatggagagraggtggttggagatcacctgggcctcctcagcactgcctcctggctggggctggggctggggataagagagtaactgcaattgtgcttccccrgcaccttcgctttaggtcactccaccgaagagcctgaaagggaagtggttcttgcgaaagaatgagctgaagcaggtggcagatgctaccaggcaccgtgtagttttcaaaggggatctttttctgcctcagagagaaattctggggtttgcacagcaagaaaccgatgactcaatttcctttgtgtccctgctttaatgggaaggttgtaggcgttctttagaatggcagggtaggttgataccttctaccttaaatttgaatcccacttttcactcacttagcaggttgaattttttttaagtgtaccccccacagctgcccaactgggtttgcgaggcaagcccaacttgccagagtaaaccggaaggggtgctttctaaagtttgtggttctggagtctggccaggcatggatacagtcattgtgcgttccagattttctgggagagtcaggatctcaaatatgcaaacactctaccaattgatgtctagtgcatattttgactaaatgtttatatatttttccacaaataaatacatgacttaatgtaattgaaagtcaaacactttttaaaaatgctttttgcataaagaaattcacatctttacaactccttaactaggatggtgtcaattaaattaatgtttgattcaggacatgtgtactttggaggtaagtatttcatattcctcccctctccattgctcaattgccccactgggtgacgtaccaagataagccacatgtttgattcttgtttgctggatgtggacatatgcacattgcaggtatgcctataagtacatgcctgaaggatctatgtgtgtggtgggaattggtgatgccaaagaatgctaaagactttcatgccccttaaaggggaaaataaccacaacaaaacaaattccaatgtatcttctcctgtcttctgcagcactgggggagtcccctgataacagggatcatgtcacattcatttttgtgggcccagatcycagtaatattgacccataactgttgaactgcaatgaatgtctagaatataaaagtcatgatatctatatatatggaagcatgctgtcagtatgggctaaggtgcaaatacatttatgtgtaagtgagaaccatggtgatggctgtgttgctcaggacagggctgacttggctggctgactgcccaccacaggcctcatgtttggtctaccccaaacagtgagctcacccatctgtttgtttgcggctttggtggctgcctgctgtgaccgctggggacatctggctaaagacagggttactagatagttgggctgagaagggagtgggagccagtgagatgaggacaccaaccccaaatttaagcctcaaaacaaaaacactccccagcagcagccaccttggggttctagttattttggagatactgatacgaggttgagatccttgggtgagaggcccacactcctccaacccccatgtctgcttctggaaggtggtggcagaggagagaagtagaagtactatatgggagatgcgggagattcttgccttctctgtcrgtctctttgggcaattatcaagctgtcatctgaccagatactaccatagcttcttcgggggcaaatccgtagggaatcctgacatccgacggggagccactttggcaatggcaaacggtgtctcctctccacagagcttgtgatgtcagaaattacccataactggggcaggttttgtcttyccaaagattgtctgcccagctagacctgagagacagggagacaaacacagaatgagggggtgggtcttgtgggggtggggaacgatggaaactcacagagccagatctccccgagtttgagttgcactggctgcctgggtgtgtcctcctgaggtaagtgtccctgcgaagtgcaagtgtgggcagacagatctcaggtgggtggggagggactgagtcaccaaggaggtgatttgcaaaactcaggtcccagaaactttcaggtcttcagcttttaaaagtaaaggttaattgcaaaactccggggttgagggaagagattattcacatagaccagtcattttgagcatctgctgttgtggcattgcaagtctccttcgcagtgcctgaaagttcatttgtttttgagagctcttacgctttttctgtttgcatctttgcacaagttctatgtttctgagaaccctcaccactattagtaataatagcaaacacttacagagtgttgaccatgtaccagcgccattctaattgtttcctatatactgccttgtttaatccaaacactgacttcatgaaggtggtgctgttattatctgtcttttacatatgaggaaactgaggcacagagaatttaagtagcttgcccaaggccatgcagctgataagtgatggcgctgggattcaaactcacatctggctacagagttcatgctctttgtcactatgttagagtgcttctcttggtatattaagatatcgaggcaccctagaaatccagacgattgtacctggaagtactgtagttgttttcaaaamyttcatttgggaatctagttgtgggtgaggtcataacatccactgagcttttaaacatgatgtcagaggaaggggttagaattgcaaaaatgaaggaggaggaagttgtaatggaaacttctgccaatgcatattctgagttgactcattcattctgatctctgaatagaagctctactctcttcyatgtgatggaaagttgaggatagggtagggctgagagggatgtgaattgagttgtttgttcattaggataggatagggctgaaagggatgtgaattgagttgtttgttcattatcacttcattatttgtcacctggatgaaaggtraaggtggctgattagtgtttctccatcagctagaactttgactgggaaatgagccaatcaaatagcagcaaaatatttgccctcaccttacaggcccttggttccagggtcttctctccaccggctagaatggatgagggagggagagaaactctgagaaaagaggctgtcaggagtagggctgtacatatccagggcacaaggaatttggcaaaagctggaagtrtactatagcccttctctccagccctagcctaaaccagatgaccaggcttctatttggcccagcatgtgaccatcccatcagggagcaagagagtttcctctgggtacccctcactgagaaaaaagccacccaggaagggaggaggcaaggccccctgggaacatctggctcagtccacaggaagggatgcaggccttttcctgggaatgaggactcatcccatattccagcccccttcccccaacttttttttttttcaattttagtgcatctctttacacttaacaggtctgcagtgacttctaggaggatccacacaccaatcgtggaactaggcagcatctttttccacttcctttccaagatagtagcacgataacagtaaagcccctttgcaagtgttcactattatgcacattaagatgccagggagagggctgggaaaggtggctcacacctgtaatcccagcactttgggaggccgaggcaggcggatgacctgaggtcgggagttcgagaccagcctgaccaacatggagaaaccccgtctctactaaaaatacaaaaaaattagccgggcatggtggtgcatgcctgtaatctcagctacttgggaggctgaggcaggagaatcacttgaacccgggaggcagaggttgcagtgagccaagatcacgccattgcactccagcctgggcaacaagagcgaaactcggtctcaaaaaaaaaaaaggtgccagggagaaatgaacaattccatgcagccaacacctggtctcctgcgtttggcttagaagggcatttctgcccaagcccccagctctagtctttgcacactttaaatgagtagctactacatgccaatcacagatgttgcctctgctgagtatccagtcaaaaaaccagaatctaacagagctaactaagcaccatcttrcaggaaaccagctgacgtcagctccgcagccaccagtgagttactgggcccacatctgcctgcaagagggggaggggaattcaggtaacccacaagaggggataaaagttcggggaagaaatctcctgtcaaggagtttgtttttgcagtggatcctctgcagtgagactagttgtctttacaatatcattagaggtcaggtacattcctgtagactcccttaagtgacttgctttctcctattgttccccctgaaaattcataaaaacctcacaaacacatctccatttaaaaagagaaagtttaaaggatgccatgtaatggttatctcttttcttttgccagtgagcataaaagctccttagggaaaagcccaaaccctctatacattttcatattcatgatagccctgagcggtcagcacagttccccaattatagtgggtgctcaataaacacttggatggcttactgaattaataatgtttctagacttggctagcaaagccatctccgttacttatcttttgtgatttttataggttctgtctaattctttttcttcattttttttctttctggtctatacaaatcttctttcatttttctctattgctacttgtagcgatcctcaacccgcctcctcccttgaaatttctgttctctgcactctcttcagtctaaagagatctttcttgaggtttgaaatgttacacaaggcaggggaagtttagagctaattgtattttgtccagtagaacggggatctggatttcctataggtctggctgcctctttgtctacacctttacttccaaatctggcctcatgtataaaaagaccccaaaccttaaaatcatgttctcaacaatactcagagaaaaattgttggctttttggtcaccatgctagaggaataaaagggcagttgtttctttcggtcaatggtttgaaaacctcccagactaaaaatcacctccatataatcagatgcttggtgtggtgtaatgaagatgaggaggtctggctttgataagagtcatttagaaggtataaaggcagtggaacaagacrggaggacccatacaccagttgattcccctcttgccacttaacagcagcgtgagcttgggcagttgcacttgttaaatgtctggaacaatacttagcacrtaatttctaaagcttaatgtttagttcacagaaggtatcccaagaatagaaatgattattatattttagcttctctctattactgattcactatgtgctgctaggcaaagtatttcacccccatttacttctatttttccatgtgtaaaatgcgagggttggattctagttgatctgtcaagtcctttccaggcctcatgttctataaattcaccactctgtgggcttactaacacctgagcctcataaaacctaatggaaagaataacacaaaaccaccataaggcagtgtcaaaaaaaattgatgcctgatttgtattaaatgtcaaaagtgaattattaatccatgccagaaataaacatatggacccaattacactctaactccaatgggcaagagtgttgtagggacaaagtgctttgcccgtagtacttcatagaatcctctagaccatgtggaaggtgagcagatgaagcagctctgrccagagaagttaggaacatgtcccagtcacacaactgaaactgcaggaagtcagtcctgggattaactgcaggatctgaacactgtactctttatattgtactttaaaaacattgcttcacatggccagaaaagccaacctctgaagaagagaaaaattgttcccttcactctcagagcttcatgagcaccttggacttgccagctttcctcaagcaacccctgtaacttgttggcacaaaattaaccacaatattcagacaaagcagtacttacagggtgagtgctagtatcctatgcaactagggtagcctgagaatctaggggaaaaaaagctagaccaaacaaaagattatatataatctttccccaaatcaaggcactgagcaaggcaggcctgagagatggtgaatttctgcttctactgagagtcctccagacccccagtaaaaatttcttttcatcataaaaccagagaaactcttgctcaggaaaaagaaagaaaaatggaaatcataaagattgcacgacttaggattttgtcaaaatgtgtcagaggctataatataaggctagtttttggcattctgtcagtcaytgaatgtccttcrtcagatcacagctccttttggttgtgctgactttatacccatctggaatccactgaccattagctgaaataaaatcccagatgtgctcagatctcacatcctgtgcaatgccctcagttattgctgatacggttcagtcatctgtctctccagctaatcatacagacacagtattctaggagaagtgagaacccactcatagccaggagagcttctccctctcagtcacagggtgactgtgggcaaggtccttcccctgttggttgcctctgtctccccagttataagatggtgacaaactgaccaacttaaaatttccttaaaatgtattggcactgtggacagaaatgaggaaagtggaagacctagtttctgtcctcagggagcttaccatttggtggaaataaagttaaacaggtgaaagaattatgcaagagagcataaccaagtgtcagaagacaggaaaaacagacatctcgattgcatgtgaaggcttcaaggaatttgaggatgagttgaatgtggaaaagaagayagacagagagaggggagaggagagaaacccagggaaaggcaaaacatgagccaggtgtttaaagtgggggaataagaatggcttgattggggccaggggaggggtcwgtctgcttggataagagaattcatgaaaagaacagtgagagatgaggtcggacagattccaggcaatcaagtaacagtggcactgtccactggcagaagatccaatttttctgccccagaaactcagaagttctcatgaatcaccctctcagacagtgctagacagagttcagaagcaggccagctccaacagtgagaaagaactttggcaactttgcctgggttagagagtggcaatttaagtgaatcccaaacaagacctactgtggcaatagcaaatagattttagctcaaggaacatttcccattgactcctagaggcttcccaaaatgctgtactaagaagtcaaaccttggctcaggtatggagagtgctgtgatccattagtgatgtctgctatgggcacaatatgaaggatttgacccccatgcatcacatggacatcaccgtagtggagcagcaggctttctttgttaatgtttctgagagttgtgtgtatagtcctctgggagtttagccattctagaatctgtccagctagccatactatagactctatctccttctagaacagtaaaaaagcagtctcttgcccagagggcagaggttagtcacttgagccttttgttaggattcactcccattctgtcttcccatttacccacatgaagttagatgctgggagccagatatttcctgtgtttgaacaagggccagacttcctggcaaagggtcccttcttcccatcagtttcttcaactgcaaactgagaagacaaaagtgatgcctcacccgtggtggcgacaggaggaataactagctaatgcgaggaaagcttttgaagatgaaagggtggtatgtgcatgttaattacaacttttatcagccctggagcctctgcattctcagctgccactggaagctcttctgtgcctcccaaatgcaaacagcagccacattccatgagctggcctcactaagtcctgcttagagcatccaagtcaagaaggttggattttgagctcaggctggccagctggctcactctgggccactcaagtttcccactactcatccccaagggaaaaagtaggctagctacctgggcaggtaagataagatagaaccaaggtataaacaaaaggctccatcaaaagtctaccagaaatagcccctgggtaagattaggacactctgctctaattcccaccctgtgaaagcctaattgtttgaccttgggctattggctttatctgtctaatggttcaatatactgtgtgaaccatttggggataataatccctctgcctcccctagacctctccacctttgcctgctggtgtgaaagtgttttgtgctagtaggcagaarcacgtgatataaaactacaaggtcctattattacctaggataactttcgcctctatctatgtctcctgttgctggttgaccccaatcattgaaactgtattctttggaatgctcagcagtctcctccaagctgccattccctccttatctaggtgggcccagtattggctcaggcttcttggttgtgccacttcctaaggcttgcaaatgcattcagcctgcccttgctctcagtgccagctctcagtgcccttgctgggataactcaataaagggctagaggtgggaatgggataatcatcagatgctttgctagtgctgacgggacagcttagaaggtataaactgagctgggcccatgcagcaacaccaaaatatgtgttcaaagagggagaagaggagaaaaagagaaaggaagttatcgtggtctgataacagggcatgtcagaatgggaaagrgtgttaggaattatgtagccaacttgtttgattggaaagataaggaagcctcaagggctgcaagtgactttcccaaggtcacaaaactaattggtggcaaaaccgtggtcttctgacttgtccggtttcctttcattttatcctttgagacgataaaggagaggacactaactaaacaagaagacaatgatctgatcaggacaagaagacttggagtacaaaatgagaagaagataatagggkaatggattttttagtggcacagtgggaaatggcgtaggtgtttacactgcactggagccctcactgtgcttggaactggttccctgtgcacagtcttgcacacccatatttggtatttttttatcctttttgacttaatgagcatttggaaaccataaggcccacagcaacctgacctttgacttgcccagactctctgagcaattytgtgagttgagtcaacaatcaatggttttcaaattattcaattgttcactcaacgcatactagttgaacaccaatatctgtgctctgctaggcactggggataccactgtagacaagagaggcatagtctcctctctcctggaacttacagtctatctggaagacagacagtaaacaactaatgatgcctttgtttaattacacttgtggtaagtgctatgaagragaagcactggatcttgtgagagcataatagggagatctcatctgatttaaagcaccagggaaagcctcccaggacctgttggatgaatagcagtaaccatgtctccaggatccccacarttccttgaggacccttgttgtcagacttctcagagctgtaccagccctctcactgtctcaccattgggtcttctgagtaagaaagcaagaaaaaaaattttactcctcaaaattctgaaagcaagtggtttatcatgtctgccctgtaatagtggtgggaagaaaatcatgagaacctctaagctgactcaggattttagaagcacacatttggggagaagggaaacaaaaattctggagaagcaaaaagtgtcatatggtatagaagttattttaagctactggggaaaattcataatttacttagggatcttgagtgtcaagcattggtttagagacaaatcttatccatttcgttgaaagttccttgatcttgtggctgaagcttgggcctagggttttattagtgtacatttaggggatggtttacagggtgtctttcaaggtcatacaggtgcctcttttggggtcaggcaggaggaataggacaaactctgggatacgaatgtacaaccatttggctcctagggcctcagtcctttagctccttgcttctggtgacttcttggagacaagagtagactttttcagaacagcgagatagttgtgctgacaaaacaaaaacaaaaacatcatttaagatgccttcagatgcaagtacatgtcataatagaaatattyaaaaattagtagagtataggcactagctaattcaaatgcttggttgtaaacaactatgtcttgtaaatgagaataaagtttattctcycaatgacgatgataacatctttctcactcacttttactcaaattggctttattgggcaggagagacagagatggagttataggtatcatgattgaacttaagctacaacccatctatgcatcaaaccatcatgtgtctcgtgtgattgttatctgttgtgtatattttggtatatccctatctgtacataccagctgaatatttctgtaagtaacagaacaatcagctctcataaaatattacctcccagggcaagaagtctgggatgattccaggaagtcaatgatattatcaagactcaggtttatttttccaactttcaattctgccactcccagtgtcttcctgcaatttagcacccctcatgttcctaaactaaatcccacagttccaggcatcctaggaaaaaaaaaatcmatatttagcagcagaagaaagagtgtatattcacaaacatctcttctaaaattggaggagcggctttttgggaagtccttaattgacctctccttatttctcattggatgaatggggtcacatgcccacacctaaccaatcactggcaagaagagcttggaccacagtgcttgacttagaccaatcatgatccacccactggagctgggatttgaggtctcacctgtcctgaagcacaaattcagggtttctgaataaaattgcacttcaggtagaatagaataactttttttgcattggtaacaatgtgggctacaatgagtaagggagtccatttacctgctagagttgtggtttgagactatttgggctaaggaaagaaggcaaagctaagtttttgtgcctctgtgccacaccctcaacctttttctgaaaagacatgcctcatgggtagagctcacatgggggacacactgcagtttgaggtttagatggtctgtggcttatactcaatgataatacctaaaactttatcctttcctgtcttctacaaaagagaattatatcagggaataatcttaaatctgttataatttacaagaaatagccagtcttctgcacacttgagtactttattattagaaactcattacttgcaacccatctcagcactgttggagctacaccatgcatgaggaccgctgctctagagtcatccattaaaaaagaattcctacgaacctgaatgagcatttctttctctaaattatgagatgatgaccctcaagggaaatggccgtcttcccttttctactgcactcttagagtgcattaatgtgtgtgaagtgttttcggttccattatctaaagcagccctcatattaacatcgtggttggcattaytggcctcctgtatgggatgaaagtttaatgacttctgcaaggttatgaaaggtcaagatcacagctaattagygcaaattcaggatttgaattctagtttctaccccagagctgatgtccatgtcaccatggacatcatttgctcccaatatacctgatttactttcaaggggtctggaattgactattggattttatattaaaaattgctctttcataggcaggaaaaagtccttcctaatagtttgagtccaaagcttaagggtctagcatctcaactttttaatgaacmcaaaaatgaacaggagggttttctgagccagtcccctgcctccacacagttagctcatgaatccaacatcatgggrggaagtcttcaggattttgtttcccattccttttttatcacctaaatatagttaaaggatttgtgatgactgcatccagagatgtttaaaaatggacctgaaggatgtgattgtgtcttaggcaggaagggtgccggttcttttcagtatctaatgatgaacgatctaaaggaaatggattctaaaccatttgattctaaaccaaaatggtgtatgtttcttttgagggtgaatttcctgatcatgagccttgttgagcattagactggccggctggttcctaatccatccttcagttctcagctgcagtgacatttccttagagagacagatctcctttggggacagcacaggacttgagaaaaaaggcttccctttccactgagcttggctccaactacacctcatgtgtctgttacatttatcatgctgtgttgtcaacttgtttaatgtctgtcagtggctcatgcctgtaattcagcactttgggagcctgaggcaaaagacttactttgacagcagaggtttgcagaggttgctgggcaacatagtgagaccctgtctctacaaaaatatatttttaattggctgtgcatggtggcatgcacctgtagtcccagctgctcaggaggctgaggtgggaggagtgcttgggcccaggagtttgaggttacactgagctargattgtgctactgcactccagcctgggtgatggagccagaccctgtctctaytaaaaattargaaaagaaatagcctgtctactctattggtccataacctctatcragacagtgaccttgtctgctttattcaatgcctggatcttttcctagcacagtgcccagcacatggagacwctgaatttggattctcctttttgaagtccccatatccacttcagtattggggtgattttgatgggattgtgacttaccatggtggatgcakcctgtgagttccaaactcaacttcttaaaaaaccttgtctatcatctatccatctatctgtctgtctgtctrtctrtctatctatctatctatctatctatctatctatctatcatcygtctgtattctatgttccatctatcatctatctgtcatatatctatctctatctattaattatctctatctttatctatttatatctatcatctatctgccatatatctatctctatctcttaattgtctctatctttatctatttatatctatcatctatctatatctatcatcttttaacctatctgtttctattggaataagagacaagtgcttgaaaagcagaggagagtcaatacacaggccacatcttctctcactccctccttcctcctcatagctgtgagccaccccagtccctgtacctgcttccttggctggcatcatctaagaaatcatctcttccacagtttcctgcaagggcatcaccccaagggaagctgaacacatgcaacatctgcccactcaggataagtgtgagggataaggaggaaacatttttcctctagagacaggactgttggggcaagggctggggaagcaagacatggatactccaggctacttcttgctggggctgaggggagtgctcggtgtggctcccctctgggacgtgtttagggcagctctctcgcctctgaaacaagcctcatcagatcatccccaggcttccttccgcatagtttctgatgatataggaaaggagcccgattatctgtttgagcttcctgttctttgtattgtttggaaggctaaagtcaacagccacttttgtattctgcattgtttgcrttgttaaaaactctggaaaactcatctggtttcttctscaaaagtagcttcccagagccctgggagacactcagaaataagatccttttcaaataggccagcagggaccagggtctctcagaaccagctttcctatcttcttccaaaggccggaattgagaaggtttactccagcccacataattgagtctctgggctgtcaaggacgcattggggagtttgcttctggtgtgctgggtgcttagaaagccgtatgaattgcagagatagagttgggttccagttctgccagtcaccaattatgtggccttaagcagtttacttaacttttctgagcctcaattttctcttctctaaaatagagttgtaatatacctatggcttagagttgtgtaaggactgacgcgatcacagacttgaaacccttgatagaacgactggcatggagtaagcattcaacagtcataattaaggtcattgtgatgattacacttggggcctctccattcaccatttgccccaactgtgttcctgctgcacttgaaaatgattccagctgcctctggaagattttcatcccatttctgggaaaaacattagcyaataaaytctcattgaatttggcagggcgggcacaccagcaagctgacactatgtgcatacaggcttcctggaacaactgttgctgagcaaatgaagcagcatggaatgttccgggaagcaggattattgctgtagctggtgaaagtgaactgggaaacgcactccaggtcctgtctttacttgcacaattacagtcaatccccaaggctgcttgtctcagcaggatcagcctcttcctgccttctgtcctggcagtgggtggtggggctggaggaagaaatggtgttttcctccctctcccattgcaattgtttccttacagtgctgttctctgaggccagagaacagaagggctctttccagaggcagtttaacagagtagcttccttttcattctgagaagtttggagtttcccagagtccacttcctccctagaagcgcaagcttggaatttcttggttgccaatgaggtgccagcttctgagtgcataaagtgtgtccatcgtttttaatcaattctctcatctccaaaaatacctttaattgcctttagctgcttagttctgctgtcctctaaagaaaacaagatctggccactcccagccacacctcagaagtgagtaaggcttttgcaccttttaataggagtatttacatgtgtgtcggtttctcatctgcttttaatttcattagagtgtgattttggactgttgtttgagatgaaagagcagattatcaaagtgcagatgattttttcatggtgcaaacacatcataaattagaaactatgagacccctttgcagcggggaagactggggccagtcatccaaggtttcatcttcctgtaggagaagggaaaaaaaacggacatttattaactatctgttatgatccagactctctactggtgctttttgtatatttattctctaactcccatcaacttctctttgagagaggcagcaaatgacaactgaataaatgaatggctgaatttcatcagagccagtttacaggcagagaaactgaggctcataaagcggacgtaacctgcctgagatgtctcagcttttatatggtggggctggaattcaattcagagctccttctcccttttaacactacactgcaagttcccattcagcttcatgggattaatcctgttcttctgtccctagaatggagccttgaaagttcaaggtgtctccttttcctaagaaactggatttttctggctccttgagaattgaggagctcaaaacaattgagaactcttgggaggcatcttcaggaaaggaggtggtggaaactttcctctcctcactctccccaggggcaatggggcctccaaggccaycaaagatcaaggtgccaggtgggggatgcctcccagcttcccattcatttttcagttgggggccastcagcagctcctcaggtgaggattgtctcagaactgaagaatggttcaaattggcccaagatgctgaaatttattgcagggatcactgggacagtgtgtagcaatttakgaggcttctctctaagggaatcagtagctgctgcatttctcttaattgaaaccactctttccctccagcttcgatggggcaggttctcatatctgcgtgctgaaaggcgtttatttggtgtattctgagagcaggatgctggtaacactttcttttgtgttttgccaattgtttctttttactggctagtccaccctgtctgacgcattcattataccatamccmccttgacaccagagtgaaatgccatttctctgcaggtaggagagagtcacacggattccttgagtgtttgtagcgtaagtgagaaagatatgtagccttcttctagaggcagagggatgggttggctgggacttagagatattcaaatccaactctgttcttgtctgataaagtaaacgaggcctctgaaggtaaagtgacttctgtaagtactcacagcttatcagtaagaagcctgatattaaaactccaggtcactagaccttcaacctaatgttcttcccactaaaccaagttaacatttattgtacaccatactaaatggcagacactggggacacaaagatgaataaggcatggtcccagtggaacccactttggttatatgggttaggacacttgaggcaggatcctccttagaatggtgttttataaagtctctctttctctttctctctctctcatctctctccaatctatcctctctatcaagagagaacacatgtaatgtagagtgagagcccatgtrttggataattaggcttctggctcctaattatcaggaagcctggaggtcttgagtggttgtaaccaaggatactgaaagtggttgaccagttaataaagaattaagttagagtaagagrcactttacttttaagctgcctttaatacactttaatctttgagatgattggctaatatctgttaagtaccaggctctttgcagagagtcaggtcctttgctaaatgatttaggtatatttcttcatctaatactcaaaaagcaccccataaggaaggcattacttttattttactgatgaagagactgaggcttaaaggttaagaaaacatagcatgcataacatcccacaagagctcaagccaggacttggacccaagtctttcttggatctttccgatccaagccatatggttactgcaatctcacaatacaatgagggtaaatccttgcaatcaccagttaccagcaattgtgaarcaatggatggcatagatgtcagggggtcaggagagccttgcaagcrttcagagggcttgggagtggacacatcacagttgcactctgctgggcagcgctgtaagtctctgattggattttgccttgaattttttctggtcaagactcagaaaggatggatgtagcttcacttacaccaattctacccagcttgtgacccaaatggaactcttatcccttaagccaggtcattcagttgttgtagcctttgccttccaagtttcccttgtctaccctactgagtctgaattctaaggacatcttcttatggactgtgggaggcaaagatgaattccaaatcttatttaatctgtgtgctgggggggaagaggagtgtatttccttttgccaggtatctgagcctacaaaaagccccataaayaagtaaaatgtgtccatgagttcataaaagagtgagccttagacatacagaccacctgtcaaaagagccctgtcattctctattatattatcctcttttattttctgtgtaacactatgagtatctgaaattaccgkattcatgtattaatcatttacctgtatactatatcctcactctagaggtaagctctttgagggcacagatcgtgtctgactccccagcccccaagattgtatctggcttgtatcaaccatatcatagggaaggtgctgtgaattgacaccttgcaccatgctttatggaaactaatggtgctttaagaggcacagatttcatagaaagagacccagttgttcccaccctgatggttctaggtctaggtctaggtcaccaaygtctatggtgaaagaatgggcttttgcgaggtatggtctcctgtcatgtatgagggtcatttatttaagggaaaaccaagaccttattttctttgacaactgcacacaagggtcatttgtaatgtccttcatttccaagcctctggatctttgcatggatcatgctccttaaaagaaggaagttatgtttggcctgcttcagctaagcatggaatggtaaagattttggtccaaaccctgtgacttgagttggatttaaaagcttgtcagaaatgagttctctggagcttggcatttgagactggcatccgttgttccagatgagatttcacggattgaaagctcaggaagaggtgtgaattacaagcaattagttcacagggcagttggaactgtagtaatcctggaaaccttttggcccacattttaaaaatatccccacaatccagcttctccctctgtagggcttctgcttgggaaagtttgtgtaactccccaaaacatctgaagagtgaatagcagtagkgttcttggactgcgaaggagaccctgcttcttatgtgcatgctcttgtgcacacagacagaaacacacacatacatgcacacacacacagacatgtacacccatgttcgctttagcatctgatagaaaaagaggaacatgaggaaagacagagattgagtcaycaacatgtgacctggtgatttctgwgtcctctgactttgaaatcagtggaaatttagagctctactttgtcacttgtaatgctttgttgttgcaaataaatatttttgcagctgcatcacttcattgctaatatatttgaagaaggcaagataacctaaaggcatgaatcttgttctgttttaatccacctgtaagtcagtgktggttgtaaggtaaattgtaagtaagagctattggccaccaagtgccaagggttatgaatgatttacctttttttttttttctaaactgaagsaaactcatggttgttcctagaaaaacatgcacactcacttgcttgcattcggataagcttctttgagtaacagggaagaggccactaggattacaaggcagttagtgcccattggagtgtgactggcattgtgcaccctgtgaatcatagtggtggtatggggaaaggggtaaawaagcatcaatctatggagtatgcgaaccagatggcatctgtcctgggaagaacaaatrtccttcataggagaattagaggactatactagtcaggcagaaatccagtccattcatcaagcttttcctcttgctgtggtccctacagggtcagccctgtttaggctcaagcctcttaaatcccagtgcaagaccaatttctctatgaaattctccctgtcttctttggtctcatggctacttcctgggaggaaaaagtagtaatcagctccctccccccagctaaatgtgcatggtrttagcaaattctaacccaagatgttaaaactatctgagaagaggcatgattctgcttcttgtctgtaccctcctaaagtcaaggtgcagcaaggagagagacatttgcatgtggcccctgagaaagaagagatttgtctgcctcaccccctgctggtgcaaacttgcacctctctcagcctcagttttcttatrtgtatcaagtttcaatgatcgcaatagtacttatctcatgtgactactgtgggattgaaacgagatagttcatgtgaagtaccgagcacagagcctggcacasagtaggtactctattagtgttaatatcactggaaaacccagctgggggctcagcagtagaagctgccagagccttagtgttacagccacatccattaccccaccattcacatacatttcatgccccagggtgagaatccacatatcccaagcagagaggcacagctttggtaaactgagtcttagctaactcatgtcagaaaccaagtgttatcctggggtttgactcctggctcttgccacattcatagcaggatgctgagtggattgtactcagcctcacttgttgcatctgtgaaatgggggtgattttttgacttctcaaggtatagcatctattaaggcacatagactacaatctgacacaaattarcagctccatacattgcagaatcttttctttttcacttaaggagatgctaaaagaggcaagaggaaagaaaatcaaatttggagatgccgtggsctgtgtgttgaagttgggctctggtggaattggtggtgaccttttgcttctctccatctggatggctgtatcttcaaagacaacaagtcttaactgcagtttttgattgtataaatctggccaagtccactatttacccagcccagtctccttagagtaggattggaaactcaaactttgctatctcctctgcagagtgagcaagggacaatctttatgaaaaactttaagttgcaagatatttgtgttcttaataatgaagggaagaatacaaaaatgataatactaagcctggctcatggatagcatttttgcacaatatatttcatttgggctgcagcctttgagctgtactaattgctctgagcatctgtttgtatgtccgttgcatgggatgatttaccctcctaggtttccaaatgctttggagcccctggtttattgcaggacttactaagtggtggccatcgtcactttgattggcccctaccacagtattttccagacttttccaccaaggctcttagggctttgtggtgggtgccagaacaattgatggggtagggtgggtgctggaagagaatgagcatctggtagattgagtctctgggtctgcccttccaccctcactccagcccccattagctcagcttgattttcaaccacttgaaatactgtggttgtgcctaagacatcatgtcagggagagaaagaaacatctgaaaaccatcaatcttctctctgaatgcttccactggtcccatttgcctgttgacaacccaagttgaaaaggcagcaccagaggggaatggggaaaattagcagaactggaaaatctgagttgagatctgggtttaccaaactctccgtaagactttgagtctgtgaaacttatgtccattagtttcttcaccttttaaatgggtctgtagtacctaccctctgggcctcacaggctgcttttgggtgtgaaagtgctttataattggtgaaggaaactgctacgtggcaagaatagcaaagcctgatgtactttaatccattcggttctgctgagggtggagccccaatgtgtcttaattcatatgaggtttctgagaagctttttgagattttaatactgtcccaggtatgcacatcaaccttctcacttttatcccccaagctccaaaatttcataactttttatttcatcttgggtggcaggaaggcaaggtgtgcctgggggagctacagggagttattcaaggtcacataattagcttataattaacagagtttaggctagaacyagtgcatcccactcccagatgggggcccccggcttatctcagcatgtcagcaacccawgaatcagccctgaaatatagatattacctatgagtaacagtttctcatcctacctcaactgttacgaaagtcttccctcaaactaaagctaagcagttccacaaaatgccagctatagacattagcagaaactgtatattgattaggtgatgtatcagtcaytgtaactacccagaaaaaaaaatacaatgacaaaaccaagtggcccaaccttattttctacttgcaagaggaaaaaccctatttgggccccaagatgcttttttcatttcatttaccacatcctgggtttgtgctagtcaatctgctaaatcaataagatccgaaaaagcagaaaacaaagatcgtgaggccagaggatttcctgatcaccatggcaacacacaggggtgggtactgtggtttctctgcctgaagacgcactcgtcaaagactacttggtgttacagaattctggtgcagtgaagcaacagttctgggacatatactttcttttgccagaaagactctgttggatccaggaccaggagtggggggttaaacagttctccataccctcacctccaagtccccatcatcccattaggagacagggacagtactgttctccaaactctcaaaacaacccaagagctttctaggctgtgcattgggttgatcatttggtggccttggctgaagggccagggtaacagctaggagaacccttgggattcttctccaatgtgacaggcccctccatgttggttcagcgttgactgccatgacaggctccaggctccacrgaaaaaaggcagagaaatcagggggtccagccaggcgccaagacgttggggtgccttgcatttctaagtgccaagtgatgaatagctcagttgaaagyaacccagggcacattctggaggaaattctctgggtatgattgtgcatgactgttttctctgctcattaaaccctcatctgcctccagggcaattccgggagagactgagtcactcaagactcatggtctgcactgggcagccaaaggcgattcggccaccaagtgtgattctggcctcattcagaagtggatgctaaacaatacaccctttcaccagsagcccatcacatgggcatcaggagatgggggcgagtgatgtgccagccttctagactggcaggcctggggggcagcagagggcacaatagctagaaagactcccagatgaaaacttctgggctttgaagccttcgaacaaatgaagaagaaaatgacttcttcgtgtcctattaagacagtgagttgtggcttttttgagagcagcttgctcagacctcttatgaaagatagatcagtagcaasagcactggtgtaggagtcagaaatctgcaattatgaaccactgagttttgtgtgtgtgtgtgtgtgtttttgtttttgttttttgtttgttttgttttgttttttaacttgctggaggaccatactcggctatccttgattttattttctcctgtgtcacaagagaaattggttagaagcttcccattgtgcctcctggctttaaaaatagataatccaattaacaataatgctttaaaacaacaaaaccttgtccttttcccttcctacttctgatcagaaccagctcagtaagatttattagttgtgcaatctgttttggacwtgagctcagcaaatcagaggacagaaatagaatcctggctttttaatgataaacactgtaaaaataaaaaakttggagagcttaccagtgcttctggctgcccaagtggtttgtgtgtggttgactcccaggagctcaatcactttgggtgcagtccacccagagagcyatgttccagctacatcaacctggagccttagcttggtcagtctagatttttgggtttggctgcagacatctcgtaatgtcacaaggacagcctgtgtccttggtgacccaaccctgggccaaccccaagtcctggagtcctctcctaagagccctgcctaattgtagagagagcattcaggctgtaaagggcaggaggcctgggggctacgactaggtttgggctttctaaattcccaagagtatgatgggaagaccaacaggcagaatcagagagaagcagtcagcccactgctggggaaagccagtcaaggtcaagacttcagaatctcctctctggagagagagtgaaaattccattagtgaagtttgttccactgaagccttaccaggccttggtaaaggcccctatcttgtggtccagaatcaagggacttctgatcttaaaataatattcaataagctcaaattcttctctctagggctctcttttcatgatcacctctccacactttattaaaaaatcacatgaagggtaagtgggcttcctgtcatttcagtgtctgacctgtgcataagttggaatttaacactggaaaatgatcagccagattgcccagtctgaaacccaggtcccccagtgactagcacaagttacttacatcttctcaatgaatcagttacctcttgtgtaaaatggggataataaaaatgcctgccacacaggattgttaggaaaattaagtgaaatattaggtgtaaagtgctgaataccttgaacccagactaggcactcagtgagtgctcactgtggttatggaccaggagctgcaggaattagaacaccattgagtagcaggaactggctttattctcatcttcatgataaagcaacttctccttacatatagcttaatctggaaccaaaaatctaattctgcctcatccctcctgaggagatgacaaatagggatcaggcacacctgggtggctcaagttagaaaacaaattaactcattttgcagaatctggagacgtctggtckggagaactgayagtgccctctctttgggcatagyatgactgtaggttgtctttgggtggtcttcatatggaatgtactgtgtttgccatgttccctaggagatctggcctcagaaatggccctgtgatggtatgtgaacatactgtcctgtaactgagatgatagcttgcacattcagacagacaaagccagttacaaaactaaaagttggtctctgaaacatttgctttcggggaaaacagcaaatgttcacagaagcaaagttctgggttaaagacattttaagtatccaataaggaattctcagcaaacaccagctggtgattcctcagatatgatgtgggaaaggaacctgataggtgatctttttgcaccctataagactgcagcctgtcgggggttgggggcagaaagagagcatttattaattcattatttcattcaacatttgcctaccatgggaggctgtactaggtactgggaatataattgtgaagaagggagacaccatttctgttgtcaacgaagcccacagagaagttccaaaatttcagaatgctggaatttctggttactagagaccttgragataataatttcttgtaattctttacctggttgtgtcacagactttgaaaaccaatgaaaaccagagatgttgccctacctaaacacacacacacacacacacacacacacatccatacacacaatcttgcatataatctcacaggtccatggatgtattgaccagctcctggattccatattgaaaatcccttgcagcccagctccaatactagtaccaggccactcacctctcaggaaagtttgggaagaygtagataatggcaacttgggtgaaaattacacagtgctctcttcccagcacatgttgtgattttctacaacttcagaaataactggggtggaccaagaagctattattcctcgcaggccmtacaatctaggcaaagctttgaaatgtgctcggacaattttatcagagatctattttccttgawctgaggcttagggggcagtatagatgagattaatggcatttgggatcagtgatggtttatccaggagagaatgcatagtacctgtaaccaggagcctgaataggaggcaacatagcatagaggttagaatsctgactttcccacttggatgacattgggcaaaggacttcaccactttgtgcctcagtttcctcatctctaaaatgggtttagcaatagtgcctacctcatagcatttttatgagaattaaattagctgaagtacataaggcacctaataagtgtgcaatgctcattggctctgattattaagtgtcaaacaccatatcaagtgtttgacataccttatttcatgtaatagtcccataaaccctgamaggttcgcattgtcatcccatcaaggaagaggtggagagtcagagaggttaagtaattaacaacctgtgtcacctaaagtgagtggcaggktcaggaattgaaccaggtttgaggaggtcctaactaggttgaactactgaccttmataaaagtttggcactacagaccagctttataggacaaaaaaaccttctttcagagctcctttttctcgccttcctgacagctccctagcagacctcttcccatgygggtagggagataaggttcctagacactgggacactggtctccatgacccctctgtgctgcccacagccctatagtaatgagcgtgctaaaggcctggtggcatttctaccacgggaagtctcctctccaaatccaaaagtggcctcaaacagtcagtgttttcagttgarctcatttatcgctcagagggaggcacttgggacattttattcattacatgatgcaggagatttattggagaccagagggctcaacggaaaacattcttgrtttatttccagccagaaaggcttgtttgagagatgcaatcagccatttagtattagcttcttgartcaaagtggatcctgaatcacagagttctctgtttctcaggagagacacacagacatctgaggagtcttgcctctctatagtggtttgcagcatggctagcaccattgccagagacactggcactctgtcaagcaatgttctgtggtccatggctattcacatcttaaccttgccttaattctacttcattgtgagtttgggcatgtttctttatttcttcccctctctgtgtgttagtttctccatctggaaaatgaggatactaatattacccacctcataggaatgttttaaggataaaatgagtaaataattctaaagtgcctaaaatagagcctggcatatacayaatgaatgcacaataaatattagccactgctcttgctgttggcattattaatatcctcccgggtaataatttgggtttgcgttagtatcaaggaaacctgatgaaatgtcttcataaattatcagggtttgaatgacacacagccttgaaaatgttggctccttttaagtcaagagggacctagagtagaaggattgtgaacattcacaggatagttgaccagaaatgaagtatttgacaccattcttgcaactcctaagtagctaaatagcgtcagggttaggagttggactttctcatgagatcaagataaatgtaagctgtggaatttttactttgcataggatttcttcatccaatcagcagccctttgcagatacctacaatgtgtcagaacctgcttaagccttcacatctaggaaggctaaaggttgagtttgtctgtttcatcctgtcttggctgatcacatgcacatacaaccacacactcacttgcatacamacatataagtatgaggagaattcaaaatgttcatggaaaaatgagattaaaagataaaagtttaaagatgtaaactttacttctcaacataagcaccatcacattcaagatactgttataagctatgatagcggccatttagtccatccctaaagaactgagggtcctgggaatttaatcacatcaatgcaatctttcttacwttgttaactaaagaaaaatgggtgccctttgaagatttttaaagattaagtaacaaaaaaaaaaaagtcagaaggagtcaaatttggactataaggtggatgcctaatggcttctccatagaaattctcaaaaaaattgcctttgtttgatgagaataatgagcaggagcattgtcatgtcatgatggaggaagactctctggtgaagcttttcgatacattttttcttcaaaagcttgggctacctttctgaaaacactctcataattagcagatgttatcgttctttgaccttccagaaagttaacaaacaaaatgccttgagcatctcagacaacggctgccatgaccttggctctacactggtccacctgctttgactkgtccacttttgctttgactggaccacttccacctcttggtagctattcctttgattgtgctttgtcttcaggatcacacacataaggccatgtttcatctcctgttataattctcaaagaaatgcttcaggatcttgatcccacttgtttaaaatttccattgaaagctcagctcttggttgcagctgatctgggcacaatggttttggcaaccactgagtggaaagtttgctcaactttaatttttcagtcagatttgtgtaagctgaaccagttgagatgtctatgatgctggccattgtttctgctgttaatcattggtcctcttcatttaagtcacaaataagattaatttttttctcccaaattgatgtggatggcatatcgctgcaggcttcatcttcaacatcatcttgtcccttcttcaaacaagttatctgtttgtaagctgctgatttctttgggacattgtcctgatgaacttttcataaagcatcaatgattttttcattcttccacctaagcttcaccaaaaattttggtgtgtgttcttgcttcaattttagcagaattcatgttgctctgagagaggatcttttcaaacatgtcttatccttgttagtgcctcaaactagatcctgttcagatatatcaagttagtgagagtttattttggtgcaaaaaaaaaaatttgaaatctatgtatagttttttcatagcacgtatttttcatggaacttttggaagacccgtcatatagacacactcacacaatggatgcatgtattgtcagtgaagttatgttggcttctgaaactcaagggattttgctgaaactcatgaaactcaagggattttactgaaaagtctcagcctcaattggttcctcttacatttgcatattctgtctgccaggtggcaaggtagaattgactgtaataagaaagaaactaccattgagctccaattattgtccatgcctcagagttgatttttaacctgagagtgacagcagccacctgggccaggggcagacaggtagtttgcctcacctggaatcagaggctcccctatcagccttatcttcaagaagctgataggaatgctttgtttttcttttgtgtgctggacaaggagaggccccggaaggtctgtcatgtagattgacagtttccttttgtaagactggccaactgaggccaaagttgaaaatgtcagtaaaaacaaatagtattgcaaaagggccttatgcatttccttctctatcctctcattgccccatcagccgagtgctgcatgagtggcttaagagaacaccattaggcttgaaaaagagtgaactgcaaaaacacattttctccatttcacctagttgttattttccccccatgtgctaatgatgcaaacaaaagaaaataaaaataatagacattggcttaygtcttttcaagttccatttcttgtttcttcttttactattttcagaatcaaggaagataatacagaattttaacagttttcttacctcattttgcatttgttagacattgtttcctcgtggttgagacctgcttcctgctcaggaaagagaaagcagtggttgcccatacaattcaataataatgactctttgtcattatttaacagttgtttaggtgtgcctctctcctttcttcagttgcactaatgatagaaaaggatccttgggcacatagtaaagtggttcaaatcatgggtttgggtggtaaacaggtctgagatagatttcctgctctgccacttaagagctgggtgacgttggggagtcatttaatttttctgagcttcacccataaataatacatacatacataaaactcacctttcaggtttctgaagatgatgcaacacagaatctcaaaggtactgggtacccagggacactgcagtaataggtcccctctcctattgctgtcagctcagaaatacagaacagagcaactgggattcagaaaggagactataggctctagatagaggtactcactcacttccttgggcaactcacttccctgagcctcaactttcttgttggtaaataagtggaatcttcctacccaccactagaactgtgcaaggaagagatggagctggttaatgccagttctgtctgattccagacctggttcttaactaacaacaaggagtggtgcctggccaggcacttggggcattgtcccaagasgatgtcaacatgtcttcttagagaaggacagtcattgaggcctraggaagtgttcaggaggaataagcttcaccaggatagtttcaatgacttaaccctttgcatgcagtttcctcaagtgtaaaccgggggtcatatagtcccargagttttcaattacagcctttgaagtcttttgagattgttacacaggatcaagtagaagaggatgatttctagctctctattggaatttcagattaatgtctacaaaactcactaaagtccttgtattgaataattctttacccaactgatagcagttaggcttcattttcaatgccattaactctgagagcaaacgacaggcttttggtctgccaatatattaaaagtgtgtttctgaggaaatttcaatgagtcattcgtttatataacaaatacttgttgagcatctactttctattgggtactgttatagggattagagwtaacagctgcaagcaagtaaaaggcccttgctttctcagagctttcattccaggaaggagagaaagagagtaaccacacacatcaatagatgaccaggctgttgtgaagacacaaaagccaaatgagttgagggagagactgggggttagacaagggtgtttagggaagcactctaaagtgaggtgacgtggagttaaaattctgaatgataaaaaaaatgaaccacctatgtgaccatttgaggatggaacattccagacagagaggaaggcagatacaaatattctaggatgggaaggagctcagaatgtctgagagaattgaagacaagctttgtgcttagagcagagcaagctactttgaggttagagagggagccaggagccagattatgttggttttagccataataagaacatttatactgggtatgaacataaactcttggaggttgtaagccagggagagatcacttgattgtgaaaaaatgctcataacataagattaagtggaaaaatgactcttaaatctagaactgtatattcagtaccatttcaattatgcaagcatatgtgtgagtatgtatatttgtgtgtatgtgtgtatgtgtatatagatacatactttatgtatatatgcataaagtacgtgtgtgcatgtgtgcacgtgtgaatgtgtgtattcagtaaacaaactggaagaagatatagaaaagtgtttgctgtagtttttgtagtggtggacttattttccttcattgctttcctgtgttttgtaagttttctgtaagtttgtatgacatcaataatcaaaattaaatcatttgctttttaaaaactttgttgcagagcaatcaatggagagaatgtaagagtgatattattttaccatgtcttttctcagatttgagcttaatatcatggtgctttggaatgctggagtgaattttgaaggctctggctagyagagaagtttatttggctttttgtttgtttgttcyttttttttttttttttttgagatagagtctcgctctgtcacccaggctggagtgtagtggcatgatctcggctcactgtaacctctgcctcctggttcaagtgattcttctgcctcagcctcccaagtagctgggactacaggcatgtgccaccacacctgactaatttttgtatttttttttttttttttttttgaaacggagtcttgctctgtcgcccaggctggagtgcagtggcgcgatctcagctcactgtaagctccgcctcccaggttcatgccattctcctgcctcagcctccggagcagctgggactacaggcgcccgccaccacgcccagctaattttttatatttttagtagagacggggtttcaccgtgttagccaggatggtctcgatctcctgaccttgtgatccgcccgcctcggcctcccaaagtgctgggattacaggcttgagccaccgcgcccggcctaatttttgtatttttagtagagacggggtttcgccatgttaaccaggctggtcttgagctcctgacctcaggtgatccacccacctcggcctcccaaagtgctgggattgtaggcatgagccaccgcgcccggccttatttgrctttttaaggagtctgtcctaaactgaacttattactgtctccaaattatttatgcaaaagaatctaacatttctrtttcttcccatagatttgaatataacctgccgctttgcaggtgtattccacgtggagaaaaatggtcgctacagcatctctcsgacggaggccgctgacctctgcaaggctttcaatagcaccttgcccacaatggcccagatggagaaagctctgagcatcggatttgagacctgcaggtaagagaccagcacccgaccactggggaaagctggcggcctgggaccaggcagctgggcttagaactggaaggctcctttcccacagctgaatggattattgcctaaggagtcaaccccacgtattaatttggccaagtcaatctgcaayctgtatgacaactggagtttaaagtcagctaaagacacctttgtgaatcatagagcgggaacccagaggaagccattaggggtcctctcggctggaatcctcttgtctaacctgcttccacagagctctcctggctttgaagaagctgcagtatcattgtcagaaccacaagaaaacataaaccaaataacagtgtttgaaataaatatgtggctgttagagtcttggccctgcagacttggatcaaagcagacttttcaaactactctctcttactctctcttaaaaaaaattttttttggtttctcttctatgtttctctggtttgaaaaagtaaataaaaaggcatgaaagttattaagctatattatattaagatatattatttttgggagccctgagagggctcctacyagttattctagagctgcatagagccttcctcaaactatggctccaagcaagataawcacaacaagcaaggactttattttttgaatttccaatggccttgcggtaagcggtgcacaagaagagcaagccacggtggcaatcacagtgaattgttgtggttcgatttgttttcactagaagaggactgagtaacctctgcaactgctctgaagtttctaccccagcctgtagctgtgcttttgcagtgtctttaggtaatatgattcccctttctctgcaacacacactcacatgcacacagactgcttttgaaaagtcaagctgcagaactctacggaaaccatgaagtgtaagttaagtgcttctatcctccaacactggktacagtcatgcacccacattatgagtgatggctgagactcttgctgaaagggaaaaggaaagtcttttgcctaaaattgccctgtctgatatggtagccactaaccacatgtggtgacttacacttaaactaattaaaatactaaaattaaaactttagttcttcactagcactaactacattttaagtgctcggttagtcaccgatggccagtggctactgtactggatgacccaggttagagaacatttccatcattgcagaaagttctattgaggagcactgctctaaaataaagagcagatgtacatagacatctgtatgtgttcagagctaggtctgggggaatatgaaaggagcagagagagggagaaagctctggtggctactgaacttgcactgtaggatgcaatgaaaaaaggccatttagcaaatccattattctattcccaaggctaattgtttaattatggccctgactaggccactggcctaagaaagtgaatttagtaagctgaactttgattgtgaaatacaaacaaggcatacttgcaaaatatagatatgctgccatgtgctgaggaccaggggagttcttacaactgccactggccaatcatcaagcacttagatgctgggagccctrctgcccacctggccaaacccctcacttaatcctcaaactgcagtattggtcaatattatcacctcattttatggatgaagcagccgaggcttagcgaatttgcacacacagcctgcctatggaggagttaggattctggttctgcttagcctcagcccaggacaggattttaatgaccaagtcctcctcaggggcttaaaaggggaggaaagtatgcttcctggatttgctgaatattctttcctccttgtgaacagtaacttactcatgccacatacacacatataaactttaatatccccaatttacagttagcatgacccataaaacckgtaggcaacatgaggtggcaaaaactcagtaatagcttacaaagagaatgcaatagmttctagaatgttggtgttatccatacttgatgacatgatgtgatgggggtgagttggygggtaggttcaccaagaagtattatttagaaaaactgtgccaaagaaatctatcatttcacccataactggtattaagtattgcaaaactcatttccataatttctctcaggtagctatgaatcagctttctgccacaggacagatggcagagtctcatgggttaggataaaaccttagcagctactctcttttgtctgccccaccctgattggtagcaactcttagatatatgaaaactyattaccatttaattgtgcccacaccccctgccaagctaaggaggctttggggaaaccagtttgtctgttcagatgagaaattagtcatgcgagctacaattgccacataggtaggagttctgtgtgcttggaaacttcagactcacagacatttccatgggtcgtgcagggtgatgcactccatgctgttgcccctggcaggaaagatgaaaagcatcaatgtgcattttagccagaattgcattttgaaaaacctgctggatttagcttcctcctctctgccctcctgctgcaccacagcttcccttgcacatggcattttctcagcccacatctcattttttgagrcatttwatattcaaaaaaaattgtgtttttagcacaattaaaaaataagcaagtttttagccaccaggatgctgctagaagaggctgggctgtgtatgttgtatctgtatgtcgtatccagctgtaacacactcccagagataccttggtggggagagaggggctatgcatttctctggctgtgctacttctggaaagttcctgagctacatgagccgttgctatctgcttacttaattgctatgactcccattgtaatgatggttaatttattcccactggcaatagaattatgcctgcaatgctcaggaggcagtgtgctgtgctgtgtacttggcatataaacaaggcttcatgtttagggcaatggagtatggagtaaggggactcacaggaaaagttgtggctgagaaagaagtgggggaatgggacatgaggcaggtctggaatgtgtgcactgaaataaagaagcaccccttcctatctatggaagctggccattttgtgtattttctggaaaacatgaaggtattccagagccagcatgaatcttacatcaaaacttctctcwtctgtgactcaggcttccttctgtttgttcaaatagactcaamactgctgaacacaaattttaactgaaactaattattcctttcatgatttttttttaaagctctttataggtctctaaataaaatcactttgtttctatcagtcttgttgatctctttccctctctatgctgttatttttggatttcaaataactcggttgttgaaacctccgatatccctaggggtgaactgaatgaagtgttgcacggcattaaatgtcattgaatgggatattatgaaattcccatcttagccatttaggtcaatatcctgttgtttytctcttacaggtatgggttcatagaagggcaygtggtgattccccggatccaccccaactccatctgtgcagcaaacaacacaggggtgtacatcctcacatmcaacacctcccagtatgacacatattgcttcaatgcttcaggttggtyctcaggggggtgtctgttggygtgaaaggctgtgggagcctggtctttggagctcagcttaagtggggattcatgtagcctccatttacataacaaatgctcactgaatatctgtacagcagagccaacattcctgtctccatggagcttacatgctaaattggggaggcaaacaataaacaaataaatattaaataccattcaggactgtccaatcttttggcttccctagstcacattgggagaagaattgtcttgggccccacataaattacactaaaactaagagtagctgataagctaaaacacaaacaaaaatcacacaaaaaaaatctcataatgttttaagaaagtttacgggtttgtgttggaccacattcaaagtcatcctggaccacacaaggcctgtgagccgcaggttggacaagcttgccctatatgaagtctgaaagtgataaaagtkctataaaaaagaaagcaaaatacgaggctaatgagtgctagggatgcttttattttctgagaaggtggtcagggaaagtgcctcctggactgttctgagaatatcagtgctcagaagggagaatgccaaggaataaagtcagagagctaagcaagggccagctaacggggtgattcattctcagtgtgatgggaagtcattacaggttttgaataagggagtgacatgaatctaatgatagctttggggtgtaagtcaaatgtcttagctgagaggtatttattatatgagagggctggaaaaaagccttggagagtatatggtatgcctttgaccttcttaaatatcccttacccaacagttgaaagaaccagagaagaagaaacctaagttaagatgtagatgctaggacacaggccagcctttctctatgtctttgtgactttctcccaaccattaacctagaaaatcaggcttatgagccttattcaagtcctagcaaaattaaagaattctatgcatcatgaattttcagaattttttgagaaggatcaaaatataaatgtcaaatatctcgatgccaactatcaaaagtcttacctcttaaactgggccttctgttcccatggaaggtttgaakttgggtgaagggaaagatgaagccttgaggtaaacttggtacatcttgctggagtgtcagttttccctaaagatgtgaaggggatgttaaattagctggaaagggacttaagacattatcagcctgagacaaacacagatwtatacatatacatatatatatatttatatatatatttatttatatatatttataaatatttatttatatttatatatttatattcatttatataaatttatatttatatatttatatttatttatataaatttatatataaattatatttwtatatttaaatatatattataaatatataaaaattatatttatatataaatttatatatatatattatatataattctatatataatataatatataatatatattatatattatattatatataaattatatataatatatataaattttatatatataaatattatatattatatataaatttatatttatatatatgtatatatgtatatataaatatatacacatttatatatataaaatcaagatatcacagatatatataccatatacatcaaatataaatatacatataccatatatatggtagtaaaatataaaaagctgcatggatttttaaactataaaaaggacatcaacttaattatgagatctttcttctactcactactaaaaaaaacccaaaaattaaaattaattgtgagattacatcagtggctttagtctacaccacctaccctttgttgtgtgaacagtagggatcagagtggaaattcagagaagaaatctagagtttaggacaaagtatcagggctggctagttgaaatggagtgcgtgaagccagtagattttgacaaaaatttacaggtcactgaatctatcgagagacatacgaaacaggaacagaaaactgtagaatgtttactcctccctgttatatgagtgaagaacacaaatggagtttgactaaagggaagggagtccaattaacactaagtagtacacgactcatacatactcagttcccatacccatgtctagcatgtcgttctaatgatattataatgagaaaaccacatataaaaaagtaagaaatagacatagagcaacatgtggtctagctagctccatctcagtgcaacaggtcagagggagacattgggaaaagcttgtgctttagatgaagaggttgactcattgggaaagggctggcatgaggctatacactcctgagtctctgggcactgcttattgcatctcccattgagtcttgctgagtgaatgtatgcaataaattatgtagttgcatacccacattgtcttacctgttttgcaagttggtttcacttgctaaaaggaacctcaactcagatagaagctcacactgttttattgcctggcatcgaagccatctaggcaggctgcgactgagacttgtttctatccttaattttgttcatgaggttgggcccatacctggagttgggagcaagagcattgattaattttcttctctttggagggttagttcagttgaaaagcttgagaagtacagggggtatgttccttactaaaatggatgaattaaataataaagctagaagtaatatttttccttttgtctattttccaaattgactcgatattgatggctacttttgtaagtttttatttaagtttaaagggaatatttattgatcacctctatgtgctcagtactgcactaggcagagatggagtaagaaagaactggaggctacatttcttgtcttaaaggagttaacaatcttgttgaagcaatgagacaaaaaaaaaaaaaagaaagaaactggagaagaggataaatgtgtttaaggataaataaattctgaatgtcttggattagagtcagatgataggggtattaagtgagctaaagattttgataaactgccctatgcaaagatttcattgcaaggatccctgaatctaatttagcctgaaagctgctagcaggtggtcatgtcccagtgctgtgatcccccccataaaacggctacagggataaaagtcagcttgatcttagtagatagcttccataagcttaagttttagcagtatttttagaaaacatggcctgtggctaacaaatgaaaataaggcagaacttgaaaaggcctttgtgattttttttccctcattttcagtggttgaggcccaacgtgagcctggtgacttctgtgtgaacacagaactgacttgaattgattcatttattaagcttgctttcagtcaagtgcctcattttcttttgagggtagaattaaagggaagattctacatgtacttgtttatccatttcctcctttattcaacaactatttgagaatatttatgagatacctaaaatgtatcaagcattgaagagggtgcctttctatctggcaaccagagattagtggttagactgaataattaatgtttctcttggttattttggtgtgttgaagccaaggtttatgagaaagcccacctcagagaatttctaacaagtcctcagattcaggaacacctcaccaggtctagctttccaagcagtacagagctcattaaatggaaagaaaggctatctaataaggccctggaatccgacatgagagcatgagtctgttaattgcacatttgggtcaatccactaagcatatttgccagatttgatgttctttataaaagttaaggtgaattggagcatgaagggggtccatgtgaacaaatgctctaataatttacaaaactgtcttagggtttgtgacatcatgctccattctattacaacttgctgcctggaaattcccagtgtactgttacttgcagttatatttgaagttaggggagattgtttcatccctggcatcaagaagccataatccaaagcctggttccaggtatgcacaacatacaaatatcagaagcatctcataggttgcgtcagtttctgctgatatttccaagagaaacaagatagatactcccctaaatctcccaggttggctatatgcccttattttcaagtgtaataattttggaaaatatttttgaaaactgtaaaaagctaaattaatattaattattacagtcccccatgaccttgtgagtttatcagaagcagggacagaaacatgctcatcttcttttctccttttatatggtctggcatataagtgttgagtagatgcttaaaaataataaatgaagagttatatctgtaacttcctttaattatttcttatggcattaccatttaaggataatctaaatgcgtgacctgtacatatttggagatgcatttagggggctaacatcttargtgtgtttactggaagaatagacccttgggaaattatatcggtacttttttcttttttcatccattcaacacatttttattgcatgtttctctgtccccatcacacataaatgttctggccaagacagataaagttattactcatctgtggagcttatacatttctagggagggaggcaggtagcagaaggcagagattgagagaagtgccatgaacagccatcaagtaagatgaacaagataagtttatatggtggtaaacatgaagaagaaatgagagcaagatgctatgtgatggtgacaggtgtgggggagtgatgaagcagtttagattggatggtaaggaatggcctcgccaaggaggtgatacttctctttaaagaaatctgagaaatcttttaggacaggctttgcaagaatggtgtttcctaaaactttctgtttttttccaattgaatgtataaaactgccagttagttccactaactgcccaaagaaatgggcaggttaaggttatcctttttatctgtgggaaaagatgctcccaggtactaggaagcaaacaaaacctgttttgttcaacttgtgtttctatccacttttataagtacacaaaaattatagcaggacacttaaaatacttgtgataacagcctttcttgtgatagcagtctgtctgtctgcctgcctgtcttcctccctccctctctccatccatctatccatccatctccatccatccatctccttcttcctctttgccaggagcaattctgggagaaactaacctaacaaataaatttccattttaatttaagtatgcacacacacacagaataaaagctgtaatgcacaaatggacttaacctttctataaaggcaaaaccagtttaaagctctctgaggttttagagctcaatacaaggtatagtcacagaataaagcactttggcatgaatagaaggttgcttcagctacactgcagtctgcttttaagacacaaggaatggaatgcagggtggaagtttcagggcctgttatcagaccgcttgagacagtrctgctcagagggctaccagtaacatctgtggatgatcagtcaggcccaagattcaggcagaaatctttattcctaaagcaagggatgaaagagtagaggataaaacgagaacaagagaaaaaaaaaaccagaaatgcccatgatgagatatgccaaaacagtaaccttgaaaaatattctgggcacctaggccaaaggtggtcaacctcagaagcaacatgctgagaagcagtctatacagagtaagcacytaaaagatcagctaaattaataaatacattattacattaatgaaagactagagattcatttggtttttaatatttcaactgagtaaattctttgttgtgattatgttattttaaccttcagattgtcatgctgttcatgttgataaacatttgattgtgtgtctgccatgttttctcatcatttctgtggacttcccagattataaatgattttctcatgatagttcatactttacttttaaatttttttacaatgttcctgcattacttttgtaatcacaaattttaaaaatcctccctaatgtgtttgcattagagaaggagccgtgtctatcttatttaaaattgtacccccaggcttccacagtgcctgatatagaatgtatatttattaatgaatgaattcactgtggtgggaaaatttccggaaacttcataagttccagaaatttatgaaatcaggtaaaaacggaaaatccatcaggaaaggcagagaaattcctagccaacttaggrgtttcggaaaaagaaagttatttggaataagttatagtaaaactccattctaactgactaataaaaatgagggtagattttcctcatgtttttaaagggttctcatcctttttttcctacctcatagctccacctgaagaagattgtacatcagtcacagacctgcccaatgcctttgatggaccaattaccataagtatgtctctcttctaatcttaattaaattttcctattttggggaaagggctcaggtgtgttctctgtggtatatttgaatagaatattaggccaggtgtggtggctcactcctgtaatcccagcactttgggaggctgaggtgggtggatcacttgaggtcagaagtttgagaccagcctgaacaatatggcgaaaccttatctctactaaaaatacaaaaaattagctgggcatagtggcaggtgcctgtaatcccagctgctcaggaggctgaggcaggagaattgcttgaacccaggaggcagaggttgtaatgagctgagatcgtgccactgcactccagcctgggcaacagagtgagactccatttccaaaaaaaaagaaaaaaaaatattagtcatttccctaagactaagtaaggacagttggctttaattcagtgtcccttcctttttttctgcaatgacttgaaactgctctctggtttacactcatgcatcgttcctcaaacttcagtcatttgaaaaccactttcacattttttttggcatctctatatgtacaatgctctcatttacttgatatttttatttaaatgatccactgttttctaattaaaatacacttatttttaaaaagaaattgcacatggaaaaccaacatcacatcgtaaatagaaggcaaccttaataataaacttaaatgtaagaaaaattaaataatgttcttaatttgcagctgctgaaagctctgggtctgagtcatgttctctcttataaagagggattaataagtgtcaggtgtaggggcattttggccctaattagcaattttctgtttgatataactgaagtattgaaagataatcatgaaggatataaacttcctgatacgtgttttgacattgtttataccacatccatcttaaatcatcctgatatatgattatccacagatgtatatattcgggcactttttaaaaatagacatgggggtctcactatgttgtccaggctggtcttgaactcctgggctcaagcaatcctccttcctcagcctcccaaagtgccaggattacaggcatgagccaccatgcctggcctattccagcactttagaaatcagaaaatctcaaccagaactttcaaataggctaactgctaaccctgatcttacggcctctgagcttcatttaatgggaaacagtacagtgttgagaggtctgatttctgcttcctcacagctggatactgacagtgtgcacaggcatgatgttggcagtggcagagggatgagaatcttcgtagaccatacaaacccagccccacattgttatgtaaggaattgtccctgacctgtgccttgcaataggaaggggaggcttcacaccatgatggctacgacatgagatgtgctgtctcagcaggcctggtatgaaatcctagttccctcaccatgtgtgagattttagaggagtgactgatcctcagttttctcattcatataatggaacaacctatgagaatattcaggaaatttgtaaaagacactatgtctaatgtatgtccagcccatagtagaggtttaataaatgccctgtttctttgatgcccacagttctcttttgaagtccagacatgtaagagtgtggtcaacaatatttccttgtcaaatcctcacctgcagagattaccagggtgactgagaccttgattttttttttcatttatgtattattaatagttccacttgaggcttgccacagtggctcactcctgtaatctcagcactttgggaggctgaggcaggcagatcacctgaggtcaggagttcaagaccagcctggccaacacggtaaaaccccgtgtcaactaaaaatacaaaaattagctgggtgtggtggcatgcacctgtagtcccagctgcttgggaggctgaggcaggagagttgcttgaacccaggaggcggaggctgctgcacactgagattgcaccactgcaccccagcctgggcaacagagtgagactccatctcgaaaaaaaaaaaaagtttcatttgagcaagctaaatatgtggccaaaaagaacctttagtcccatcaatgcaatacagcagaaaataatttcatctaaatgcacacctgcatagtgagtggcccagacttgagagcagcaaatacttctagggaggaataatgaatgaatgcattcaggctttttcttctccaattcattctagtcatttgttgaaaccacagatgttgatcttcatgtatatctgtgcttgttaatttccaggttgaatttcacagagaacggcaaatgctcttctgtatttagacctgctgrtttcctagccagaagtgggtgtttgcacaagtggacaaaacttgccccttaaaaaagaaaatcaaaakcttcatcattttgcagatgtatcttccctgctgaggctattagtctgctacttcaaatccttttcggaggaatatatggaattaatagcaacacattttatatgtacttcagaagggagagtagggaaacaagtgggagaatgattatttattgagcatccactgtattttgaatactgtgctgagcactttacttacaatgtatcacataatccccattttacaaatgaggaaactgaagctcagagttgccttgtccagagctctatgaagctaggattcaaacacagggatgggactctccagtacttccttgtttcctgcctcatccccagggtgtgtgggggatgggagggtgcactttcttagtgcatctgccactctctcccaccactggatagataggtgtttctcattacaaaggaaaatagctttgaagtcactatgttaaacgctaatccacatactcaaaatatgagctgtgaagttctgtaagtaccttttctctctcccagctattgttaaccgtgatggcacccgctatgtccagaaaggagaatacagaacgaatcctgaagacatctaccccagcaaccctactgatgatgacgtgagcagcggctcctccagtgaaaggagcagcacttcaggaggttacatcttttacaccttttctactgtacaccccatcccagacgaagacagtccctggatcaccgacagcacagacagaatccctgctaccagtaaggagaataaatcactgtgcttcccaatagcaattccctggcaaaatgtctctgaccttcctgagcattgcacactcacgtgctgattttctcgtctctagacagctggaagctggtgatgccattcagggaggtgggctcttgtggttgtcartaaactgcctgcattgactactactgcctaccttttttcctcatctataactgtttttcttaccttagcataagaagtgccatattggaagttttattttggggagagccctccttattctcttatccccaggtatacagtaacaattcaagcctgatatgaaaactgttttcattttttcatgtttccttcttgttcttatccacctatggataagattgttttcataaagttgggatcatagagtttgcataccactccactagcaccttttaaaaaacccacttatgcctgaggttgcaattttttgaatttttgcaatcagaccttggtgatgacaatgagcagtaggatataaataactcccacatgcttagctttccaataatggaacagtaggcatacgtgggtcaactgtggctttttatgttttaacttgatttacattcatactattgatagtgtaatattcagtgattttcaccaacgataatttactcaacaattcctttgtttttrgtccaaggaagcatatctggaagagttttctggtgaaattaaatcagcttaagagctctataatccagcctgttggggaatgttctcaatacttacttggtgtgtgggggtaattcattacttagggttgcaagagtggaagtatgtaaacattgcgttccattcctttggagtttgcccctcgcgcttcagctccactggaaagtgtttacatctctcttgtctcctgtttccctctttgcttttcttctatggtttgttttgaaatgggctcccagatgggccatgttcctcctgtggaggattaatcaaactcaaatagggcatctgcctctggagcggttttcctagtatggtgtggatgttctcttttcctggctatagctcctgaggggtgaaacttgggcctccaaagagtgtggcagaaatgcgctggcttgtgaatactcaagacagggcccttctctattccttgtcacccagaagccagggaaacccccacagtactgtgatttcatttaaggtcacttgcgcaatagtgttttaaatttctgtcagtctctggctgagggcatgatacaaataggcttggggttcccatcactccctgcacattctttgaagctttttaaaaagcagagttttcaagctgcccatactttcttgggttattggccctcttgagtttgcatcggcttattgttggtagtcccgtgggcaacccttcttgagagaggcttctgcaaaccaagcrggccgtgctgctagctactcactgcttcttgggttccctgtctttttaaagtaaccatgtcgaaggtgcttatcattatggtakgcaattttgtcggatgttagcgaacacaataattagtggtctcagcaggaaggagaataggtctaccctaaagtaccacttcccaccaaagaagaaaatcctgataaaacataacttgggactatatgtagttaacattcaaaccactaatagcctatataaaatagtatttcatgtgtgttttaaaaacacacatttcattaacccctatagaatatctcttaagaactgtatcttcccttcctaagttartcagcaaacgtattttgagaacctactacgtaccaggcctattagaatgcttgggatcgaaggataaacatagttaggaagtaatattgaagagaggcaaggattactgagatatttattcattcaatcaatatctgaggtcttctgtatgccagacactgctctaggatgctaggaattcagagttggacttaccttcatggagactacatattattggtttagaaatcagggaaaaggagtgtttatgagatttaactaaaacatagttcaggatttgagctgagaaatgaattgtgcctttctcctcccagataaattagttaagtttccttcagcagctaaaaaagaaagagactaatgagtctaccaaatgagtccagggctaacctgagagtcactgaagtactataggacccaatgggaccagtagcagctccaagtggatcacttcatgcaaagaaacataccaaggcaaacaacctggtggaaacttgaacgtagcataatggcatgccaggaaaagtcagcactgttaggttcctgagtagaatcgtatttctaaagtccagtgaggagatttgcaaaaccttatcactgttggactgagagctgggacagagtgacagggagtgattgcaaagcctccctcatgcattgcaggagggcaggggtcaagaggagtgctggctgagagcacagaagaagcggtctttggctcggctggctcattccttcctgaagggcctgtagtgggtggcaatagggacagctagtaagaataaccatctgggtagctttaggcttccagcaggctgtttatcttgagtgtcatcagcctcttcctattggtgacctggaactctctgggatcaagaaacctaaactaattcaggaagcagactcctgccttggaacactgtatttccttgtcttctgggtgtcaaaggaattctttcttttttttttttttttttttcagatctggtatggcctatttgggtggggaaaattagaaattctgctggctaggcagtagctttttccatttttccccctcataccactcctttcaggaagacaaaaataacgcctatttctatcttgttcttgtaggtttgtttcctctggtactattttttcctgttgtactattgggtgagggtggtgggaattatgcatctttaataaagtttctgaggtgagaatgtggtgtctgtggattttcccggggatgctcaggtttgtctggaggcttcatgggtaaaattggctcctatttctctactctctgttctgaactaatgtgtcctttgcagcaggggtgtccagtcttttggcttccctgggccacattggaagaagaattgtcctgggccacacataaaatacactaacactagccatagctgatgggataacaacaacaaaaaaagcttataatgttttaagaaagtttatgaatttttgttgggccacattcaaagccatcctgcatcacaggtggcccacaggctacgggttggacaagcttgatttagaggacagaacatactgtgccagctgttggcattttatatagatagagtcaaagtttttaacctagggttcatggaccttcagtaggttcaatggtagaccataaggcattctagaactatctgaaataatatgcaaaattttgagtgtgtatatgtagcatcacttttttgaggaaggaggacataacgtagattttcaaagggatatataatttaaagtggctttttaaaatctcagctggcttaaattagatatttatcctgatggtttttgccattccatttcaataagaaaacatgctggactcaagtcaaacttgagagtcgaatgagagattttaaattgcaaaatgttactgatgatattttctctaatttgagaaaagtctggaatttctctaactttggcaactctagtttttggtagaaacacatattgaattagaataaaaagtgacagaaatgatagatggatacctgaggaagttttatctgatttcgacactttgaacacattttctttgcaaagttcctgctcaagtatgaagtttgacctgaggctgatgcgtgtgggcggagctttgaaatgccagttgtcatcacaaactacctgggtacaatgctagacagatgtgaaaaatacacactagcaacccaaagataatccaaagataaatgcatgaaagcagtcgtttgaaatgctgcttcgaaaacctccagctcatggctcagtcgcccaatcaagtaaatagaaaatctctttccttcacaggttattaaattgctgcttgattttgctttgatcakgaattcaggggattcagtttgaagaatgagtagcatgaaatttatacccatgaggaatttgcatttctgatgttgtcctaagattgtgggagacattaggagtctggaaagataaaaccaggcctagattttcttttctaattatcattcaataatagatacagacatcatatataggcagaactgaaagtaaagatttgtagagggaatatcactaagtgatactttcataattgatccagttacttcaactgtgcactcaaacagccacgcaacagctcaggagcaaaataactagatatggtcctggtttggtaattcacagcctaagactcaggatctcacaacaacagcaacgacaggtaaactgctttgtcttttgcttatcagctctcctggatgtcagaccttttagtgttaggggagaggacgtccattatcacgtcaaatctccttcatcattcttagtgagaatagggtcttgtaccacttcatatatcagaaaggcctgtggatctggggatatgattgatattcttaaatgtcctgtatgttttccttttggcaatgtgtatatagaatcagaatgatttttccatcagaggaaggaaaaactatgaatcaatagttttgaatgaatgaatgaaattatgaaaaactacaaatgaatgaattgactgtgtgattcaatgagaaaatgtcctttagaaagaagtctgccggaaagtgcasgcttctcctttctgctgatctgattctcacagccagtaataagagaaggaaatgcagatttctctcatcaaagtgtaggccctgaacccttctttggacacttaaaatctcaactgtaaagtgtaggaaatgacctgttgctccatatcagaatctaggcctctaaccagctccctgggtgtgtggctcttagctctatatccctgcaaagtgtattgttacaggagctttggggaaaaacgattcaaggcctgtaaatatgggagattacaaggacaccctcatttattaactttcattgatggagttaatggccatatttcaaaataactaggcattctttctgcagagggggrtaataaacatggaaaaattattctttacatttgtttgccttatatgacattggataaattatattctttacttctataaataatcgtgaggaaaatagtgctcatgttatgttatggttgycatatcacaatgtctaagatcatgcaggggtggggaggggggatacagagattgcagaataaagacaatgctatttttaaatgttgacaatgtttatcttcataggacaaagaatgtgaaggaaaaggtctttttggcagtgtttcatcttcttggttcatttttgggctttcttgatagctgaaaaaaaaatctaactcaccttactattttgtttgggsatgatggtttcagcctctctgcttgaacttgttctcagttttttgtctactgttagctcatattcttccaatgcacatttttgggcattattggttatagaaatggcagtctttggagatttttaaatcaagactcttgcttctggtcttattagcaagatcattggggtcacttcatctctgtctgtctttcctgattgattatcctattttcaaagaatgagactcaaaatgtcctgttctgctttgcaaaatakagtttcacataagaaattaccttgggcaaggttgtgagaggatttggaatctaaatggagaaaagtgtagaggcatatttttcaatcttctacttctatgtcattttycctgtgtgttggattgctaagattatgtatctattgctggcagaaatatcatatcctaaattcttggagaatgatattggttgcccaagattgtatagaagattaaggagctaggacyctgaagagctgggttttagaatcataaactctcaggtttggaaaggatgttaaatggtctggttcaatcaacacttctaataatttaatctcttacacaactttcytgccaagtgatcttcctgactatgggaaacataatactttatgaagaagttcattgttggatagttcagattattggttttttaaatccaacatttggaagaacattcctcttcctgaaattttcaccacagatcctaatttggcctcatggatccagaggcaaaaaagtttaatccctcttttacattatatagactttcaaaattcaaagacggctgtcatgcgttcctggagccctcactcttgctaattaggcttctgacttcagacaggtcagaagctctgtccagcaaaatttttaaatctttaatataaggagcatgaaccagatgacatttaagatccttccctctctgacattctataaacttcagtttgagtctctgaaaaaaatggaacttttttgctttttccctttcttttcaccatctatatcaaatatagatgattctcttgagtagtaaaagagtacaagcatattcaatgctatttcttaggaaccgttaattaatctttcaacaatcaattcaatcatgattacaacagctttgatgagcactagtgctacagcaactgagacagcaaccaagaggcaagaaacctgggattggttytcatggttgtttctaccatcagagtcaaagaatcatcttcacacaacaacacaaatggctggtaatgagttattattatctcatagcgtatgttttcttgacagccttgaataattttgattgacctctgggatgttattaaagcctaacgttccttctattctcacaaattttcgttatgacttcagaaggatcattaactctggtatctgtttgtttgcttgtatggcaccaataagcagatttcttctttctaatctatggattagtatagaccaggagaaggctaatacagagactatgaaacgggaataagtttttttaacgatatggcaaaattgtgactctgaaagatcattcatgtatattctaaaattaccacagtcataaaaagtcttggactttcatgaggaaatagcatagctagatatgaaaaaatatagaaaatcttcatcaatggaactattcttggggtagacactaatcatatgaaaagacaaatgctcattccctaagatagcctgaatctcatttaaaatgtagaaaacccctttttagtaaagagacatcttctacagtaaccactgagaagaagtggaagtttttcatctcctttttttattcaaaaagaaaaagaatttctcaatttctgaaccacagttcactttagttaacccctttgattgcctaataatgccaaaaatgatttctctgttaattggcttcacatttttgctctatgctgaagtagtattgggaactgcagtgtagcttccatctctgtttggaggtacactgatctgatctgatactagagaagataaaaaatgaattagcaaattgtgaacacaatgaaatgactgacgtaggtgtagattccaacatttttctgaaggtgtcttgaccaaaaaaaaaaaaaaaaaaggcacgtgtgaaacctttccattctgttcttgatggcttggctttaatggcatatggttaatgagttaataataaacatatctgaaagtgtgggggagttttcattagcctttaaaaacttatatggtgagattatgtccacacttattctttcagctttcttaaagagaatattcagttttaaagatcatagccacttgttttgagatttatgtattagcttcggagatcagaacataagaatttggggtatgcaagtcaactccctcactttcttttaaaaatcctgggaaatccattataccttctgtgcctgattttcttcctttgcaagtgggttgcttgscgtccagctcagccactaatgcaagtcaccacaacaggtacgtcttcaaataccatctcagcaggctgggagccaaatgaagaaaatgaagatgaaagagacagacacctcagtttttctggatcaggcattgatgatgatgaagattttatctccagcaccagtaagaataatcaattacagtacagccatttatgcaaggcttattgattaatctgagtgataccaaattgtatctctcttgagaagtagttaatgtgaaaaatgggtgaacctatgatcataccttagttatatcttgatgagattayrgaagaagaaatagaatgttttgagaagtggggaaaatrtctcacaaaatttctcttgtctcatgttcttcctgttttatttatctatgggatctactgctacagattgtctttgaatgatcaggctttatcagagaatgacattaaaacagtacaaaaaatgtacattgtgtacttactgtgctaggtgctggaaacacgaagatgaaaagagccagagcctttgcttttcagaagctcatggtctgttggagcaatagacttgaagaatgtgatgaggagggtattaattaaaagttgtaggccaggcgtggtggctcacacctgtaatcccagcaccctgggaggccgaggcgggcagatsacgaggtcaggagatcgagaccatcctggctaacacagtgaaaccccatctctactaaaaaatacaaaaaattaaccaggcgtagtggcgggtgcctgtagtcctagctattcgggaggctgaggcaggagaatggtgtgaacccaggaggagatcgcgccactgyactccagcactctaacctgggtgacagagccagactccatctcaaaaaaaaaaaaaaaaagttgtggaagttcctaaattgaaggccctaaaggcttaaatgatgggagctagaactcaagaattatcttagttaatcaaagcccagctgaggtcaaaggaacaaatccagagttttaacaaatgagctggacaccaatatagcagaaagaccttgaagggaagggcaaatgtcaggttagctttagcaagacattgccacttattaaaagcaaataatgaaaccactattggtacataatagtatccaaatttttgacaattataaaactttttgagaacaaagagatggaaattgagctttaaagatatccttaaaaagttaaaaacatgcaaaggttggtctaatattctgccagattactgagttttccacacatacctgtaatgacttaagattttgctgaacagagctgagaatcctgaacctgactccatcacagttctgcttttccttagaaaaaaggcttttggggtgctgtgtgagctctcccaattcactgaagttctatccattccattaaaatctgagaatttcatcctcaaatggacagagaagaaagggtccagaaaaaaaaatagcttaggccttgaaggcatctgagtatataacattgatatgacaaatactcaaaaggaactagaattttctatctaaacttttaagtgattttttttttagacccgacacccctccagagcttaatctatggaataagaaaattccttttggtaacttcagaacaaaaaccaaataatcaaaaacactggagttttacattatactgtctcctgtgttcagcatgtggcccagctttgcagatgggcccatcagtaaatacgtggtcttgatactgaagaaattaaattcccttgggtggtaacccaaacagatctacctgtaaatgaattgtatggtcaggcttcagggaaaaatttcccatggtgttggttttttttttttttttttttttttttaatttkttaaatctctatggcatatttttccaatttctgcttttctttttttttcttttctgcttagcacctatggacataattcaacatgatgccctctttcttctggaggggtgtgataactgcttgataataagcactttttcaggcctattgaraatgtggttaatgattctaaacttgatttttcataacttgtaaaatagagctgacagtattatagttctgaaaacagttttgcgttatttgggtatcaaaataaagtttgaaacaattaggatggatttgcaaataacctttcacaaaacatgttgactcagattttgtcatgatccttctgttaggtgcatctcwtattccagccctaacagattgggtgacaatatcagggtgctggtggaygtacgcctctttctttccagtgtgctgctatgatggtggctggttacctgtggtgtcttattttctttcactggctatgaatggcttgctcatgacatattttgtatttgatgagaataccatagtgtttgataaatattcagaaatgtatcgctaaaacatatggctattckaggtattctttttcagaatcatctataggaaagctctagctgctcaggcattcctttccccactgaaattactaacaacataaagtgattatcatggtataactttcagttatctgcctcttcacccggaggatctacaaacagcacacagtgactaagtccctgggctttcaagtgcagagggatactacagactgcatggatgggcaaaatggcgcctttggttatcctcggtggagggctggtgttttcaaagctgtccttcctactgctgcagcttctttgactgttttatctggaagatctcatgttctgaaccccaaggtattctatgacagaatgcaaaggacactgagatgcttaccaatatggctgaattaagctgaagtcaccctccgctttccctccatttccatgcagccatctatacaacctggtatagatgattcattgcatagcctacagaagcaagactatgtgcgggacaagtggcgaaggctcaagaaataacatttttctaattgcttcaatcatcgttatcacagtttcaaccacaccacgggcttttgaccacacaaaacagaaccaggactggacycagtggaacccaagccattcaaatccggaagtgctacttcagacaaccacaaggatgactggtaatgggttctgcatatttaatgaaagatttttttcccctcaaagcccatgatgctgcaaaggtcaatcatcgaggcacagtgggaaatttagttaatatctgatcaagaaattcttagtggacttttatgaggatacttaattccatttaggagtcatttatcaattataccatgtgggcacaggattttttatgttgcttcatgataaaaatgaatatgtttgaatggtttgtggttctgcctttgacaaactgatcatagtggaataataagggaacatgaagaaattccaagcccattgattttctcttgagaccaattaggtaaagtcactcaaaatttttgagagtggatgctcagaggtaacactttggcatagaattgttaaatagcatgcactttaatggaagaayagaatcattaaagattggttgataacaagtcacagtgtatttaaccatcatcacagcagatgtagacagaaatggcaccactgcttatgaaggaaactggaacccagaagcacaccctcccctcattcaccatgagcatcatgargaagaagagaccccacattctacaagcacaagtaagcaagatggcggtcggcagttctgggttagatgaattagtaaagacattccagcaatagggaagattttgtttagaaattggccgcatcttctatttccactcggtaatttcttttattcttagagcctgaaaagctgctaaacccgcacacaaattttaaaaattggaaggaaaatgataactcatcaggttgcccaaaggccaaaatgttttaagaagtagatctagatacaatttttgtgttaaaggttcctagaggttccatttgggtaacttgtgtgtgttcattgaaatgtgtggcaaagagtgtgttcttttggtgcttagtagtggaatctggaaagaaagtttgtcaagtgaattgatctttggaatccttattttctatgaagatctttgatgaatacagtgtcttttttgyattctgtccctgactgttctatagaaagacrtcccttgtactctttagagcaaagttggtagctcttatggtcttcatttgaattctaccactgcttctttttctgtttttaagcccatggtaacttggggaaggctttgatgctcttactgttatttctactattatgaaaactcaggttttcyaaaacaatctcaagttgcggcagtggactgtgagaatagggggccccctcactccccaaacataagaagtatrtgcttttcttcttttatctatcccgctgagatatgtctatcttatttggaataaaagtatttattttggaaaacagctttttagcatttttaaaatgatgacccaactgtcattctcacagccctagatacacctaatggggaaatgtgagccacttaaaagccacttaaaaaccaaagggctttgggaatctatggcttgaggggtgccttcagataacaaaagaaaagtttcaggtatcagttaggatagaggttagacattgtactgaatatatccagcagatcttacatcccattacaaaccccagtaggtgtgttgtatacatacggcttaggggttaagttaacaaagaagtctgataagaaaaggaaatacagaggaagcataaatctctttggaataggattttgttccactcccttagagccctaacagtataccttagaaattattttagacagtttgtacttaaagaccagaaagctactttagagacttggaaataatgagcctattgtcaaaaggtggtgcttgcggggcattaggactagagggttggtgaaaattcagacagaatgtaacttgacaaagagaagacagcaacaactgtaacaattatcttatgaatatttgcgaaactcaaagggatctgattggtgacctctgggctttatcaaattaacatcacaacttctagaagaaagtcaaccttcatcttttacaatagaaatcatatgttttgctaacccattcctatttaggctgaaaacaattaagagttatgggtacttaaaaaaatcattatgtttataaaattagtgatagaaggagcatagtgttctatacagtcacacacatacacttccttatttcttttatttaaactttgagtaacatagcagtctatgtttgggtcagttttcccttttttgtaattacattcagtggtttttgtaacttcattatttattgggaattagtgatttagtcagtgggagttttgtaaaacttaagattttggcttttttccccmtcctcctggataaccagttaacccaataatggcttggccgatggaagggtaaaatgaggacagttatattttttaaatgtcattactgtcaccaaatcacacatatcattttctaagataaggaaatacaaccatttttacaagttgcaaaaaagtactctggcttggcaagtttatagactctcattttcttgataaactaaaaaaaaaaaagaaattgctacaagctgctatagacaaaaatgttggtgtctttctgacttttcctgaagacaccttgatggaattatattctcttgattttgtcctttttaaaatgatggttgaaattttaagcctgtcacacactattatttatataatgcctcaaactggcttggatagttttcgtcaactgaattaattttgttaaaaagtgattttagcaattttaggtgccatgtggacatcaccaaatactgtgttagtggaatagcatccaagccatcccaccatctttcctgctgggcaaatccactgctggtgcatttccagtgtgtgcgattatgggttacatgaccaccatttgagaaggtctcctaatgtgctgatcttgttattagctgttatacagtgttttcctttcgtcaaaatgactggagcaaagaggttattctttgaatggttttctcagacagggtatgtgaagccattcactacagtaaaataaaaataataataactcatagaactatgagaattcatcagctatggtctgcttagtcctatgattttgaacaaatcaaaacttctttggaccacaattttcctagctgaaaaattaaacatttggatcatttgatttctcatatcccttttagaatatcagtggcctgtttccttggtgcctttcttttctaccttccctccccatgtgtatmtgcccttaaagtagaaagatatgttgacagctattggtgaggaaaatagacaattatgtctcccaactgatattcttctcacagtccaggcaactcctagtagtacaayggaagaaacagctacccagaaggaacagtggtttggcaacagatggcatgagggatatcgccaaacmcccaragaagactcccattcgacaacagggacagctggtaatggatrgtttaacaagtaaatttggatggaaacttccttttgggttaaacggtagacattgaggacattgaacaaaaggacactggaggaattgtcacgagatgttaggttacttaataaattatgctgcagttcacacagagccaaaccttaaaggctcataacaagtcacctgaacaggaatggatacaagccagttatgaataagaacaggaaacacagagaaaatgcccttgaacatgtctctttcacatcgagttttgggcatcatctagtgagattgtagcagaggccctgataaaatatcgctgtctgttgtataaaggaatctactctataatgtgggtccagactttacaatatgattctgcaaagtctggctgtgagaaagcattttgtcagaactccagtgtttgaagaaatagagccagacattatgtgaaaagtgacacctgtctgatgtcatttggccttttggccatgcctgttcagtaatttgtttttgagtataaaaaaggtatcttctctattcttgaattgtgagattgtggaaattggaatccagtcttatcatcatctctaagtgataccagataacttggctttgcaagctcccatgcaggattcttttgtctgtgtgacataagtattaaaatgtgtcctgccttataaagaatgtgaattccatattctcacttggtatcagtgagaaatattcccatatttctatttgcaacatagaagataatgcatcatgtccttctggggcatggcaagttctaaatgaattcctggcagagcaatggattctgtgattgtctatgtggtgtagttgttgctaagaggatgctattgtaatcttttctacctatacttcttcattggctcagaatgaagcaaggcatgtgctgctttcttatatgtcatttatgccataaatcccattgttagaaggtaatgcttctaacggattccattcatgcttttgagataaatggcattgactttcwtattgatcacatggaaagctgttacctgattcctttcctgagatcacttccagcctaatgtgcatttggctggaatatggttgtctcagaataacatcatgcactcgggcttttatacttctgcctttaggggactgtggcagcatggcatgggtcaagaagtacttctccttcatcttcctttgatgtcggtaactcatcctttctgcactgcgggagttgttaatgcttttgkgtcctccagttcacatgctgattgctaagaagaaaatgagcatgagtgaacccaaagctgctgaaacattctgcgtttatgcaacttccttgscctctatacaaggaagatggtttcattgtcttgtctagagaataaagtcttttttaaaaataaaatcggtgtatccctgaccaagcgtccattaacactttgacaattgctcaaactgcatggtcacagcagcctcagctcatamcagccatccaatgcaaggaaggacaacaccaagcccagaggacagttcctggactgatttcttcaacccaatctcacaccccatgggacgaggtcatcaagcaggaagaaggatgggtaatagcctctgagatttttatatattatgttttttgaaatccactgagtgactgctgactatttttctagaaatatgcccttggttttagaccaaactactttcctgaaggacctgaggttcttcaaaaattagttttcttggtaggagtgatactcatattcacctgaatatgaagttctgagctgaaagtaaggaatttagcaggagggttggcaaaagaaaaaacttattgtcaaaatatatctgtgtgaggcagtaagtaatagatatgaaatgaatgttgccaacaataaacgctaaagaaattctgagaacccctccctgcccaccacagcatcacagaaaggtgaattggacttggtttatgaaaaataaaaaaaccctggatagtcagagaaaggaagtgggtggtgggggttggdggggggggcagttttcctaagaaggagactcctgtaaggagaaacgtgaaggaagaaaagccaaggaatgaatatgtcagtgagtggatccatttttcacaagggaagatgtgtttgaatggctaggcaggggccattatgttgagtgactgaagtaccacaggcagacccagcacacatgagtttgcacatggcagctggagctctgaggacacccatgggggaaaaccaagccaggcaaagatcttcagaatcaatattaattctatgtactgatgaagagaaagagattccattaaattaatgaacatgtcaaggacaatacaattggcttcaactacacaatggtatgatgactcttgaaggactctacttataagagggaagatgaacaagagtctagagcccatcatcaagtgggactttttctgggagaatgtccatttgtggttttgattcaggttagcacttgctcttgtttgaaatctgggataacagggtcaccacatttttgtcctacaaagatctttaatattttagtgttgaatatttagtgttgaatcttgaatatttagtgttgaaaggctgcagtgcagacctgggtacccagtattctggtgcttcactgggactgattaaatctcccccagaggcagtgatgtggatagactttgactgaattgacagccagaaatatcgatggggtttatgaattgtttggcctctgtttcactcaagacttcttatttcagcagagtagatctgtgataactgttaaaaacaacatttacaagtatttcagtgaaatttctgcactactcaacattgtacatgttaaattttaaagaccgcttatacttgggtttttgggaagaataattcaatgacgtccactgcttcttatttcttgcccctgtatactttctgtaactccacctaggtggtcttggatgacgattctgtttatttgcatattcactttgtgaagaaaaaaagactaaaggggggaagagggctatttttaaaagtccctttggttggtaagggggaggggataaaatggtgcctgagccagcacactttgtcttttctccatgtgtcagattgcatgtttctataaaaaaggcaatgtttctgtctctctgcaagatttgggtgttccatcatgcactcatgtggagtccttccagactcagcaaaaacaaacacacagcatagctttcatataactcggcccttcaaggaaagccagttacttgttgtggtgctctttgatgaaacaataatctatctcagttcgggagatatagtcagtatgtgctttctttcctcttggccagatgtgaatatttaaaaaaatcagctgtagaccataagccaccttcaggtagtggtttgggaaatcaagcaataacactaatattgattccttcagatatggactccagtcatagtayaacgcttcagcctactgcaaatccaaacacaggtttggtggaasatttggacaggacaggacctctttcaatgacaacgcgtaagaataacgatgctcagccactttattgacttgtattcctgcttcatctcttactcgctattggccaagatgcagagctttggtggtggaatggtgctaygtggcttacttcagcccagagtgtgaaactgtcttcattgtctgtatttcttgtggaggtctctcaacctgattttcccttcatttctttgtgccttccagatttaatgactttgtgttttaagaaaaagtaggactctattcaactccattttcattctctaagtagttatgtcagtgaaacacatgcccacttccaggatagtgatttctctatgttttaactgaccatttcctttcaatgtccatctttcctccagccagtgcagaagaggggtaggattgcttgcatggttgtaaaaagacatttttggggccagataatcctagagatcacatcagttctcagaggagaggcaaggcatgttattgacaatcaacaaaggtggcgggatccctggaacaacaacaacaacaaaacattgctagtatctctttctatcactaagaaatgttcaaattctagtarccttaatttctactctatgwgcagggatgtcctagagatcagcctaaagtcgttcataatttctttgaggaatacaaaagaaatctagaattaagaaggtcccattttactgcttgccacacataatgggcagagtccttcatatgagccctttaggcaaaggaaaaaaatcagcaagcatgtattgatggtcagcaatgtaaatagcacagcgttaagcatcaaaggagatgcaaataagcctatgaatggtccttgccaaagaaggacttatatttccrttttatgtcactgttggcttttgttctgacattgggtttgggatttagtgactgtctttctcctggttgtaatatttattcggtggtgggcatggcttatgggtgtgctttatgaagtttttgcacctgcaactcargtcagtacctttcttaaaagaacacaaaagaaataaacttgaaacagtccaagtgattttagatatgggcaatgggtcaacctccagttgatatatgtcactgagggccctgtgtttgcccaggcaagcgtttccttggtgcagtgatgaaaatcccaatgcacaggtgaaattaaraaataacttaataatggagtaaaatggtaactttaatttaatgaccttyacaaggtagctaagtatttccttgtataaatttgatctgtgttacttgagtaggctattctagataggcttctttttcttttgtggttacaactagactacaggctatcatagtgttcattttccctgccgtcacatttcttgacacacagttaggtgcttttggttactgatargagcattgggattcaaatattcttttttccatgtctctgtgttctctggttttctggagtgactgggagcaatgctgcaattgagcctggacaatccaggataggcaaagttttggctcagtcttcaccttgccactttacctttgatgattatactgagaaataaagggtcttcagaaccaaataggggcaaaatagaattcttctgtatatttctatcaatcagaggagaattgtgtgcacaaaccttggtcttcctatgcacctatccatctgactctactctagctagattttccttgctagcagataacaggatttgtaccgtagcttcaaattaacactggattcattcctcattgaaacagagcagagtaattctcagagcttctctacatcacatgaaggcttggaagaagataaagaccatccaacaacttctactctgacatcaagcagtaaggattataaaacctagttggcytcagctattgataagaatcaatcaattatgggtacttttgcagtgtctttggtggaggtgcatccattagctgccgttacactgttacttttaatcaaaaggtgcgtctggtggtggttctctgatttttctgttttatatacctcttcgtacattaagtgcaaactacatttcttcatcttaaaagttgggtttctttcactctagagttagtgatttgttttaacaataatggattgcttatatatgatttattttatttatttatttttgttaacttgagatctttctaacttttttatgtgggcgtttaaatttagtgctataaatttccctcttactactgccttagctgtgtcccagagattctgatatgttgtatctttgttcttattagtttcaaagaacttcttgatttctgcattaatttcattatttacccagaagtcattcaggagcaggttatttaatttccatgtaattgtatggttttgagtgagtttcttagtcttgatttcaaatttgattgcgctgtggtccaatagactgtttgctatgatttcagttcttttgcagtgtgatttataattggcgtaaatgtctgattatatcactttacattcctcacaataatattgttttgccttttgtcctctggacctccatggtgctgatgactaaaaagcagtcccttctggaaaagaaaagaataattaaattagtagcctcaggcctttgaaaccatgcatttgctattttaattgcaggcagcaaaattttatctttcaatccaatgatatgtttcctccactacatcaaagatgaatccaattgagaaagaactcaagattatctagtacctcagctgacttcaagatcacagttgtagtgacatagccttacctaataacccaagcagatgttgcaacaaatgccaattctgggtattaagatcaccaaaatctcttctgttgagtgatgtccaagtagtgtctattgcaaaatatttattctgttcaatagtatgacaaacttcactctatttctccctatttatggataacaagtggaaagcttttgcagcaattgtgtgttctggagacaagcacatggtgggtggtgatcttacaaatacgrgttcatcactgattccacctccacacagataggaatgatgtcacaggtggaagaagagacccaaatcattctgaaggctcaactactttactggaaggttatacctctcattacccacacacgaaggaaagcaggaccttcatcccagtgacctcagctaagactgggtcctttggagttactgcagttactgttggagattccaactctaatgtcaatcgttccttatcaggtaatttggcatttattatctagtttgctttctctatatagagaaacaatatatagtttcatattacagaggacattttctgtgtagtctgggattggactagtttgtgatatggaaatatctttcattattggttatcaattctagtgcaaataaacttgggtatattttagataaaagaatgcttccttttgccagtgttttttccatttgtctgtgtttgcatgtgtgtgtgtgtgtgtgtgtgtgtgtgtgttgtgtgtacaagttggctgttatgatggaattgctttctttgtcttatcttgtgatatatgaagttgaaccacatgaaactgatatttttgcaggtgaaagtagtcgaattttagcaattccgtttaattcgactaatatactctacttattttgtaaggttttatcctacaggtgaataatttctatatactagtatctttgctctgaaattattatcttgttttggtaatagattgatcagttttacttttggtgatggataaacctcttctagttctgatgcacacttaaaatgttcatgatttaatctagtattaatgaatagggaccacttctcttattgtaatagtgaagagaggaacgaagataatttattcaatgaagtttgacacggacctagaataagtctttttttttctcaaataagtagtcatctctgcttctgcttttctttgcttctccatttgtattaagaaattaacagtgaagaaaggggaaatggaaaacgcccactgtagtgaagaaataaaaaacagattctgtcttcctagtactagtttttcaattgctttgtaacacaatcactaggcatattcaagattagagactttagatacataattttggagcagagatcttctctcctccccccaaaaaagaaaaagaagaattcatatgtgtgcatatatatataatttttttttttgagacggagtttcactcttgttgcccaggctggagtccaatggtgcgatcttggctcacctcaacctccgcctcctgagttcaagcaattctcctgcctcagcctccatgagaatccaatatgtaaaacagatgacggttgtgatgcagggacagaaaattcagaatgccacatgcttggcctcatttctctgggtggcctacccaagagcttcaagaaaaacagtttaagaaaatgctaacttcagcaatattggcaagacaaagccccttacactccttagttctttattcagcattgttctgctctcatttattaaaaattccaagtaccattgtcagtattcttcagaaaatcttatagtgctgtctcatttctcttggcaaaagaaagcctgttgtgcaacccaatgaatttaattttttttttttaaagagtcttgccctgtcacccacactgtagtacagtggcgcgatctcggctcactgcaacctctgcctcccgggttcaagcgattctcttgcctcagcctcctgagtagctgggattacagatgtgtgccaccacgcccggctaatttttttatttttagtagaaatggggtttcaccatgttggccaggctggtctcgaactcctgacctcaagtgatccaccagcctcagcctcccaaagtgctaggattacagacgtgagccaccacgcccagccatgaatttaaagtttaaatggcaattttaatagtcacagkaccctagaatgcttatagcctaatgttagtaaatcaaatgctttttacaagactgatattcacagacactgattctttctgatttccacagtggtacggacagattttccataattctccatggattagacaattaagtcacccaattctcatccttggttttcttcaaaaacactcacccacataaatctcatttatgtctatacatttttctcagtctttacgcttaatgttaagaactaaagcatttgttgaagcaagcggatcacttgaggtcaggagtctgagaccagcctggccaacatggcgaaacctcgtctctactaaaaatacaaaatattagccaggcatggtggcaggtgcctgtagtctcacctactcaggagactaaggcatgaaaatcacttgaacccaggaattggaggttgcagtgagccgagatcgtgccactgcactccagcctgggcgacagaacgaggctccgtcccccaaaaaagaactgaagcatttagaatcatagtggcagtggtggtggtggtgatggtgatggtgatggtgataatgatggtgatgggatggtgacggtcatggtgattttggtagtgggagtattggtgtggcatttcagcaaatgttgttttcatttgttttaaccatcagccaaggaacaaagcaatctgtctcttcaatatagttacacaggtgactaagtgtcacccgcttccaccttctctaatcaaggaaatggtgacgatcaggttactatagattccttataaggtgccttcataatggataactgtagccattttatgtaagcattgtcctgtgattaaaaaaaaaaaaagattccagtatgcttttgaaaaatgtgggtgggggagagagttttaatatgctgcattcaagatttgacctatggatttagattctagcaattcatgaggttgtcttaatctaaagctttctggtgatagatgtttgagaagctaggattatattaactagtcatgttgaaactacagatttaactttaaaaaattattttwaacttactataatacccatattccaatacacattattaatgttagctatcatctcaccatttccttttttacttattttcaattttttttgaaaataagtagttgacctttctctttgaatctttacatcattcaatcccaagattccttattgcatactaatttcctgccgccaagaaatctctgtttcatgccctaagccagagtatgcccatttgcagtgattatgtttctcataatccaattcatattgtccttatttaaaatgtacaatgtctagtctcaacctcatacctgcaaagatatcacaatatttttgttagcatgttccttaccacagttcttggatttctaccaaaacaaagyttctacaaaacttcctgtggtcatccttcttagcctttgctgccccagtttccttaattcttattaaagttctagctcatttatcagtggattaagcratgaacggtaattaacattgtggacccattcaaggctgttttgccatcattttttggaataccttaaaaagactaaactttgtgataggctgtataagaatgcaaaggtaaagaaatgcagatgggagtgtaagtgaaaacatgcagtactgaccttcctgattgctcattacaggagaccaagacacattccaccccagtggggggtcccataccactcatggatctgaatcagatggtgagttcaaaactgctttagtcatttactgttataatcattgagcctaatgatgactaccaacgaagtatgagtcagtgtctccagagaagtggttctcaaaccttcttagcatacatcacaattgcagggagggcttattaaaccacaatgctggaccccacccttaaggttcctgattcagtaggtctggggtggagcccaagcatttgcatttctaatcagttccctggtaatactgacactgctgggacagggattgcactttgagarctactgctctggaggaaagccttgcatctgaaagcctcaggaagaattcaagcagtgtcccaatttaacmttgcactacaccagagtgattaagagcttgagctttgtagcaaaaatggcctgagttcgattccagccctccgcatattaactgagcaagatgctttaaagggtctgagacaacatttctcaactaataaacttggaataataacaattgtcacaggacattgtttcaaagactaaatgatagaatacatgtaaagcatttagcataatcctggcacatgatatcatcactggtatttgttgggaatttactgtgtgccagcagcatctttctaaacactttacatgtattaggttgggccaaatggaactgccattattgtaggtcaagaacaggtcaatatcggccaggcacggtggctcacacctgtaatcccagcactttaggaggccgaggcaggtggatcacgaggtcaggagttcgagaccagcctggccaaccctgtctctactaaaaatacaaaaattagccrggcgtggtcctgcgcacctgtaatcccagctactcaggaggctgaggcaggagaattgctcggacctggcaggcagagtttgcagtgagccaagattgcaccactgcactccagcctgggtgacagagcaagactytgtctcaaaaaaaaccaaaaaacaaaaaacaaaaaaacaggttaatatcagcaaattcatagagtttatctagtatgaactcattcagtcatcctataaactctgtgacataggtaagtactattattatccccatgttacagatgaggaaactaaggctcagagaaggtaagtaacttggcagagttgacaggaccagagagtgatggagccacctttcaagcctggagggccttgtattacttctcatagcacagtctggagaaggcattccataatgaccataattactcccaggcatgaattcttaaatagactcctgtttgttgtgattcagatcacacccctacaaaccttaccccagactgcaaaagtctgacatgaggtaggtttactaattacttctactgctgggctactgggaggttctgccagtgctgccttactgtggtctccctgaacatcataaatccaggtgaccccatgtaaatgatttaagccatatcaattattgtctcccctttttatgcccaagtttgagtgaggctcaccatcagatttaaatgtttacacattgaaaacaaatatgaagatggatatttacatggtggyttccacaataactctctatggaggagcactaggaggtagggattcattagaaatgcttctgaaatagagacagaagtcacaggttcactggggactttaggcagggcacttaacctttcccagactcagtttccttgttagtaaaaaggagatcaaatcatctgcctcagttgcttcctagagttattgtgaggaagacagggtaccagaagtgtgaaagtactctgaaaaagtagggagttattattaaggggcatgatctctaaaaccaagagaccccagccactctctaagtatgattctttaaccatcagagtggacatcacctaggaacttgttggaaatgcagaatccttggccaacccagacctactgaatcaggatctgcattttaactacactctcccacccaggtggtttatatgcacattaaartttggaagcttagactgtgctagactgcttttctcaccattgaagccaattgaacaatctctgtgcatatgtctcagattacatgtcatctcccaacaggaatatcaagtgctcctctytgtggaacttgctactgtggccagtcctaccctggctggatttgtagacatctagggcacaaggcaagacctgctatctcacatccatcttctgtggcttttgcttgaagtgagaatcaagcagacaggagccagtctcttttgtttggcttctgagcaggtgtctattgttcaaacaggaggtttcatcttgctgcacgcacacccagatcttttcttgctgggagcacttcttctttttttttttttttaaatcaaaataaagtgattatgatccgttaatggcctctttttaaatatcaaaggcttctatgagtcagaaaagaaaaaaaaaaaaaagaacagtgagagtgactgtacctcctggggagttttcacggccaaagatcttcagtttaggtggccagtgtcccatgagttgggcaggtgaaaacctgccaaccaccaaggacactggaaggcatgtagggaaagggccttggactgttttggagatttgtaaagtcaaaggccactgtcaacataggataggggatgttgaaacacccagatgtctggtaggaactkgttttgctcccttttaagttttaacaaaagcatcaaattgcataaacaagagccatcctgtccccatataaccattgtaatcaagatttcagtgtgcacagcctaaagtttggctccatgaggaaagctctcatttaagaccccaccattttcatccattgatcagccttcaggattctacagtgggcttccatttggtaggaaaaaaaaagttcattttggtggaacactttcaaattttgttttgaagcaatggaggaagaatttttaaaaattcatgaagctttcattttgatgaggctcttcacaagatgtcttagaagtttcttttttaaaaaaattgkttatttatttattatttttatttttaacagggacaggatctccctatgtttcccaggctggtctcaaagtcctggrctcaagagatcctcctgtctcagcctcccaaagtgctgggattacaggtgtgagccaccatgcccggcttcttagaagtttcttttagaaccattgtgtctccctcatttcgataggcctccagttctgacttgaggattgtctgtcttgcgatacttcctcccagtttaaggcattttgttcatctccttattttgctttttagcagtagaaaatgttgattcttctaacaaggtgtgtttcagtaatatattagcagggactctaatagggtgatttttcatagtcagaaagggccactgccgctaaactccttatttatttattgtgaggtggagtctygctctgttgccaagctgtaatgcagaggcacaatctcagctcactgcaacctctgcttcctgggttcaagcaattctcctgcctcagcctcccgagtagctgggactacaggcacatgccactatgcctggctaatttttgtatttttagtagagacggggtttcaccmtgttgactaggttgatctcaatctcttgaccttgtgatccgcctgcttcagcctcccaaagtactgggattacaggcgtgagcaaactccttattttatagtgtttatgttggctcctatgatgctattggatgagattttcaggttccctttgggctttctggagcgtgtgagtcccctgggggtcttgttaaaatgaagattctgatttggtagctttgagatgaggcataagattctgcatttctagcgatctccccaggtatgcctgtcctgatggtctgagagccacactttgagtagcaaggtcytaaattaaaaatagaaaataacaaccacacacaactaccaataccgtgtatttcttcaaatctctgcaaaattatgatgaacagcattctgttatccccatcttacgagtgtgaaaagggagacttggagaaggtagattgacccagcacacatggctagttagcaagggacagcggtgagacttaaatccagggttgtccagctctagacaccaaagtcytgaacactgtgcaacactgctgctgagaattctcatgttccttgacacaaaataacattactaagccttagccttaatcaaatgaggtgggggggaaatcttttgtgtaatgctttataaacatctgcagcttgaatccataaatggcttctcagtgattcagaatgtggagagctgcccwttatgcagctccacaaggaactcatggttacacatttcaaactttggttgagagatgttgtttttccccttaggacactcacatgggagtcaagaaggtggagcaaacacaacctctggtcctataaggacaccccaaattccaggtgagtttcaaactttgaggcagaaaaacacactgaaagcagctttctcagaatgtcccagcaaggacgaagagactcatttgaaagcacattctccacaatgcccaacatatgaatccaattgctcctctttacaagttaaaggatgaatgagaatactacaccctcttggtaggaaaagatggaatagtcttttcttcctgggttctgcamactagctgagctcatactcagatctgtccctggcctgtcccagagaagtgccatgttagttactaaagcttccttcctaaaygaatgatcaccaagaggaccccatgtcatacctaggtcctttctatcccaatccaatttccacttatttctggggtccaaggtgaagcatgtaattttccttttacgattacagacagggaggagctacaagaggcatttatgttagatggagtgaaaactttcttttggttccccaactaatttttttttggtcgagggaccgcctgctgatgtggacagaataaacttttcagaaagtatgcatgtgcagtgargaggctgggacacctggttctcctgagcatcaagacaaggcatttgttgcaaattctttatttgacttggaattaaaattgatttgtcatagagaattactaaagggaagggttctcctaaggttgtaaattacccttttaattctctcctsttcagaggtctccagactgagcctctcttggggaaagagaagaatgtggcatgcaccgttctcctttgccccagcttgcctaagcacacctgaagacagaccagacagagacaggggtgggctgtcccaagggagagcacaggggaagccttagctgtcatcaggcagcaagattcttcccagctccagtgacagtgcaggtgggatatctcagggctggaaaccagggccacagtgggcaggagtagaaaggaagaacagaaatcgggccctcctstcagtcycccccacttctgactctacctccctctccaaactcatctaaaccaggaaaaggtgaggcaaaggtagygctgagcaggaaatcagagataaaccaaaatttccaagaagaaaacagataatgagactttccatgcctcttctttctcaagccctggttcattgcacacatatacaacccactttgcaactgaatttagtggagttgtcaagtcatattttagtcctaaaagagcctgatttcaaaatgtgtagaatattaatccacaagtgatatataattattgaaaacatttgaaaaaatacaactaaataaaataatggaaatataaatcaattattatcaatctcaccatccagaaatamcatggttaccattttaatatacgkcttttttttttttttttttttgagatggagttttgctttgttgcccaggctggagtgcagtggcrcgacctcggcccactgcaacctctgcttcctgagttcaagcgattctyctgcctcagcctcctgagtagctgagattacagcatgccaccatgcccagctaatttttgtagttttagagatgggrtttcaccatgttggtcaggctggtctcaaactcctgacctcrtgattcacccacttcagcctcctaaagtgctgggattacaggcgtgagccaccgcacccggcctttcctgtcattttaaaatgtaaaatatataccaaaatgtgattacaccttacayggtgtttagcaaacattgcctactggttaaccatggcttccatgtcattgaatatttcctcctcatattgtagtgcgtaatgcaatagatgtaccctaatttatttaaccaatcctttattgcctccatttttgttttttaatacaatgtaaggtggataggtggatgctcttatacaggaaaaaaatgttcctttcaaaagaagcctacatttccttttatatgtttaataatattataccaaagrcatctacaagattcaacaagtcatcctgtccttttttagaaacatagttctcctgaagggacttgaaaatcctgactgatgataaaagattaaagcaagaaggctgttggacaaataccttcagcaaattgctcttccagaattacctgcctattggctggacctattggccagacccccctgcagcgctgactgtggtgcttgtttcaactaggtcaattataaagtgcatttttgtttttacaaagtgtgtctctgaagctcacgcatgtcatttaatttactcataccagaatggctgatcatcttggcatccctcttggccttggctttgattcttgcagtttgcattgcagtcaacagtcgaagaaggtaaggggctgtcctgggggctttcaacttggaaagggcatcatttaaacctgggctttatatccttgctgctcagagcgtagtccctggaaccagcagcctgggtaccctgggagtttgttggaaatgcacaatctcagacccaaccccagaystcctatggcagagtctgcatcttaacaagtttccagggattcatgtgcatggtgcagcttaagacatctttctctgccccggtttttagagacaggagacacctgtgattgtttggctcatcacttttaggtagtggttgaatcctttgtgattttacatgttttttagggttaaacctcatgcagactctgtctgatgaaagttatgaagtatctcaccaggaaggcacacaaaagtatatactcattcattgatttgttaaatatttattaaatacattcacaatgcacaaatatcgtataaagattcagtgattcatcatcccctgtagcctctctgaggcccagggaacctttaagaacttttaccagaaggaagtattggccttgtgcttttgtttgtcgtttgtttttttattggccttgtgcttttgtttgttgtttggtttttgtaatgatatcattttctattttctgggaactgtagttgaagagattcaggttatagcataagaagagcactgtttcatcgtcttcttgctgttaggaggtctatgaagcagagaagaactttcctttggaaaacaactaaatgaagacagtcacctcsctagaactgacacrtgggctgtttttatattcttgaaggccactctctccctacctgaaccaagacctataggtttacatgttatttacattttatatataatatatatatatatatatacacatacattatatatacacaatagtaattctagcaacagaggaaatgacctttaacaggggtataaatctaaatttataaaagtataaatctaaatttcttacccaagacactttaaagatacattatttttctccaggacgtaattcataggaatattaagccttttgtaaatgtccctttagatggtttctcataaggtaaaagaaacttatttccaagcaggaccacctttattgtgtccccagatcacctcacagggcagaaaaatgcccctcagtctgggagaagayctagagagaattatggactccttactggtttttggaaagcaaccaacagctaattccaacaccatgggcagcccatacagtctctaattatctgagaaaatcaaatgatgctgttayaataattacgctggtacaagttaataaaagtgccatgttacagtcaaacagctatgttgctatctatamcattgagggcatagttttaaaaagtagttatgctacctgattgtataaggaacaaaactgagagaaaaaatctaaaaggccgcctatgattgaatggaaagattttttttagttgaatttaaataatgtgacttgggggagcctttacaaagagtctttatacctcccttcagcttcctcattttcccttggattacttttgctcaattaaatatgaatttcctattgtgtgcaatcagccctytattgccaagccctagaatgcaccacttttgctcacatacacagtccataagctttgcacatgtcaccatagaaacgctggcatggatgctgtcgacatttagggagacctcggagaagcatctcagctgtccctaagagcagctggagtccatacattggggctgggtatctcccccatcgtctgtgtcttgtcagcagcagacagcagagaaggggcctcattgctgccctctccctcctcccaagaccagcagtcaccctggcaaccggcaaacagggacacacagggtccggcacagcgagtatctcaccaggaaagtagctgcttggatgccataaattactatgtcctgatttgataattgaaaacagatttgccacgcagctaaaaggtggtkaacagctgtacgggccccttaatgggctctgtgattctaaagctgtcaacccatttctaatccccttcaaaggctgaggcttttctgctttgagtgtcacatttaagagaaagagatacagaatcctattttcatcagagaaagtttggttgaaaatggrgcctccaataggtgttcatttattcagcaaacatcttttgagtggctcctgtgactaccagccctggcaaggagaaagagaaggtaaaaaacaaaaagastaccaccccttttctaaaagaatcttgaggtttagtggcagtattggcctcttgaatttgaattggctaatatttattgagaacattccctgtgccagacactgttatataaattatggttaaaagacaaaagtggaaaatcattagtctctgaagttgacatacaaggatgggtcatgggcttgcatgatgaagtgatctgtgagtcacgttgtcttaaagatgctgggttgggrgttctattacttctttaggtttttccacccctgccatcatccaaaacagctttctttgctgttcctcatgtcacctgactccttgagttacagctctccaagagaaatcatattttattccctyttcatgagagcacataattattttaggagtcagttgggttgatagatactgcgtgaggctccagagaagattttcctttaaagaatctatctgggccaggtgcagtggctcactccatgtgcagtggctcactttgggaggccgaggcagtggattagttgakcctaggagttcaagaccagcctgggcaacatggcgaaaccccatctctacaaaaaacacaaaaattagccgggcatagtggcgcatgcctgtggtctcagctgctcgggaggttgaggtagaagaatcgcttgagccccgggaggtggaggcagcagtgagccatgatagtgccactacagcctgggcaacagagtgagaccctgtctcaaacaaacaagcaaacaaacaaacaaacaaaaacctatcttatttgtctaaagaggagaaaaaaacatgagaactttactatgttgcttgtacataaaagctgttcatcagccttcactttaatgggaataatcgtcttttctataaaccccagcaggcagtcacccacactccaatcagtaggtcttctctacgcatcgccataatttagaaatattttccttctcttatgctacagtctagctcctgcaatctgagctcacccaacctcgtcctgctgtctagaacagtgctatgcaatagaactttctgtgatgatggaaatattctatacctccactgtccaatatataactactagccacaactgagcacttgaactatggctagttcaactgaggaagtgaatttttaatttcatttcattgtaattagtttaaattcaaatagccaaatgtggctggtggctaccatattggatggcacagctctaaaacagtgcaaaataaatccctaaatatcgttaaggattgtcaggtagaagagtcatgagatcagttgccaasttacccacctaaatcttytragataaattctgccatgccataaaagtatgttacctggcttctaaaccccagccagcctgccctctctttcctggtgaggtctcagtctgcctccttccacactgtgtgattgctgtgtgctcagctaatgcctgagatttaagggaagaggagataaaggtaagacacagatccatgaggatctctgatcttcagagtcagaagatccaagctgtggctgggcgcgggggytcacacctgtaatcccagcactttgggaggctgaggcaggcagatcatttgaggtcaggagtttgagaccagcgtggccaacatggagaaaccctacctctactaaaaacacaaaaattagccaggtgtggtggcgggtgcctgtaatcccagctacttggktggctgaggcaggagaatttcttgaacccaggaggcagaggttgcagtgagccgagatagtgccattgcaccccagcctggttgatgaagtgagactttgtaaaaaacaaaacaaaacaaacaaacaaacaaacaaacaaaaacagaaaatccaagctgtgattcttgcagtgcagtgccataacaagctgtgaaactttggacaatacttcttggacttggtgtccagtttacataatgaagaagctgggctagatgatctctgaagccccttaaggtctagtgctccttcttaaattcttataactaggaataacttaaaaattagaatttgtctcttaaaagcacttattagaygcctagagcactgaatattggaatgagttatttatgagaatcatcctaccctcctgaaactactcagacagatagaaacacataaatccaaagggaaatgcaggccaaccaaaaaccaagcacaatattcctgtgtcctataggtcaaatgttatccactgtcaagatcagcttcgtttagattaacaacattaatccccacccactcccatgcacagacatattttttatgctcataaatcactttcccacaatatttcattccatccctcaaccacccattggttagggaaatgggaattactttaactagacaactttcctccaaagaacacaggggccagggaattggaagtaacacaagcagtattctaccttgagccttttaaatcctcttcatagtaaataataacgaggtaggtggaggcagccaggagaaacaagcaaaattcatttcatatggcttttgttatattaacaattatagatagcacttgaaagcttactgtgctccagatactgttctaagtgttaacccaaaccttagtttccttaccccgcataagagcaagaataacaattatttccttacccctcataagagcaagaataataacaatagactcatttatttagtgacagtctctgtttcaagggcttttcacaatcctatgatattgctactcttagtaacctggtattattgatgcaaaactgaggctcagagaggttaagtgagttgccccaggtcacatagcagtaagttctcaaaaccaggccttccgagccccttttcttctttcttttttccttttttttttttttttttttttgagacggagtcttactgtgtcacccaggctggagtgcggtgrtgcaatctcagcttactgcaacctccacctcccaggttcaagcaattctcctgcttcagtctcctgagtagttgggattcagccacgcaccaccatgcccccatgaccggctaatttttgtatttttggtagagatggggtttcaccatgttggccagctggtctcgaactcctgacctcaagtgatccttctgcctcagcctcccaagtgttgggattacaggcatgagccattgtgcctggtctctttttcttttttgaaacagggtctcactctgtcacccaggctggaatgcagtggcacaaacacagctcactgcagcctcgacttcctgggctcaagtaattctcccacctcagcccccaaagtaactaagactacaggcacatgccaccacagccggcttatctttgtattttgaatacagactgggttttaccatgttgcccaggctggtcacaatctcctgggctcaagtgatccacccgccttggcctcccaaagtgctgggattacaggagtgaaccactgcacctggcctccaaggcccttttcttgaccatgcatcctgctggactccatctgtattcctggtccccatgaatctgtttcacagttcaagcatccttcccccaacccctcatcaagccttatgctagaggagacaggatctacctcctgttgaggaggtataatttttatttccccaaacaagagcttaaagtttatggccttggcagtcctacagggaatggtccatgatcatgaataatagaggctttgtcactattactccaaatatccagaggcaaagtgaacaattctgacttcatactgtttccaaatctccagagggctggcagcattgacagagccaggcagagcccaggctttggtcataaaggcctggatttgaatattggctctgtcattcttactttctgtgtgacctcgagcaagttattaaacctcttttggcctcagtttccattgctgtattatgggaacaatagctgctttgaaagagtgttgtaagaattacagaaaattacatgtaaaatgtctggtattcaggaggtaatctgcttccctgaatccccatcttgcttgtagttgtgaagctatgcaactttccttcctctaagcatagtctgactcgtatatgtgtagtagtgatrtgttacaggaaagaggaagcattgcattaggctgggtggggtgaagcaatggacagtaaccagggaaaagatcaaggtcgtactcttccatagcaactttcttttgcgtttgggtcttaagtaatgtttgagaaaccttaaattaacragaataatttgtcttatgttattaaacttcctatatcagggttgtatgagttagccaatgttaggaaaacatcactatggccttatacctctagaaaaatgttgttttattcttctcgatacattcagtaataatgctgacaaggccgacaaagtgttgactgggagaggaagttatgggactttctggaatatacaaatcagaatgatttacaatcatcatgttgatggtttatctaaatctgcagaaactgctaaaatgcttaaaagaggcaaacatttccattgtgaagtaagatagaaagagaatcagaacttgagagtcagacagaccagggtttgaatcctctttcttacttgctgagttacttgggggaagttactgaattttctgatccccaaggtttcttcacttggaatatagagaatataataataacaccggcttcctggagtcttagttgctggtttgcaaacttgactgtgcagagaagcccctgaggggttgcaaatttgactgtgcagagaagccacagatcctgggctccaactctagagttttctgattcagcaggtttggggtggggctgagaatttgtatttctaacaggttccaagatgatgcttttgctgctggtccagggacctcactttgaggagtgctggttgttatgagtctggttgttaagtgctggttgttwgttgttaaagtagagaaaacccctagcacagtgcttggcacacactaaagccatcataaaccatagtgatcatcaatgatggtgctcagtaaggatgatgatctgatgcctgagtcactgcaatctttctgatatggtacattttttaaattattaggtgtgggcagaagaaaaagctagtgatcaacagtggcaatggagctgtggaggacagaaagccaagtggactcaacggagaggccagcaagtctcaggaaatggtgcatttggtgaacaaggagtcgtcagaaactccagaccagtttatgacagctgatgagacaaggaacctgcagaatgtggacatgaagattggggtgtaacacctacaccattatcttggaaagaaacaaccgttggaaacataaccattacagggagctgggacacttaacagatgcaatgtgctactgattgtttcattgcgaatcttttttagcataaaattttctactyttttygttttttgtgttttgttctttaaagtcaggtccaatttgtaaaaacagcattgctttctgaaattagggcccaattaataatcagcaagaatttgatcgttccagttcccacttggaggcctttcatccctcgggtgtgctatggatggcttctaacaaaaactacacatatgtattcctgatcgccaacctttcccccaccagctaaggacatttcccagggttaatagggcctggtccctgggaggaaatttgaatgggtccattttgcccttccatagcctaatccctgggcattgytttccactgaggttgggggttggggtgtactagttacayatcttcaacagaccccctctagaaatttttcagatgcttctgggagacacccaaagggtgaagctatttatctgtagtaaactatttatctgtgtttttgaaatattaaaccctggatcagtcctttgatcagtataattttttaaagttactttgtcagaggcacaaaagggtttaaactgattcataataaatatctgtacttcttcgatcttcaccttttgtgctgtgattcttcagtttctaaaccagcactgtctgggtccctacaatgtatcaggaagagctgagaatggtaaggagactcttctaagtcttcatctcagagaccctgagttcccactcagacccactcagccaaatctcatggaagaccaaggagggcagcactgtttttgttttttgttttttgttttttttttttgacactgtccaaaggttttccatcctgtcctggaatcagagttggaagctgaggagcttcagcctcttttatggtttaatggccacctgttctctcctgtgaaaggctttgcaaagtcacattaagtttgcatgacctgttatccctggggccctatttcatagaggctggccctattagtgatttccaaaaacaatatggaagtgccttttgatgtcttacaataagagaagaagccaatggaaatgaaagagattggcaaaggggaaggatgatgccatgtagatcctgtttgacatttttatggctgtatttgtaaacttaaacacaccagtgtctgttcttgatgcagttgctatttaggatgagttaagtgcctggggagtccctcaaaaggttaaagggattcccatcattggaatcttatcaccagataggcaagtttatgaccaaacaagagagtactggctttatcctctaacctcatattttctcccacttggcaagtcctttgtggcatttattcatcagtcagggtgtccgattggtcctagaacttccaaaggctgcttgtcatagaagccattgcatctataaagcaacggctcctgttaaatggtatctcctttctgaggctcctactaaaagtcatttgttacctaaacttatgtgcttaacaggcaatgcttctcagaccacaaagcagaaagaagaagaaaagctcctgactaaatcagggctgggcttagacagagttgatctrtagaatatctttaaaggagagatgtcaactttctgcactattcccagcctctgctcctccctgtctaccctctcccctccctctctccctccacttcaccccacaatcttgaaaaacttcctttctcttctgtgaacatcattggccagatccattttcagtggtctggatttctttttattttcttttcaacttgaaagaaactggacattaggccactatgtgttgttactgccactagtgttcaagtgcctcttgttttcccagagatttcctgggtctgccagaggcccagacaggctcactcaagctctttaactgaaaagcaacaagccactccaggacaaggttcaaaatggttacaacagcctctacctgtcgccccagggagaaaggggtagtgatacaagtctcatagccagagatggttttccactccttctagatattcccaaaaagaggctgagacaggaggttattttcaattttattttggaattaaatacttttttccctttattactgttgtagtccctcacttggatatacctctgttttcacgatagaaataagggaggtctagagcttytattccttggccattgtcaacggagagctggccaagtcttcacaaacccttgcaacattgcctgaagtttatggaataagatgtattctcactcccttgatctcaagggcgtaactctggaagcacagcttgactacaygtcatttttaccaatgattttcaggtgacctgggctaagtcatttaaactgggtctttataaaagtaaaaggccaacatttaattattttgcaaagcaacctaagagctaaagatgtaatttttcttgcaattgtaaatcttttgtgtctcctgaagacttcccttaaaattagctctgagtgaaaaatcaaaagagacaaaagacatcttcgaatccatatttcaagcctggtagaattggcttttctagcagaacctttccaaaagttttatattgagattcataacaacaccaagaattgattttgtagccaacattcattcaatactgttatatcagaggagtaggagagaggaaacatttgacttatctggaaaagcaaaatgtacttaagaataagaataacatggtccattcacctttatgttatagatatgtctttgtgtaaatcatttgttttgagttttcaaagaatagcccattgttcattcttgtgctgtacaatgaccactgttattgttactttgacttttcagagcacacccttcctctggtttttgtatatttattgatggatcaataataatgaggaaagcatgatatgtatattgctgagttgaaagcacttattggaaaatattaaaaggctaacattaaaagactaaaggaaacagactcagaagtctctaatttaaaagaaygggaggctgagagggacagaactatgcttatctggcaccgtctgggtaatttagaggaacaaagtcaaaggtatctgaggtggctgaagcctcacactcattttatttttwaaaaaagcaaaaacaaaatgggtttccatcaacttgaaagtcttcttttggagaaaatctggttttctatgagtgatgtgtggttcacatgtttcaaactaagtgagatacagtgaagtgttagttcttttaaagccaagaactactcctggacttccagttaaagagaggagagtgtacataccttcattccctcatgtaagcctctaaaaagaaaataaagagatatttccagayggaatcaaccagtggagttaaagagattggaagaagagacaagagcaacaaaaacttgaagctgaaaagtgatagctgattggtaactgaatgaacaagtctggaaaagctgactcctaagcctgcagtgtggaaaattgagaaacaaccagacttatgtgacagaaccatcaaaaggctcaatagctattctggaaatgaatgggaagatgaggctaagattagggggacaagcttaaagtctatgtaagaagcagttagaactccaggtccccttccttactctgtgtaactgaacaccgtcctttcccaatctcagcaaaagaccagaagtttattttctggagacagggaaatagagagtctctggttgaagtccaacagcacgtacacagttgacattagaaataccacactgagagccgggcatggtgatgcatgcctgtaatcctagcactttgggaggttgaggagggcggattgcttgagctcaggagcttagagaatagcctgggcaacatggcaaacccttgtctctataaaaartataaaaattagccaggtatggtggtgtgtacctgtggtcccagctactcgggaggctgagttgggaggatcatgtttgagcctgggaggtcaaagctgcagtgagttgagattgctccactgcgcagcagcctgggtgaagagtgagaccctgaaaaagaaaagaaagataagaaaagaaaagaaacaagaaaagaaaagaaacaaaaaaagaaaagaaaggycatactgaaaaagtgaaaccatgcttaaagagtgttgagattccctatcctcctctcccagcttggctctcagaatgctgggagctaggcatatgttctccaggcagaagctcagtgttgctggggaatcttatgagcctgagagaaaattctaaaaatattaacatggtagttccccaaggaaatggcccaaaaaaagcgatctgcaatgaagatggcatctcaagccccaccaggcacccagaaagctcagtcagctttctgtagcttactctcacacatgagctgttaccaaggagcaccagacatttggagaaagcatctaatattaaagtcagggactacaaaaaacaggaaaaagtaccttgacagaaaagaaactgcttagagaaggaaactttttctaataaaggtcaccaatactctcagtaagataagaggagatggtatatctataaaacaaaaacacaatgccaggataaaaaggaacatatagagaacacctaaaaaagaagctttaaaaatgtaaacttgagagcacaaatttaaaaataaacctcacagaaggtttgcaagataaagttaaagaaataccctcagaaatacagcaaaagcaaataaatggaaacagggggraatacattgggaagactggcacccagtccaggaaatttaacatgcaaatgctgtaatcaaagtcacaggaagagaaaacaaataggaagaamtcatccaagaaaaaaatcaagaaaacttcccagaactttaaaacatgaatatcttgactaaggacaaggtgagtacttagtaaaatgaataaaaacagacccacactaatgcatattatcttaaaaattcatgacacctggggcaaagaaatgatcctatgaacatctagaaaggaaaaatacatacatggaggatcaacaatcagaatagaatcagatttctcartggccacattggaagatagaagaccatgaaacagggcctcaaaatactgaaagaattatttccaagctagaattctaacttagttaagctgcaaattaagtataaggatggaataaagagattttaggtaatcatagtctccaaacctgctcacccattcacaggcaactcccaaaggatgtactccatcaaaacaagggagttaccaagagaggagaggacatgagtttcagaaaacaaagtagagggagttcttaaaatgatgataaagggagatcccaagatgacagctgtacagcaggtctagagaacacttaaagttggagtactgactaataattaaaacaatcaatgttttgcttttattgacctctaattaaaaagaaaattattttttgttgtattcattaactactgatgcattaaaaactgttccaaaattagtcgcttaaaataacaagcatgtatttatttcttatgcatccaccagttaactgagtacttctgctgatcttggcagggctcacttgagcatgacgggactcatgcatttgtgtgtgtgattaacaaacaggtcagctagaagctgtctgatttcggacagcttcatctgggatgattggggtctttttccatctgactcttmcatgcctccagctggctggtccaggcctgacagggttccaagtaagagcacatgctcacaggtcctcttgaggcctaggctcagaactggtgctctgtcattccaccatattctattgaccaatcaagttacgagagcagcccagattttaaaagaagggaaatagattctatctcctaatgggagaagctgcaaagtcacactgcaaaaaatatggttacaaaaaagccaattatcagggccaktagtgtgatcaagatctacgatagacatgttgaaagattcttgtgctcaagggcacctctcatgtttatgcttaaaatacactcaccatttgagccatattggcaatggcattaacttagaaaaccatgaacaactttataaaccccatgcttattggaaaaggaaggagcaaagtcatgtgtaaatgtgtttgggagattgcttggtatggtagaaacagyrtgagctttgggatcagacaaattttgggttttaatactgattctaccacttacttaactgtgaaactctgttcacacatcttaaatattttgagtcagtaaagagacagtaaaaccttcatagggtggctatgaggattaaatttaacaagtacrtgtcagtgctggggtatattaggtcctcaaaaatattaattcctacctgccatcacccacatatgcacagtaggtacttaacttcttccttcaccatttcctccaatgttctgaactctaaccaacttttaagtgtgaattgctattaacttacagtggctggagacagattatttcagaatctgaagctccccatgaagaaagcccttcaattttagttgaaaggtttttgctttcaaagcaaggctaacaagcagggagtccaggaagcwaataactggcattcgttgattaaatcttggccatctaggttgtggctgtaggttaaccaaagttgggcatccacccaaggctttgatcgtcacctccaggaagttgtcttgccccacccctatccaggatgagctcattttcccctctgtgggtataactcttaccttgtccatatgtcattgtagttcttactttgcaatttcattaatccgcccatgaacctgtctgttctactatatgatgaggtgtgagggtacggagaaattcattatggtcccccaaaccaggtaagtagaaagtggtagaaccagggatasagctcagctctctccaaagtctctggcttaacatgcctgaattgtctattgtcagaagtttggtaaactgaatttgctgaagttaagacatcatctccaaatgttgcaaaccaggtcagtattccagagctccctgtgcctggtggagccaaaggaggctttcagaaaccactgaaaagatttggggatgagtacactcaccatttagaccacattggcaatggaattaatttaggaaaccataaacaacttcatagatgctgtgcttattggaaagggaagaatcagtcatgtgtaaatgtgatttttgctgtgatgcccggggcaaaggctcagtggagaagaaagtctggctgggcatcctggcctcaagccccatttcttgcctgtgttgacacctggtcttgaacaccagtagtttgcytgtcagggccgcccataacccggctcctcaatcctgccccattaggcttccagactgctgatctcattacgtggtgactactgttttccagaagtcttgtctaaaccacttcctccttcctctctcccgaaagaggaataataaacctcagaagaggaggctaaggtttagcttttaaaaggtgatatttaaaacaagactctcagttcaaattcaacctctgccatttacttatgtataaccttacacgaattattgaacagttctgtgcctcggtttcctcatcggtaaagcaggaataataatctctaccggaaagaatgctggggggttaaatgagataatatctgtaaaatgatggaatatagtagacgcatataggtttccttccctcatttctgctatcttmatcacttttgtgtgaatacacagtaggggtctagaaagaatatgaaccatgatttgggagaagtcagaggtgttccaaaaatttctgaacctctcccaaacccttttaagcactggggtctgaaaagcctaccctctcccaccctaagatttccaaatagtatcaaaaagaagaagagattcccactcctgttttctggggaagggtggaatatgcaggtttattattgccaacatctataacacaaaggctctgccagagccaaccttcaaggtgacccctagatagggagagagaagaaatgagattgaaatttcaagggcctagctctggagattctgaagatccttgaccttgggaactcacccatgcagaagtggagagacaggttttcaataataaaggctaagggcttcaaatttcagcttgggttactagagttcagtgagagmtttactttttattttcgcctcttctaggattctttaaatctcattaagaaatgaagagagaaatgtgaagaaaagctgtcagaggggtaaactgtcagagggatgcaaagaagagtaagatttcaaacaattgttctgaaagaaarttagtagctatttaataaggactgtctatgcatatagcagatatttaaatcataataagtataaagtaamctcaaaagcgtctcaataaggacagcatctctcttccaaacctcaatgggttttgctggctgcacttccagggcaagttgtcttggccacactttacttctcttccactctctcaatccctttcactgggcttggaggcacagcaactcagaactacaaagtctggtctgggcagcagagtcattggctgcgctgtactctccctcagggcagtggcaagctgggacctctctcaataggcaagggacctccgactccctgttttagatcacttcccccttggacaaaatttagacctttgtgtaaaagctgactgagaaaagtgcaatgtgttcatctgtcaagccaaggatgagagtaatgaaaattttcccatcaagkttcacgtcctttgcagaaacttcgttttcaaccatcttgttggccttctctgscctgttgataatgcgccccctagtggatgctttacaacatcccctttgtcttcgtagaaactgagtccttccgcctgacttcagttctcgaatcctcaacgtaaaaccagaaaga

SEQ ID NO: 9909 - DNA, 19274 bp, Homo sapiens
acccagctgatgggagaggggagggtgcccacaggcagggacgggcaggaggactgtccagcgtgcccgggcagattgcaccaccactccaaggacgtgctgggaagtccgatggcatcagcctgcccaaggccagctctgacatgacagcgggaggcacacggggacacacagcacatcacagctgctgaggggctgaggcctttgagattcccgaggaagaacagggagtggggaactgattaaagtaaaatgaaaaacaacaaatgggtctttgccctcccctgtgaaaaccctcccagcaccttgtctggctccccccagcccctagcccaggcctcgcgccccattgctgcccactcctggccaggcctgacctcctgtgtcccgggctggaagacccttcccctgactgcactggcggctgcctttggcttccccttcagcttcgccccccagcgaattccccactcagccttgcagtgcccgccacggcccctcctgccgttggaaggacttgactcgggtattaaaaacataatcagcagtcagaggccacagtctacacgytccccgagcaatcacccgctgaaacgcaagccgtcttcatgtccccacaccctggctccagtcaccagcaaaatgcagcaaggtggcctctggacgtccctgtgagcatgacccagagaaaaggagccaaccggcggtccccaagttagccggcaagctctgcagccctgacgagaatgcggaggggtgactgccagtgaggggacagaggggacagactgccgcacttgctccctctgctttctgggccacatggtgactgcagccaggcggcatctcccacttggctggaagtctcccaccgcggtcggccctttctgcctgtgggatggtgcaagttgagaggtttcctaacttggtctcacttcattggacacaggcaagatgatggggtccacacagacactgtcttgcttgtgagagctttgcctggggactctgcagtgctgtgcggggtgggatgcacaccctctctgggcccgtggagtcctggggacatgcagctgtgtgagccgtgggtatgaaagggccccttcctctaggctggccccgggccacagctactgcagggcagtccagccccactctggcctcggctgstgtggcggtacacaggctctgacctgcatcagggtgccccagggcaccattcccagggcatcaggaaccctgtcatcctcccccatggccaggtgccgcccccctcaacttggagtgagtgcctttccaagggagggtggacaggcagtgccaggtgccactgatctgtcctcccaagggaaggcgggggccctggcgggcagcatcagcagggaggggcrggcagctcaggcctggcacggcaagcgaccaggcgtgttctcctacccaggggtctaggctgagggtcctggggctttggcgggtccccctggagtctccaggctctgacatcggagggttggagtcagaggagctgagacagagcccagcggagcagatctcgggattttctggtccttgaaactggaaaaggccacagcatgtagaagccactgcggggcagcaggaggggtgtagtctccctggggccggggctgctcggcctcaggctgggccactgggctcagggcttggagggcacatctgaagggtgctgaggagtgagagatctgcggtccctctgacccactgggggacgtgaggccggggaccgcacaccctggacctcagtttcctcctgtggaatggggacagtgacagcaatgctcccttcctgggactgctgcaggcttccgtgagacaacatgtcaccaaaccgcagatccccctgcaaggttcggtgcctggtgtgtggctgctggagggagttcatgggacagtggggaccctgagaacggccctcaactcagtcgtcacaggccccttatggctctatgaatctgaactacggacaacacgttttaggacagaaaagggggatgtgagctgctggcacagggcccctgcccggatgaggacagactcaggcaagcactgctcgtcttccagcctgggtgtggctcccagcacccggcctstcatggtctcctgggtattcccagctccttagcaggaccagtgaggtgagcccagacccggcctcggacatgttttcatctccttccatgccaccttgtgcctctggggactcacagaattgccccgagaggactgagcccctcacagggaagggcccctgcgggctcttgttcccgctccttgcacccagcatagggcctggaagaggaggtgaaataccatttggtaattcgggaagtacagccctctgcccttccttcctgtgtgggaccttgctccaggcagatgagtaatccaaggtccaacctttgcgtccaattcagcatgctaggaacttgaagttgttaattcatcctaacatcaagtaaaaaggaaaaaacttcccaaaatcagcaactcttcttagattcccaggagaagtgagaccacacagcaaactgccacccccaagactggagagtcagacaggtgaaaatggagaattgccactcaccaagggcaggcttcttgagggctagtgacaagaaaaaaaatccagagcaatcccagaagagcttctggggctcagtgtgcacaagcgtaagagctaaggtcagtcaggaacccgggcactcacttatgtgagtttcacctccagaagctctacgaggtgctcaccgcaaatatcagaaaagctcgtctatgtcaggcagcaagagaaaaagaatggtcattatgaaatacaccagagcattctgttctttaaaaggccagcctttcagagagactgtcttgccagagcctaagctgctgggttttatcagagctgaactatctgggaaagaagagagacatccaaccccagtccgtgtagmgtgccacatgtgagaagagccacacacagccccagcccttactgctcaacctgtctatttatgtcaaggaaacactgagaagcccttgtaatgttcacrggttggggacacaggctcactgaaagactcagacctactcacaggaccacaacacactcccctctccgcacaccttacctctgcatcatcaaaggcacctatttgcagcagtttcttttatgcagtatattatgtctggggcttaataaaaaatgatacggcatactaaaaggcaaaagccaaggtttgaagtgatggagtaaatactacaaggaggctcagatatggcagggacctggaatgatcaactgggaattttaaacaacagtgattaatacgctaaggaccctcatggaaaagtagacaacacgcaagaccagatggggaatgtggacatccagatgaaaattcaaggatgggtgaaaaaagaaattctggagatcaaaaacactgtgacagaaacaaagcgtgccttagataggcttattagtggaccgaacacagctgaggaaagaatctccgagcttgagaatatgtcaatggaaactggaagctgaaaggcaaaaagaagaaaacggaacagaatactgaggactgtgaaacaactactgctggtgtaacatacacataacggggacattggaaggaggaaaaaagaaaggaacagaagaaacatttgaatcaataatgattaatgtcagacaccaaaccacagattcaagcagctcagagaacaccaagcagaaaacaaaacaaaacaaacgtctccacctaagcatatcatactcaaactttggaaaaatcaaagatgaaaaagaaaccaggggttgggtgggggacaccttatctatataggagtaaagctaagaattacatgtgacttaccctcagaaaccatgcaagcaagaagacagtggagggaaacatttcaagtgttagaagaaaaaagaaaatacatcaacctagaattctgcatcctgtgaaattatccttcaaaartgaacataaatattttctcaggtaaataaaaattgaggggattcgctgccaatagaactgacttgccagaaatgttttttaaaagttctgcagagagaaagaaaatgatacaggtcagcaaccctgagctacataaagaaaggaagagcatttcagaaggaatcagtaaagagaaaatgaagtcttttattttttcttaatcttaattgatctaagagtttgctaaaacaaaacaacaacaayaaaaataggccgggcgcggtgactcaccacacctgtaatcccagcactttgggaggccgaggtgggcagatcacctgagstcaggagttcgagacyagcctggccaacacggtgaaaccccgtctctactaaaaatacaaaaattagctgggcgtggtggcacatgcctgtaatcccagctacttgggaggctgaggcgggagaattgcttgaacccgggagacagaggtcgcagtgagccgagatcacaccattgcactctagcctgggcgacagagtgagactctgtctcaaaaataaataaataaataaataaataataaaaataaataaataaaagccagaaagtgtatttgatgatcatagttatgtatatgtgaaatgaaggacagcaatgatgcaagggatgggtgagtggaattaaaaatatcttattatttatttattttgagatggagtcttgctttgctgcccaggttggagtgcagtgggatgatctcaactcactgcaacctccgcctccttgattcaagcattcatcttgactcagcctgctgagaagccgagattacaggcatgcgccaccacacctggctaattttgtatttttagtagagacagggttttgccatgttggccaggctggtctcgaactcctgacctcaggtgatccacctgcatcagcctcccaaagtgctgggatgacagacatgagccactatgcccagcctaagaatatctgatgattataaagtgcttgcattacctctgaagctgtatagtgttatatgaaggtggagttggagagatgagttttaagcgtatattgcaaactctagggcaaccactaaagaagtgagacccagcctctagaaaaaaaaaaaaaaaaggaaattagctatcaagccacgaaaagaaatggaggaaccttaaacgcatattactaactgagatacgtcactttgaaaaggctacaaacggtgtcattccaactatacaacattttggaaaaggccaaagcatggtgatgataaaaagatcggagatgtcagggactggggcaggagggatgagcaggcagagcacaggttttyttttcctctttttaagacagtgaaaatactcctaggatcctgcaaggagggatacaaattacatacatttgtcaaaacccacagcatgttgaccaccaggaggagaccccatgtgactccaggaccctggttgataacaacgtatcgagattcctcacatggaaccagtgcgctyytgtggtggagggtgtacctgtgtcagggcagggggtacgtggacattttctgcagtttttgatcaattttgcaatgaactaaatctgtggtataaaaataaagtctattaaaagaatccaaggcyccctctcatctcacgataagataaagtccccatccattttactcctctcagccctggagaaaggagaggccaggtcccaccaccttccaccagcatggacccccagtccagaccccacgccttttctcagcatcctcagaccagcaggacttgcagcaatggggaattaggcacctgacttctccttcatctacctttggctgggggcctccagccttgaccttcgctctgagagtctcaggcaggtccagagccagttctcccatgacgtgatatgtttccagagcaggttcctgggtgagataraaggatttgggctgaacagggtgsagggagcattggaatggcactcagggcaaaggcagaggtgtgcgtggcagcgccctggctgtccctgcaaagggcacgggcactgggcactagagccrctcrggcccctaggacggtgctgccrtttgaagccatgccccagcatccaggcaacaggtggctgaggctgctgcagatctggagggagcagggttatgagcacctgcacctggagatgcaccagaccttccaggagctggggcccattttcaggtaaagccctccctggccctcgctgggaacacccagatccctgcccctgctgcccaggaccctgccaggcactcagcactgccattcccagcaggtcccggcactctgcatcctttggaggatggggaaggagtgcagcacatgctggtctgtggtgctgccagggcaggggatagtgcagagaaaaccccagctcactgcagagagggcaggactcagaagcactaaagttgaaaggttccagggagccagcaggagggctttagctgtgaagccgctaatccaggagcagggagggtggacaggagacactttggattgggactgcagggtggggccacgagggacatgacccygtccagcagggcctcctgcttggccccacaggtacaayttgggaggaccacgcatggtgtgtgtgatgctgccggaggatgtggagaagctgcaacaggtggacagcctgcatccctgcaggatgatcctggagccctgggtggcctacagacaacatcgtgggcacaaatgtggcgtgttcttgttgtaagcggcgagttgggagctgagagctgggagcagggtgggcagcctrggtgtaggggggaggcgagagaggtaggacccaaaagcacatctgccctgggcccctgtggtgggcagtgagggtgagcacccggcccagaggacggccatcctgtggggtcgcgtctgcactgtgggttggggaagcagggcggtggtggagaaatgggcacgggcacctctgcagagaagacgcagagcaatgagcccttctgtgtagtgagaacctgctctgcaccaacctcggcggctgctttctcttgcggtctggggactgtccttcccataggtcagaaaactgaggccctgagaaggggacttccactggcccaggtcacaggctgagtgctgagcctggtgttcgccggggccgcagcctccctcagggcgctcagggtccctgcagtcctggcaaaccttcctgatggggacagtccggggcaggaggcaggtggggacgcaggtggctggtggttccgttgttctcagaagcaaggcacaaggtggggcggttgatggcactggggaggatgtttcctggcccgtggagagggtggcgcctggtcaggtgggcagggagaggctgatgcttggagtcggtcacctgcagggatgttgtcattaggacgggggaaggactrgatgaggatgtcacagtggtgacagcccccactccatggtaggaagggaacgctattgggaatagtggggtttaggtaaaagggcacccgtgggtcggggccttcactgaggctggcctatagatgacatctgggagagagtcaggacccaggaaggcaggtccaggaggctgggtgcgcataatggaaggaaggggagcgctcctgtmtgtgtgtgtgtcttgcatctgtgcacatgctgtgtgtttctctgtacctgcatttgcacatgtgtagtgtgtgcacgtgtctgtgtgtgaatgtatgtgtggtgtgtgtgcacragtgtctstgtgtgtgcatgtgcaggtgccggcatgggtgtagtgtttgtgcacacrtgcacatgcgtctcttcacacatggtgttgaggtcttgcatgggcgcacgtgtgcatgtgcatcttctgcctgtcatcactgtcaacagctcacagcagccagctrgacataaataaaggagttttgcaggaatgtggctgacaggggaaattcctccccaccattccctgggggcatccatggagcccccacgcactctggctgtgggtgaggatggcatgaagcacaaagcttggtttctgtcctgcagaagatgcagacacttcactgggrctgctgccccagaggcactgtgcccagggcrgggaagggtggggaggagagggcagccaggggctctcccctcaggacactgtgtgggtgaggtgggcaaagcttgacaacaggggtcasytcctttcttggagaaaagccctaccctgttactacagggagggcccgcatgggtgaggtggtgccagacttgggtcgccaggtcccgggaatgacctcagttaccctgtcagcacctgtgggcagaagctaccatctcatccctgcttagacctgagtggcctttgcccagcacctggaggccgctctgagaaaaggctgcagctcgaacacaaacaggcagcttctaccagggcccccagtcagctccctgcaggccgattccccttggggacaaggaggatgggatacgggtcagggcctgtgtcttgctggggcggcctcacaagctctgccctgscctctgtaggaatgggcctgaatggcgcttcaaccgattgcggctgaacccagawgtgctgtcgcccaaggccgtgcagaggttcctcccgatggtggatgcagtggccagggacttctcccaggccctgargaagaaggtgctgcagaacgcccgggggagcctgaccctggacgtccagcccagcatcttccactacaccatagaaggtgtgggccabgyrggaagrtccagccycagagaccctggagtggccagggayggggatggrggactgaagggagtgtggggaggcagccaggaggycyggggctgccttgtgctcagcagtgcatcctccccgcagccagcaacttagctctttttggagagcggctgggcctggttggccacagccccagttctgccagcctgaacttcctccatgccctggaggtcatgttcaaatccaccgtccagctcatgttcatgcccaggagcctgtctcgctggatcagccccaaggtgtggaaggagcactttgaggcctgggactgcatcttccagtacggtgaggccagggacccgggcagtgctatggggaagggacaccatgggggcccaatttctccttctccaccacccagtggggaatggaggccacagggaggggtcggggattcctcaccttcctgccagggagattggtgtgaggctggggctgggctgggctgatccggagaatttgggatgagagcagggagayttgggtgtcggggcagtctgggcaggaggaggacactgaaggatgyttcccagcaccaagatctgagggctgtcccctgctccctggayaggtgacaactgtatcyagaaaatctaycaggaactggccttcarccgccctcaacactacacaggcatcgtggcrgagctcctgttgaaggcrgaactgtcactagaagccatcaaggccaactctatggaactcactgcagggagcgtggacacggtcaggccagcaaccagccccacccagagagggtgatgccaagcctgcctcccaggcactgcctgccaatgccacacggcacccacgttccccatccccaggctacaggccccacatttctgttgccctcagccttcccyctcctttgttaagggatgagatttgcargggaggggaaatgtgagctccccctcacatgagactgagtttgcagttacctgtgtggggatccatgctccaggctggaagaaagttggatgaggccctggacacacagcagctctgtccccactggaaagctctgggtgtacaaggagaaggagggttgagaggcagctggaggactccactgggcacccttcccagtgtgcccggtcaccttgggccagaaatgtagatgcatgggagggcagggttgtggggaagacagcagcacaggctccagccagtgcagaggggcctgtgggtgcacagtggggagaactcaatggaagcagagggagctggggctccagaactccctggatgatgctgaggtgtggccccctgccctaatggtggctgtgagaacccgccctgaagaggctgcaggggacctgggccttggtggagatgggggtcacctttccctgaagaagtcagggaatctggcccaagtggtcatcaaggtttcagatccggggtcccagggctctgtcgtgctcagggcatggatgtctccacccctcagagggmggttgtcctgggaggggtgtcccgggggctgagtcctcctgtgcaaggtctgaccctgcagacatggcttctgtagacagcgtttcccttgctgatgacgctctttgagctggctcggaaccccgacgtgcagcagaycctgcgccaggagagcctggccgccgcagccagcatcagtgaacatccccagaaggcaaccaccgagctgcccttgctgcgggcggccctcaaggagaccttgcggtgggtgctggctgaggcctccctgtggccctggccccctgctggagagcagcccccactgggtggtggcagacagaatctggggctgataaacagcgtcacccagcagcccattcccctgcacctgctcttcctccccctcaaggacagggagctcttcttcctctggaatccctcttcaacrccctggggattaacgtggggcatgtccttctgcgctyggggctkctyaagttaggggaggtttggctgggctcagcaggtgcaaggaagcacttcctacgaccygggcttcccatggatctgggacctctgcggggtcttsggtaggaagggtgctgagagcacagggagccccatccagctgaggaccctttctrtggatgcccccacctccaggctctaccctgtgggtctgtttttggwgcgagtggtgagctcagacttrgtgcttcagaactaccacatcccagctggggtgagtgagccccacacccctcgagctgagaacctccctccccagtcattccctgatccctgctctgyaccgtccgcagacattggwacaggttttcctctactcgctgggtcgcaatgccgccttgttcccgaggcctgagcggtataatccccagcgctggctagacatcaggggctccrgcaggaacttccaccacgtgccctttggctttggcatgcgccagtgcctygggcggcgcctggcagaggcagagatgcygctgctgctgcaccacgtaagcaggcctgggggcgggggcgggacctgggcagcagaggcgggacctgcacactgggggcggggcttgcatggtgtgattgacacctgggaacagtggatggggccttggttggttgaggtcggcgtgaccagggaggatctgtgctgagcaagacagggtaggatctgggtgaggytgcttctaaacattgaaatggggactaggggagtggggtggagcctgtacagaataatggggcttgggcaagacctgggcaggattcagtctgggcctggtccgyaaggtggggctggtcagaartgggataggttggggcccaggctgctgctcccccttcagcataattgttgcacctgggacgatgggaggaagctgccccaggtccatgggctactgaccaggccagatggaaacccagcctctgtcctaggtgctgaagcacttcctggtggagacactaactcaagaggacataaagatggtctacagcktcatattgaggcctggcacgtcccccctcctcrctttcagagcgattaactagtcttgcatctgcacccagggtcccagcctggccaccagcttccctctgcctgaccccaggccacctgtcttctctcccacrtgcacagcttcctgagtcacccctctgtccagccagctcctgcacaaatggaactccccagggcctccaggactggggcttgccaggcttgtcaaatagcaaggccagggcacagctggagacgatcttgctggcagggcctggccttgtccccagcyccacctggccccttctccagcaagcagtgccctctggacagcttgactctactcccagcgctggctccaggctcctcatgaggccatgcaagggtgctgtgattttgtcccttgccttcctgcctagtctcacatgtccctgtccctctcgccctggccagggcctctgtgcagacagtgtcagagtcattaagcgggatcccagcatctcagagtccagtcaagttccctcctgcagcctgaccccaggcagctcgagcatgccctgagctctctgaaagttgtcaccctgkaataygatcctgcagggtagactaaaaaggcccctgtggtcacttatcctgacacattttcaagtgatacaactgagtctcgaggggcgtgtgttccccagctgatcatgtcagcctcatgccccaggcctcrtctttcatggaccaggycttgttcaagcagcgagtgttgggtcctctgcttcctgwgctgtcccctggrgaaggtcccraggatgctgtcaggagatggaagagtcatgtggggtgggaacctggggtgtggttccagaaatgtttttggcaacaggagagacaggattgggccaacaaggactcagatgagttttattgactcattcctctggttgatacggagccatgtcatgtgccacgacctggggtgggcacagggaggctgcagttccctacgtgaacctgccttgggcctcatctgctcctagcccagcagagagagttgacccctcctgaactggccactccccagtgctcctgtgcagggataggaagtgccccagggtgagaacgtgcccagccacatcatctttatctcctgggattttcattagggcaaagatctcagcagccagctcctggtagctgatgaggatcagagcgtttgttcccccatgaaaggggaaatacytaggtaatcattccaggtgtgttcagtagttccaggactcagggactcaggccagtcaccctgtgaccgcaggttgctttcccaccctgggcaatgcagtgcagcatgggaaaggaataagggggcaacaaggtgcacagacctcagagatggcttccttgtttatggggctctcacagatacccatccaactcctctagtcagcactagatcatgggatcctaaaataaaccttggaaaaatattttaaagccttttatctcaaaattattatagatatattcaaatttgttgacatatatatacaggcaggtccccccgccacccttcacacagcctcccaccatcagcagcttgcawttacatagaacagtcttcaaaacaggaaatggacagtggcacgattcactgagcttatttagaacttaccagtgaaatgtgtgcctgcgaatgggtgtgtgtgtgtgtgtgtgtgtgtgtgtgtgcctgcctaattccatgcaactctgtcccacatgtaaatttttgtgtttttaaatgtaagcttaattattactcagttgtggtgaggcccacaggccaggagaagactgtgattgaagaaatagtctgttactgacagcgtgcagtggcagggctgttcttgccatcatgacctcattggaagcatccgggtcaatctgaaggcagaggttctagttcttcctgggggaggagccagtgaaagcagggtaggcaggcttgggactgattgctttgcatgattacccagggctgcgagtcacagggattgtctctggctgtctggtgcctgactctgggggaatctgttcaggggagctgtggcctggagtgtgcaacaaggtggctggcaagacttcacaggaaaggcattcaccaggggggaccttgaccatctgtagtaactggccagccctggtagggcatcctgtccaggatgcaagcccagaaaagcatcagaagcacagaaaataacaaggatgattacatgattggcctggtgatgcttggatgtcattattgagaaagcactagcattagtttctttatccacttgttgattgatgggtgtttgggttggttccacgtttttgcacttgcaaaytgtgttgctataaacatgcgtgtgcaagtgtcttttttgtataatgacttcttttcttctgggtggattgctggatcaaatggtagttctacttttagttctttaagaaatctccacactgttttccatagtggctgtactagtttacattcccaccagtatttagaagtgttccttgttcattgcatccatgccaacatctattttcttatttttattttttgattacgaccattcttgcaggagtaaggtggtatcacattgtggttttgatttgcatttgactgatcattagtgatgttgagaatgttttcatatgtttgttggcyatttgtttatcttcttttgagaactgtctattcatgtccttagcccactttttgatgggtttgtttgtttgtttcttgctaatttgtttgagttgattgtacattctggatattagtcctttgtcagatgtatagattgtgaggcttttctcccactctgtgggttgtctgtttactctgctgactgttccttttgcagtgcaacagctctttagtttaattaagtcccagctatttatctttgtttttattgtatttgcttttgggttctcggtcatgaaatccttgcctaagccaatgtctagaagggtttttccaatgctatcttctggaatttgtatagtttcaggtcttagatttaagtccttgatccatcttgagttgatttttgtgtaaggtgaaagatgaggatccagtttcattttcctacatgtggcttgccaattatcccagcaccatttgtggaataggatgccctttccccactttatgtttttgtctgctttgttgaaggtcagttggctgtaactatttgggtttatttctgggttctctattctgttccttggtctatgtgcctacttttatacmagtaccatgctgttttggtgactatggccttatagtataacttgaaataaggtaatgtgatgcctccagatttgttctttttgattagtcttgctttggctatgggggctcttttttgattccatacgagttttaggactgtttttcctagttctgtgaagaatgatggtggtattttgatgggaattgcattgaatttgtacaacataatttcaatacacctgagaactacacatatatttgaagaataatacttggtgtgttgcttgtgtcaaggtagcaggttgatcaattatgtttttggagcataacaattggtaaattagtaaagtatatgtaaagattagtggcatttttgtgtaaccaaggaaaaagagtggttgtgatggttagagatgcagcgtagaaggtcacggtagaatcctggacaagattagtaggagaagtttctggagagtgagtggtcctttccctggaggtaagatgttgatatgagacaagtaccttctggggaaagtgataatctccattaattttcagagtggcacagagaccatcaaccttttccaggtgtctcttcggcacgggagtgtaggggtgtgggtggttctggagatcagggattttataaggatcatgggtgttatacatgtgttgcgtctcccagaaatttctgtgttgaaatcctaagcccaggacctcagaatattactgtatttgaagacagagtctttaaagagataaataatgtgaaaccaggtcattgaggtagaccctaatccaatatgacaggtgtccttggaggaaaagggattagaacccaggcacaaacagagggtgtctctgtgrtttggtcaataaaccaagaagagaagcttgagcagaaaccatccccccgaacaccttcatctaagtcttctagcctctggaattgtgaaaaaacaactttctgttgtttaagccacccagtccagggtactttgttattgcagccraagcaaactaacgtgataggctaagcagtcagcaagctgcagaaactcattacaattgctaaaaccaaagaaagaaaagcaatccatgtcctgtgtccagttcatgccttagtgtagctgaacccaggcttggctgcttgctgcatgaaaactaaactccagagacaagagttggtgggaggaaaagcaggtgtattcaacagccagcaacctgaggagacggcagactagtgtcaccaagaccatctcaatacagtacaaattttaggctctttttagttaagggaaaaaggaagaggagggaggtgtgattgagaggtgaccaatgaccacagactccaaggagccagcaagggtccgaggaggctgaaaacttctttgtccttggtcaggtctcaatgcccctgtaaatctttaacaaaacatagttaactgtttacatgcttttcctttgatctcagagttagttttaaaaagtacatgactgctgtttttgtattattaactcaatgctttaaaattatcctcgcccatgtgcaggaatcagtaaaggccctttaaacaaaaaatggagtgagttatgtgcgttcatttgttgcttcacttttagattaggaaaggcagtcatgggcattgctggggagttgagattttagagcctgggatgaagttgtgtcctgagttgggggagaaatcttctccaatggcaagttcttgagctgagttgaggtcctgcaaggcaatgtcatctcctgggtgttctcctgggccagagtgatgccatctgggatgtgcaagtaacattttctttttagtggatacctacttgagttgatgtgggtcttgtgtttatagctctatggttttataatgagcctgaggctgagctccagcattaatgctctctagggcaggcccactaatttggtcaattgcaatggccctgagcctaagttgcgtggttaatgaaggtcaagccatgggggccttttggtcataaggcttttatcagccaaactcaatggcacgtggacctcagcacagccccagcaggacaagtgctgaggtccacattaggagggctgagcctccagattccatttaacagttttttgtttatatttttggwtttgatgaaggtttgggctcaaatgggtcctgtatcggatgagcagatgcctgccccatggtacaatccatggttaatggatcccaggaaataattcaccccccagtctggtggccaaccctcctgggatgaggagggttggcaaacaaagatccaaaatttacaaagatgggggagtcaacataaaaagttttcctatacatgaaggtgacacatatgcccctttacaaataagaaagggaaactgaaaacttttaaaacttggtgtgagatgagtcagtcaagcagcctggagtaagaagaggttagggcctggaacaacagtatgatccatgtcagggacatgatccatgttcttcagggacatgtgacaatatgatccagtcacaaccactctttttccttggttacacacaaatgccactaatctttacatatactttactaatttaccaattgttacacagactaggatttgaaaaagagttgtttgaggagaatatatttctatcaattaaattaaattaaatttgggggacatatcagggaaatgaaagttctattgactgtcttttccaagacagttgggtactttgagaagtgatatatgtcctctggttmctataagtaaaacttgtaagttaaggagaagtgtcctggtgttagtgtatgtggagacaggtgattttgttttatattttgagtatctgtgaggcaagakattcccagagtgctttrccttgaaggggccaactcttagacataatccagccattagtagtaagaaggaagatggggacatttgttggacatccagcgttaggatgacwgccagaggttggccaatgttattgacycttaggtcttgttcttcatagaggacgccctggctaaagcagcagcattccactgatgccattacttcatgctgattggcagtgctattgagtagtctctggatgaatggctcattgccattcccttagttaatgcctttgggaaaaagggaaagcctccacttcctgcaggtggaatatgcagaggtccgagttttggctccaatctgtccaaaggtgtcctcagtagctggggtgagcttgtggggtgctatttccatgacccacgcatrgtgggtgctggggatggagggtcactggctcagggtctgtgagagcttctttccaggagacctcaataggtagaaagttgttttgtttttgtcgtgttttatctttttatgatgtacagaacagggccgagaagagcagtttgggcaccttatggccatcaaaagtggtcaaaagagatgccagggggcctgagaggaaactgacaaagtgtgtttgycaaaggagggatcaagtctcctttagggttaatatggcttggatgtgtgtccttccaaatctcatgttgaaacgtgaccccccgtgccccaatgtggcagtactgctgccctggtctccatgtggcagtgctgctgcttcttgtaaaggctctaacttgggcctgtgcgggcggatgttggttgtggtgctgtcagctggyagggttggtctgacctcaggccctgggggaagtggtcaggtgtcagcagagttggaatggggtaggtagctccccagttcccagacctctggatggcccactggacagcatgcatgagtcctaaaggggctggacctgtgtcaggctggctcagggttcaggtgctggctgtgatagggaaggggacaggatggtccccaagtcactggccaaactctcaggcaggggcaggcagaatgcttaggtggtgggaggctgaaggaagatcacagacctgtaggggctgggttttcagaaaggttctgagctgcagataaaatgttcaggcaggggcagggcagctatgctgcggacctttcactggggaggacaggacctctcagctgggtccatggagactggtggctgtgggatatgtggcatgctgacactttcctcctacccaagcatgctaaacttcgctgctgggggcatgcaaaggtgccaagcattgtctgttaactccgggagttttaacccagagga

SEQ ID NO: 9910 - DNA, 68107 bp, Homo sapiens
  misc_feature (15269)..(15462): n is a, c, g, or t
tgaacaggccctagcacagagtcagagcacacacagaaattattttaattaatatgtgagactgttttaaaaatagatcataaaatatcaactaatagcaaaatcaaatgattacagttttcattagcaggcaagaatgtttgtcattgttaagaattgtttctcaattatatatccctttttaaatcagctaaagattttgataactacaaaaaattattctgtctttatattttgaattaactaggcttatttcttaactaaaacttttttttttctgtacagaatggatgttctggtgtcaatagatatgaaagtgttggttggcgacttgcaaatcaacaaagtttaaaaaatcgaattgaatctgtaaaaacaggtttgctttttagcccagatgttgatgaaaagttaccaaagaaaggtacatttacatactactgttagagttttacctaaaaatcctgctttagttgcttttttaatggcaaaacatattaattaatttactgttctagagattaaaagttcatgtttgaatagtgaaaatattagaattggcaatgtatttttctatcaacaattgggaaatgcttatacatgtaaatatgaaaatgtttgacattcttatgttaaaaattatttcttgtaacacaaatactttattagaattaaatgcttagtgacttatttgccatgtgcttgggtattatttcaaaacaaggttaaatacaaaggattaagcactgaactgctttattttaggttcagaaaagatcagtaagtctgaggaaaccttactaactccagagcgactagttggaacaaattaccggatgtcttggacaggacctaataattcaagttttcaagaagtagatgcaaatgaagcttcttcaatggtggaaaatcttgaggtagaaaactctttggagcctgatattatggtagaaaagtcacctgctacttcatgtgaactcaccccttccaatttaaacaataagcataatagcaacataacaagtagccctcttagcggggatgaaaataacatgaccaaagagactttggtgaaagttcaaaaagcgttttctgaatctggaagtaatcttcacgcattgatgaatcagaggcagtcatcagtaactaatgtggggaaagtaaaattaactgaaccatcttatttagaagatagcccagaggaaaatctatttgaaactaatgatttgactatagtagaatcaaaggagaaatatgaacaccacactggtaaaggtgaaaaatgtttttcagagagggacttttcaccccttcaaactcaaacatttaatagagaaacaactataaaatgttattcaactcagatgaagatggaacatgaaaaagacattcattcaaatatgccaaaagattatttaagcaagcaagaattctccagtgatgaagaaataaagaaacagcagtccccaaaggataaactaaataataaattaaaagagaatgagaatatgatggaaggtaacttaccgaagtgtgcagcacatagcaaggacgaggctagatcctctttctcacagcagagtacatgtgttgtaacaaacttgtcaaaacctaggcctatgagaattgctaaacagcagtcattggaaacatgtgagaaaacagtttctgaaagttcacaaatgacagaacatagaaaggtttctgatcacatacagtggtttaacaagctttctttaaatgaaccaaatagaataaaagtcaagtcacctcttaagtttcagcgtactcctgttcgtcagtccgtcagaagaattaattctttgttggagtatagcagacarcctacagggcataagttggcgagtcttggtgatacagcttctcctttggtcaaatcagtgagctgtgacggtgctctttcctcttgtrtagaaagtgcatcaaaagattcctctgtttcatgtatcaaatcaggtcctaaagaacagaagtccatgtcatgtgaagagtcaaatattggtgcaatttcaaagtcaagcatggagttaccctcgaaatctttcttaaagatgaggaagcacccagattcagtgaatgcttctcttaggtctactacagtttataaacagaagatcttatytgatggccaagttaaggttcccttggatgatctgactaatcatgatatagtaaaaccagttgtaaataacaayatgggcatttcttctgggataaataacagggtccttaggagaccatcagaaagaggaagggcctggtacaaaggttctccaaaacatcctatcggaaaaactcaattactaccaacaagtaaacctgtagatttgtaattggtaaatgttatacttgtcattaatgtaaataaagtgagtaattggtatgacttgcaggatgatgtacatgttagtttgtagctcaggatgattgttaagcaatagatttgctctattgaaaatgtttcatttttttcactgtacaagcaacttagatttttatttgtacaaattacttctttgtttttcttaatgatggcaatttttaaactttaattttattgtgatctcttaaagcagaggttagactttacctttctgactctgtcgtccaggctggagtgcagtggcgcaatctcactgcaagctccacttcctgggttcatgccattttcctgcctcagcctcccgagtagctgggactacaggtgcccgccaccacgcccagctaattttttgtatttttagtagagacggtttcaccgtgttagccaggatggtctcgatctcctgacsttgtgatccgcccgcctcagcctcccaaagtgctgggattacaggcatgagccaccaygcccggctagactttacctttctaaagaaattgtttactggatttataagaagttaatttttgaaaatgacatatttttgtgtgatagaaagaatggagcaagttgtgcctatttcctccaagtcagataaggtttctaaaataaataaatttctagcatataaagggtagagataaactctgcaaatcttatgtctggaattatattaatgtttattgtccttgccaaaattcctagaaattaatttccttcaatagcatcctaaaactctatttttatttggggcagagtaatttcatttatagtgccagtaggtgtaccttgtgttcactcgaactaagaacaatggttaaggcagaataatgactaaaatatgttcatatattatgatgtggaaataattgataacttttaagccatactatgtttttaaagataatttgcacaaacacgtttgtgtctgttctgtccaatatagatttggcaattatttaaagagggataatcttgaaaaaaattaaccaaggtgatttcttatatgtagatgctcgattttggaatttgaaatagtagatgcacctctttaccttttttacttggataaaaacctatgatgattttgtcctgtgtgtaaatgttatttatttagcatagacattaaagataactctctggaaaatgacttgactaaggctctcatgaaattcaaagtgccatttagaacatgcaccaaattgtcaagtaaatctgtctaaatttatattttaaattattacaaattacacatctttgaggaaagagtattatgaacaatagaacatattctctaggttgtagaggaaggaataagcagacagaatcaaccactaaaggtagtttttcagattggttgttagaatgtcatgtttagatgttggagcagattagagcagcattcatgccactcggagcaaccagacttacagcataagtatgtacgaggaatttcaaatcatcagatgtttgcttggctaggttctactttgtttatttgatatcaaataggtttgtagatgtttatggcatttctaattgtaagtagagacaaaatattcatatagtcagatatatgttgtctgctttaaacaatttttaaattttaaaaatgcattaacgtctttttatatccatcaagggaaggatgaaatgttgaatttgaagactaattcagtaagaagtcctaggggtttaactgtacatactacctgaactggcttttctgagagatgaatcaataatgaaacatgtctgttttaaaaactaccacatgtgactcctatttttgttagctgaaagctgcwatacggagtattacaggaatgtgaaggtgactagcttgaaggtagggtaactagagagccagaaaagttttgttttaaacttgatttaatgcgtttttattttttcttatacaaaatagagataatgttgctaacttcatggaatatttgaggaaatgatatgaaagtgtctggacgtgcagtaacctcatggsttcttctcactgtcttataaatgtaaataaagatctaatattaatttggttatctaataacaacttaatacatagaacttagtagactgcatggccacattctataatatgatcactaagaacttaatgtaggattttaatagtcatgtttttcttaattgtggcagaatttaaaccttaattttgtgatcttttttagttagttttttgttttcttttctttttttttttttttttttttttgaggcggagtctcactctgtcgtccaggctggagtgcagtggcacaatctcagctcaccgcaacctccatctcccgagttcaagcgattcttctgcctcagcctcccaagtagttgggactacaggcatgcaccaccacgcccagctaatttttgtagttttagtagatacgggatttcaccatattggccaggctgatctcgaactcctgaccttgtgatcctcccaccttggcctcccaaagtgttgggattatgggcgtgagccactgcacctaacctctgtgatctcttaaatatatatgargttttatttttgaaacaccaaatttcaaatgaagcataggcattttgatctatttcagttaaatttaacacaaaagcagtaaattgtagtgacttcatttttttcaaccacaaaatgaagataacaatgaacaaagctaaagtaaaactcagaattgaaaaaagtctctgtgcatcaataataaatactaactccagcatggccagtgagcctagagccatttaatggatagtgtttgtcctgttgatttagcatgcattgaaacaagaagcaagaagcagatgagcatccgtgaaagaaaaagtactgggaaagaggcttggcttcaaaatgaaaggccatgtgtctcataaatgaattttgccagcctctatttattgcataaaaattgctgtagatgataatggatttgctctctagagctaagataaatagatctggattctaacctcatcaggttacttgttttgagacccccaggttctttactcatcctccatcttgatcaaatttgtagtgccatatttattgtatggctttacattttgattttagtatttgaacaaatttcagtgttcaagattgcacatagtaggtgctccataaacccttatttaagaatctgggactacctggacatacttctacagtatgctgggagtatggtttctcttcaggccaaagtggaattttacttgatggtttgtgtggacgtttagaaataacactcagagctgatatttctacagattttcaagtttatcactttaatggaagtttctggcttcttgtattaaatatccccatagttttcctgattagtaagaggcccctcagagcagggtataccttatcatagccaccattaaaagttcttaggacttcatcttttgtctctctaccattcattgcctcttccctcttgaagctgaaaggctttagacacaaaaacaaaaaacatattctagaagttgacaaaattaaaggtgtgctgtagtggtgatctggcacgttgtaattgagactgaggaggtgaatgacttacatggaggtcgatggagctgaagagggtctctaggaaatgtcatagtcaagaggtttgtatgcagaatgtgggggttgaagagctgtgcggctcctggtgagaggcacacttatctgggatgcagtctggggagtcctggcgaggcagcttccacctgctggaggaggggccggggcggagctaagatgcggaggagggtgacgcactagctctccagttcgcccgttcctggcctgacccccaccaaggcccataccgcwgtaggctcctcgggctgcccctcggtgagtacagttttgatgtcggctcggccgcctgccgccaacccgagatttggtattgccagttgtgggagggcgtcctgctaaaatccttgaggtggaggctggggtcagacraaggatgcgtaggggattagaatgtttggctatcagtaaggggaagggagtactgagggaggagattgtgtagttcatcaaatcagagcggcgtttgctgggatgacatcctgcattcagagtggacaagggaaagatggagatggagagcctcgtgtctgcctccagccttttccatcagaattgcagattttgctgttaaacagctactctcagctctttggagagcaaggttttatatctagtggctagaaaaggccttttctttgcagaaaaagaaattggagggtataaaaatttttgtttcagtaaaggaaatgcacgattttgcctcctcccacctctccatcccccatcctcagtagaagaatgattagaaggagggtttgcgccggtcctggtggctcacgcctgtaatcctagcgctttgggaggctgaggggagggggtggatcacctgaggtcaggagttcgagaccagcctgaccaatatggtgaaaccctgcctctattaaaaatacaaaaattagccgggtttggttgtgggcgcctgtaattccagctactcgggaggctgaggcaggagaatcacttgaacctgggaggtggaggttgcagtgagtcgagatggcgccactgcactccagcctgggcaacaagagtgaaactccgtctcaaaaaaaaaaaaaaaaaaaaaaaaaagggtttgcaaggccgctgcctgaagcatgcatccaaacacgttaagcagctgtggggtaagctgcaaggataatgttcacttgttttgcagacatacccatagaaaccaacattttggacaggttgaccctcccacccccaggctagttaactccctctcaccaccactgcctccccatattctaacctccagaactgttaaggcaatgttagcaacataataatagcaatataggggctcattctgtgcctggcattgkcctaaacactcttaacatgtatttgcacacascctcacaacaaccctaaaaggtaaatgctttaattatctccgttttgcagaggaggaaactgagggacttgcctacgatcactcagcatgtggctgagcaaacaaacctcaaactaccccagcagattgcagggctggatctaaggaacattttccttcctttcaggatcgcaaacgtattggatgtttgctaaactgaaatgtttccctgccaccactcccaaccttcctgagcttcttgatttgtgtcttcctgactccctcctgttagacttttattcccagagactgggaaaacccaagatgccactatctctttctcaaaatgtaagcaagtttggtttatttgttttagtaagagagggagagagtgatgaagttaggagtaatgcagaactttcagggagctacaaggaggataaaaattatgagtgagaaccgccattccagcctagctttctcaagaatgcaaacagagggaattggatacctgcaactgttttgtttaatacctttctgcaatgatgctctgcctagcatggaaacttaagacaaaagcaacctcctaaggattctttgttacaacccctttctgggtggtcctcgaaccacaacctggagtggttgcatcattataaytgtattatcacaawtgccgattgtagcctatcagtatacatttggtcttttatctgcaggttgacaatggtctccaggatggtctctaccatgctatctggcctactgttttggctggcatctggatggactccagcatttgcttacagcccccggacccctgaccgggtctcagaagcagatatccagaggctgcttcatggtgttatggagcaattgggcattgccaggccccgagtggaatatccagctcaccaggccatgaatcttgtgggcccccagagcattgaaggtatttactgtgttctgatggtttgaagtttccgttagcattttaaataatatatttgcacacttctcacaacaaccttataagtagatgcctttattatcctatttttttcagaggaggaagctaatytttaagagactctactttctcatggttttccctttcttcttctacacagtgtctacatacttacatatacacacccacatgagactataagtcctgtgagagcagggaccttatctatctaattcatagctgtagccctagcacctagcacaatgtctggtacataataggtgctcaattaatgtttgttgaatgaatgaaggagcatctagtgttatcactaaagaaagattasaacccagacatgatgttttctcctcactgctgatcttcaggaaattgtgtcatcagatagctgccttttgagtcaatgccagccagtacttgtaaaagagcttcaaaatgtagaacctacaggatctgacttgattcctaggaatgactccagtatacccaagaggagacaaaagaggtactgacattaagagtttacgtgaaagcttttgaaaatatttaaaaatataacaattttattaaataataaattaagaataattaaatcgttttaaggtggcaagaccattttccccctgaagttttccaagtttctggcaatgtggtcataatacttgtattagaaagcagtacttcatttgtttgttgtttaatgatttgtttataaagagaatctagcttctatgagctggtgatgcagcgttagacagattccttatttccatgctttgctttttatcctctgattctaatgatctccttctccactaaggcagaatcctaaagaagtagcatggttaatttcagttaaatgcaagggagcatttccttatagttcaaggatttgcccatggagtgggtccgaaggaaaatgagaattatctctaaaagcataccaaccaaatgctgtttgttccctacagattgattatgcactattttgccagagtctgtgattttctaaaaatgctatctgccctagggttctgtgaatgccatgaatattgttgatagatgattcttatttctgttttgttacccatagttttaagccattgagtaaaactaattcggtgagattgtagtctgtttaggttgacatttgatttcaggagtggattaacacaaatgygttgaatcggcaagcatgcaaacctagcacatggcttgaattagaacaaatccgacagagcttcctgtcatcccttttagggagaatctcagtccttctcagcatctgtcaccgttacttcaagcacacctatatatttcaggccagctcttttgagacaaacaataaatatctacctttttaaggcaggaagtgcttggttattcacctaagctgttgtcatggagytctctgagtttccactaatacctgaggcctgatcagctgtgctggaaaagaaacagccactcccggggcatcaaaagcctctttatccagagactccattccctccagtatccaactatttagtacccactatataccaggcactaggcaggagactggtgcagctctgccctaaagattcacagtctgagtggagagggaagtggggacacacatcaaaagttatgacagtgcatcccagcaggtgttttgatagatgtacacacaagctgccgccgtggaagcaaacaggagtaatttagtctgcttaggagtggatggggtggctataaggaaatgctgctttgaagaagcaacatttgacctgggttttgaagtttgagtaagagttcatcagggaaccataagtgtaaaggcatggaggtacaactattatgtacccacaaaaactaaaaaaataaaaggcatggagacatgaaagatcatggatyaggacaattcagaattaaaaactctgtttcccttattacccttggaataatgtgcttaacatagcaatttttttttcttctttttgagacagagtctcactcygtcacccaggctggagtgcagtggtgcaatcttggctcactgcaagctctgcctcccgggttcacaccattctcctgcctcagcctcctgagtagctgtttacaggcgcccgccaccacgcccggctaattttttgtatttttagtagagatggggtttcaccgtgttagccaggatggtctccatctgacctcatgatccgcctgcctcggcctcccagagtgctgggatcacaggcgtgagccaccacacccggcctaacatagcaatcttaagtctcccctatcagtatctgtggaagggatgaatactgacttgaattttagttttctattactgtataacaaattaccacaaatttagcagtttcacacagcattcatttattatttgagttttccactgctcaggagtttggtgcggattagtgttcaggtgctgaccagaggtgtcgtcttggctgcagcttgcgtcctcttccaagctcgttaaggctgttggcagaattccatttgaattatattgtaggactgagttccctttctcttgctggctgtcagccaaccaaagcccctctcagctcttagaggccgcctcaggttgtaagccacatgccttctcatagctggaaggagaatatctctttagtcttctaattataatgtaatatgatcctgggagtgactatcccatgacctttttcrgataacaagggactgatatctcattatattcccagcaggtgggaatcttgggagtcttcctagaattgtatactatagctaggatgaaaactaacaaagaaaatagtccaaagatacttggggcaaaaacaacaaaataaaaagcctgggtttttcccagtctgggaccttggcattgaatttgttgggtggtctgatcatttattcatgtgagttagttattgtttcacctcatccatttatttgcattatctttgctcacactccctgatgctaattccctctgacagacacatggagtatcttccatacccttccaacattgattttaggattttattgtgaagaaccaagttgggaaagtttatttttaattgttacagaaagaatatacataatatattatcatattttatagtaatactgtattctggtgtgaatttcaaatacacttaacatggtgcttatgagcacaaaccattgtcagagacacccgaatttgaatgccagcttcatcatttattactaatatgaccttgggcaagttacttaactcctataaccttctgtttagcttaggggtaggatttaaattcacttacttgtaagcaggtaatgttccagtccacagaagcaaaaataaagttttagcatggataactgtgctacgatgaaataatttctaaacaaatcatcatcatcatcactttagataattactggatgttaagttccttgcaggcagagttgttcactgcccaacacatggtacatagaagacaaatatctatcttgtctacttaaataaattaattgtatgatcaatggatcttaacaaatgtgtatatttgctctcaaatatagaattataaattggccttttagtataggaatatagtatcagtataaattaatgttaggtcagtgaggtatcatatatcccattaaaaaaaacatatcttctttgattccatatcccttctagttactgttccaattttctgctgcctttcacagcaacctttcacagctgcctttcacagcctttcctcacatgccaattgtacttcttcacctctcattctctcctggtccattgtagcccactgttctcaccgctcattcattaaacctactagtatttattgagtgccaggcactgttttaggtactgaggaaataaaygtgaacagcaaagtagcagggcgaggaaatgtagtccttaaataaacaaataagtattgggctttccttttttcctttttttctttacccatttgttagtttcgtttacaggtttctctggcggcctttaaaagttaagttctccagggctcagtgctgggtccacttctcttatttccctcaattctctatctacttgatctcattcattctcttgactctcaatccatttcttggctggtgwctccggtgtttgtatttcagcccacatttctttcttgcatatccataggcttacactaattgctaaattgccaggtttcgatcctgatttctcaaaccaccaccttccccagcctgtttatatcagtcttttctgtctaaatgagtagtgcccctgcttagccatatatgcaaactaaatacctacagtarcccttgattttctccatcacacttcatgcctcaattttaagtaatttatttcatttttatctctaaaatccatgtgcaatttcctgtctgcttctctctagctctactccaaacaccctggtccaagataccatcatgtctggcatggagttttgaaatcgcctcctaactcatcttcctgcttctattcttgatcccttttcgattgttcttcacaggaagaacaggagttaaacttttttcaggagttaaacttgaaaagtttaaaccatattagtgtcatctccgtagttacaattccattggtggcttcccatcgtaccctgaataaaaataacccttcttgccatgacctacgaggatccacagctccagtcaatcgtactccctactttgttccacgcattctggccctgagtcacaccggcctcttcccacctcaaggctatcaacacattggatgggatcaacaatgggaggctatcaacctcccattccttgtgtagcgagtttcaaagtcacccactcagagagggctgcctgactgccctgtctgagtagcacccccctacattctctgttgcagtctcctttttttttttwwaaaaaaaacagagtctcactctgtcccccaggctggagtgcaatggtgcgatctcggctcactgcaagctccgcctcccgggttctcgccattctcctgcctcagcctccccagtagctgggactacaggcgcccgccaccacgcccggctaattttttgtgtttttagtagagacggggtttcaccgtgttagcctcctgacctcgtgatcctcccgccttggcctcccaaagtgctgggattacaggcgtgagccgccatgtccagcctttttttttaaagctccatagcattttttgtcatttataatcattgtttgttttcttgcttattgtttatctctccactggaatgtaagctccatgaggctatatctgcttattaactgcattatattccaggcacatagtaagcattcagtaaatatttgaggaattaatgtataatatcagggggaaataaatatacctaatggcaataagtatgtaaatactgttttacatctggatctgtcaagactttctgccttttagttcaaggaaaatattccatttctattctgtttttaaaaatctctgcctagaggttcttgccatgagcttagtgataatgtggtgagcaaaaatgtctgttatctagaattgactatgactgtgatcaccatggtgcaaggtttgtgccctttgtacagcgcctaccaaggagctagaaggactttttgcagtcctgggactaaaccagcagagggccaactagactagaagtttattttggaagattcctgaaccctggtagccagcctcctggtcgttaatagctttaagtggtcgctggggtagaagcatttgccaaaacatccagagaggattgggggttatgtttaacttctccgtgggcgccttaaaaacagcttggtaaggagcatctttcaaatgtgtaaattcttagtccaaagcaaataaaaacacaaagacaaacagggacctacttggcattacatgaaaaaaaagagtgtgtatgtttatggcagagaactcgggttaacccrtagccgtactattttctagctatgtgtaatcctggcaactttctaagcctagttctctcaaataaaatcggcccaaataaaatgggcttgtctggttcgagttggtgtttgaaaaataaaaataaaataaaatggggtttccagcccactcttacatgcaatcagtgggtgccattagtaactgaattgcaggccttcctcctctcactttgtggattatcaacaacatgttttcagtctttaatggcttaccccaatcttatttatttatttattttttgagacggagtcttgctctttcgcccaggctggagtgcagtggcgggatctcagctcactgcaagctctgccctcccaggttcatgccattctcctgcctcagcctcgcgagtagctgggactacaggtgcccgccaccacacctggctaatttttttttcgtatttttagtagagacggggtttcaccatgttagccaggatggtctcgatctcctgacctcgtgatccgcccatctcggcctcccaaagtgctgggattacaggcgtgagccaccacgcccggcgccccagtcttatttttgattactcatcagttagcaatacagttcagatatgcttcagtgcaccatatatttcagcagtaaccatcttctcccaagcccacggttgctcactggtctccaagacatagctaaatggctactgttgtattatccccagaaacaaataaagccaccaactgtccaggggactgattcggagaaccatgtgctgtgagatgggagctcttgggagttagaactggttgtgccagctgacactgatgatggccttggatggccttggatgaatccaaccagaaaatgtgctttcgttttcagaacattaacagctcaggtaaaagataggctgctcagtgccagctgttnnnnnnnnnnnnnnnnnnnnnnnnnnnnnnnnnnnnnnnnnnnnnnnnnnnnnnnnnnnnnnnnnnnnnnnnnnnnnnnnnnnnnnnnnnnnnnnnnnnnnnnnnnnnnnnnnnnnnnnnnnnnnnnnnnnnnnnnnnnnnnnnnnnnnnnnnnnnnnnnnnnnnnnnnnnnnnnnnnnnnnnnnnnnnnnnnnccattaagatagaaatgtataaacattagcatttgatggctctgagtaattttaaatccatattgccaaacattaaaatacccacgttctgccgggcgcgatggctcacgcctgtaatcccagcactttgggaggccgaggcgggcggatcacctgaggtcagaagttcgagaccagcctggctaacatggtgaaaccccgtttctactaaaaatacaaaaaattagctgggcatggtggcacgtgcctgtaatcccagctactcgggaggctgaggcaggagaatcgcttgaaccctaaaggcagagattgcagtgagccaagatcgcccattgcactccagcgtgggcaacaagagcgaaactctgtctcagaaaaataaaataaaataaaatacgttcttttttataacactgactgttggacttcaaatttttcacttagaaatagagacccaaggttattttcttaataaatatcaagtggagaaagagtcctgtggatgataggctacttgaagaggcagatcctaggagcctctactctgccaagctttggccttggtaaaggagctgcagtgcctccgctttgccacagggtggcaacagttgcttcccatttgaggatggcggggtgaagcaaaccttgaactgtaggggacactccgtttctggctagtctctctctgcagttggagaaagcagtgcagctgactcttatgtgtcttgactaaaatctgtttctaggttatcctcaccctggaggaaccaatgagaacattgggcttgtaggccatctatgaatggactgggaccscccaatgggcccatgcctttggggttgcattttgtccaccttgaacttcaatccttaaagtctctggatgattttcagtttttctctgttgagcaattgcatggatagtaatgagaaattcaaaagaaacggggaggttctttttgggaggggaaaaggataggaaagatgaacacgatgacatgtttgtgtatgtttacagtgtcctgggtatccagaaggcacttagatgtatatggcacaggagagaagtctgggagaaggaagggtttcagagtcatccccgtgttagtggtggctgatactgtaggggtggatggggtcaccctgggtgggtattgagaacaacagggcacctaagacaaaggccaggtagatgaagaagaatccacaaaggaaactgggataaatcggccagaaaggagaagaaccagcaaagatagagtgtaatgaaaacaaggaaatagtgttctgagaaggggcagtggttaccactgtcaggatcagcagagaggtcacatgaaatagtaaaaaccactgggtgtcaagtgttcactgggggtagcaacacagaagttactgctttgtgggggctttgggcagagccggctctggggagtagtgggggcccaccatacctgcagggcattgaggggataaacaaggaagaaatgcaacgtataaatgtgttcccagaatgtcaggtaaaggggagatgagtaatagctgtggaaggattgggggaagggtgaatgatttagagctgaggacggtttctgttaaggttgttttaggatgtgagaaattgaacttgctgaagtgctaattgctaagaaccagcagagagggagagttgaagatgtgggatggggagcagcaactgaggaggtgggagaggatgaggactggagcacaggtgttggcctgtgtcttaggtctttccttcctccattggggaaaaaggaaagtggcaaaggtgtgctgggatacagagctttggaggttttggcctcrggtgtttgcaagcrctgtactaattctagccaccttctcaattaaaataagaatacaagaatgaaatgcagtctcccaaatctcttttctttgccagcttatacatttatacacctcactgatatgtcttttgatgttttaaaattttggacagcactatttttaacttttacaactataactattagttatttactagttatagtataaacttttaatatttactttttataactcctagatgtcttgtagatcaaaagatctaaagtgtcatctttgtctattttatatcttgtttaatagtaataaatgttttagtgaagcataaacctagaacaaaaatagaaaataatcttaatagggtgttggggaattttatgtgaacacttcatgtgtctttggaacagtacaatgtaaaaaattagcacagccttattgcatgcacaaaatgtgaaataatgtgaatcttccccaaataacaatttgtcaagaatcacaatttcaaagtagtaggcttagtaattctaaacagtgatcggtagaatctgtcatcatcctcaattaggattgttcttgaattttgtgaattttcaatcacgagtgagatctttagtccattccttaaataacatgtgactatcttagaatgtcaaagagggacacagaaaactagataacaactcctgaaattaagtttgctgtatggcaactactaattgctctgccagttgtctgactgtagaataatccttgtgaaatattcacttctatatgggttggagcctgggtaagtctgagccccagtgtattttcatggaagtcactagaaccagatgtaaatcctgggttctctagagaaacagacaaacagaaccaatagaatgtatagagagacagacagttattttaaagagttggctcatataaacgtgggggctggcaagttgaaaatttgtaagacagactggagacttgggcaagagttgataattttgagtctgaagacagtccagaggccgaattatttccttttcagaggacctcagtcttttctcttaacgtcttcagtgattagatgaagtccacccgtattatagagagtaatctgcttttcttaaagttcactgatttaaatattactcactttaataccttcacagaaaaatctagtgttggcttatgatcacacaactgggtactataacttaggcagtctgacacatgaaattaatagggtgttggggaataaaattaacacagctgtcatcaagcctccatttcctaaggaaaattattataatccacataaatatggtattttgcttttgaatctctctaacagagtctgggtctcaaattgtcttcatgcacagtgtcatgcttaccctcacaatcacttactggaggcaggsaaggagggtgagtattccttgccaccttttacagatgtggaaaaagaaactcagagatgagacttatctagggatacagcttgtcttctggtctgttcaggctgctataacaaaaattccacagactaggtggcttaaataacaaaggtttatttcacagttctggaggctgggaagtcaaaaccaaggtgctggcagattccgtgcctggggagagactgcttcctgattcataggtggctgtctttcattgtattcacatggcagaagagatgagagagctctctggggcytcttttattaccatcacattggggattaggcttcaacatgtaaattttaagaggaacacaaacattccatccatagcccagctagtatttgtgggatcagagcctgagctggaccccggtgttttcctcttctgtctgtccagcacatcacactgcttctttggctagttgatctagttaattataggtactgtacagatgcagaaagkgttaaaccttgaccacaaggtttatccttaaggatgatcctcactcctgggctcattgttgatacttctttgtatttgcttctttagcctcattgtgaattggcattgatgatgaggaagagcttgccttcctcactagactgagatttgcaaatgcgcacacagtatctgcctcgctttttgtgtctgtagtgcctagacaaggccaggcaaataacacccactaaatatttgttgaaacaaccttgccatatttgctcccttgaaatagccattgacctctgagacaccagcaagtgggactcgtgttattccagtcaagattatccagccttcgcaacatgtaaatatatctggagcattttgacggtaataacctaaaagtcaccggcatttctcacacttggtcacttaggactgcaatttcctggaaagtgctttaaatatttctggagattgccgggcatggtagctcatgcctgtaatcccagcactttgggaggccgaggcgggcggatcacagggtcaggagatcgagaccatcctggctaacacggtgaaaccccgtctctactaacaatacaaaaaattagctggaygtggtggcgggcacctgtagtcccagctactcaggaggctgaggcaggagaatggcatgaacccaggaggcggagcttgcagtgagccgagatcgtgccactgcactccagcctgggcaacagagcgagactctgtctgaacaaaaaaaaaaaaaattctggagatcatagagcaaacaccatatatgatcctaagcaaaatgaattggtccacttccgtgggacagttacccattttccccttttcctcccsttgtccccttaagttcrgcaccaccatgmccttcagctatgattgtctcccattacagctggtgggtgcccccaagctatgcagcctcagggtgttctgttgtagtgggtgctgacttgggagggcaacgggaaatcccctcagtgtatgctatggtctgaatgtttgtgtctcccccagattyatatgttgatgcctaatccccactgcaatagtawtaaaagatagggtctttgggggtgattagaccttgaggrcttcacccttacaaatgggatccatgcccttatgaaagaggccagaggaagctcatttgccctttccaccgtgggagaacacaggagacggagccactgtgaggaacaggccctcaccagacacagaatctacaggcactttaatcttggacttcccagccccacaactgtgagcaataaatttcagctgtttgcatatcacttggtctaaagtrttttttacagcagcctgaatggaccaagacagtgtgccttgatatccctaaatactagagattttttagggaaacatagctttattttttttgcccctctgccccacaactttctgtaggattcacatgggggtgttggacatggagacaaagctaagcactgggaaccataggttctaaaaatcccaacctttccattgaccactaaggcattatttattgtctggtgccttgcagttggcaagccgactcctctttccttcagtctgagctttctcctggaggtttctaagttcctcatgcaaataggcttctggcagatgtcctctcagacatatctgttcaaaactcagagtgttcaagctgggaccttgtttcacgtcatctggaaaaagagggaggcaacaggaagtgtgctgagtcgccagggaagccacaatcaacaatttcccacaggtaattgacaaagtggatcaggcacatgtaggaagtggaattgtggtaactaaattttatatattttatggcttgcagaaatacttttctatattctgtctcatttgatacagcctttaaaaaggttaaaaacgtttatcattgcccacaatcacaccgcttaagctttacgagttaaatgtcctgttggcaggacagctgtgttaggtttaaatgtatctccccatccagctgtcttctatcctggtagactagtacaatcctgtgatatttagctgagaaactataatgtgctgggagtcgtggtaaaccacatgtggatttgggtggatggtgtttcagagatgtgccgcttctggaagcaaatgttctgacaaactgccttcttggaaccaattggtgcaaataccttgggcaccacagttcgtaaagagaactgtcgaaggcggctggaagggtttagcagaccacaatttcgcaccgcaaatataactgagcatgcacttttgaccatggtgtgctgtgtgatgttagtagaggaaggggcactggcggtggaggctgggggggacttggtttgtacagcatagcaggaagagcactgaggcaggatgcccaggggttctagtcctagctcagaccagctgcatggcactgaacaagtcccttcagttccgcaaagtttagcttcccaatctaaaaatagagataaactgtccagtccatctcacaggtttgacagggcagtcaaattaaataatatatataaacgtattttggaaagtataaaatggtacacaggtgcaaagcatcattctcatggtccttaattctttcatcctcctgtatatatatrtrtrtatatatatatatatatatgtatgtatgtatttccaggtgtaagtggctttgggattggaagatagtcrtatctttcaatcttaagtttccttcacgtggcctcagaaaactgcccccagtagttgcatgttaaactttgccagaatcagtttcccacctggccttaagtgctctgctctgtattggtgttgaccttaggcgtgagaaacatgtgactgtaatgaggatggatgctttctaaaagctcataaatagcaactttttcatactgaaatttgctctgttccattcttgcccttgtgactttacagatgttgtattctgccatgaaataggttatagaagcaggtttaaagtgaaggagactatgattcagctgccaaaccaaaagtgaaacctgtccatgtggatatagcagatgtcagtggaagaaaggtgtgcagaattgaaaagcttgctctccgtggtttgagaacacactgtcctcttgtgggcgtctctggcagcccatgatcggtacacttccttgaaccaaatagcctatcaaaatattatctaatacatttctacttttatttactcaatgagtaattactgagtgcctactacatgccaggaactgtggccctgatatgtttcaaaacccataaacatgcatctaacttatttatgtaggatctccatcaggcactatcttcttttaacctttccagtgaaggttaaactctgaccagaggaattgagcgtgtttacagaaaatcaggaatggaacagaattagactgcttttccccttacttcccactcccttacagcatgttccattggtacttgagtctagaggcatccagaggtgtaagaataaccaaacacaacaaagattaggagtaacgaagtgttttcatgcagtgccgcaccccagtgaggtgggctggctaaaaggatgtgatacaaactgatatccagggaatggcaaagaggagtagctgggcctgtccatcatctcttatcatgactcacagcccttgtttaaggaatttgaagtctaggtggatgaaagggacatcaaacttaaaatgcatagctgcaacctactagatagaagctgagaaccctatatgtggatcaggcagtcactactggagttcaggaggggaataaggcattggcccctagagaagacatcacagatcaaacttgagctagacttccttgaggacgggtaggatgtagatgataaagattcagcttcaggcagtaagaagtgaaaagaaacatactttttaaccagtatgtgttgagtggagggtggttatggggaagggagggtggcagggaaggctggatgcatttaaggctgtcgccaagtttttctgcttaaagagcatctgggcacagtggcacatggtctatattactcagggccctaagctcacctgagaagctccagcctcccttctgcaccttgcccacagaatgttctgtaacacttctctgtccttgcagataaataggctgccccaaatctagcgataccctcgatggtggcaggggtagtagcagtggcattggatgggacggtgggttggatatttccctttgtattggtcaaatacatgcacagatggcaccaacaccacggggatctctggagatgaaggtaggtatttcttcagtcactcagcacttracaactgtcagagagggccgggcgtggtggcttatgcccgtaatcccagcactttgggaggccgaggcgggtggatcccgaggtcaggagattgagaccatcctggctaacacggtgaaaccctgtctctactaaaaatacaaaaaattagctgggcatggtggcgggcacctgtagtcccagctactcgggaggctgaggcaggagaatggcgagaacctgggaggcggagctggcagtgagccgagatggcgccactgcactccagcctgggcgacagagcgagactctgtctcaaaaaaaaacaaacaaaaaaaaccaaaaaaactgtcagagagataataggagaaatgtgcccctgcactcgcactgcacagcatgtgccggatcatctgtgaaatggatctttcctctgggagctccatcttttccaggtgattgttcacttggacatatttgattataagctcccagagtgtcagacacggacttctcatggcaagttagacgatcccaggtgcccagtgggtggcagtgcagtgagtggcaggaggaaaactttcctgctggcttttggtctgaccaagacagagtgatacttatccagggcctaaaataaccatagcaataggccttgccagaagggatctgtggcaggctcctggcactactggtcagttcccccagtggcctgttcaagtttttctttgcatgagacagaggttatggctgaggaaacagccaggccaggaggctagcctgccctgcagaagcccaggggaccttcctgatgccatctttctggtatgacagctcagcaggcctgtgtcaacaagccctgcacggtttggacaagatgtgagtgactaacgttttcctctggagcagcaggaatggatgggcctgctgggaagaatccctttgctgtgagctacctaagacgcctggctcctgaattgaaccagcaggtcccttctctgtatcttgcttgctttcctttaaaaaaaaaaaaatcctcagcagatgatgggaggaattatttgctgagtttgtccagactctgaatagcccttggtcactgaagtgtgcaaaaacatggcaacaatgcaggtkctatggtctgaaaatgtttgcaaaggaaggagaggaaagagcagttattctgacagtaaatgatacataatactaatattggaaggattattttttccctgtgtggtcagtgaatagaatttttggcagtcgtctatcatttaactaggtctgtatagagcacactggagcctggtaaggacctctggctttttttacagtcagagttttggtgcctaggggtctgggctgtggacaggcgagatgtacctgcaggcagggagtggtcagcttgctctcagcttgccagatccgtgactctgacgagagagttatcagtacctacagagcttcctcctgcagcctgcctacccacccaggccatcttctgacactgcctcaatgtgtccatgctccaggcaggtcagatcacctccctcattcggtttggacatcaaggagactgtgtgaatgaccatcagcctctctccagtctacccaaaggtatcaggtatccagcactattctgatggagaagcagtaagagtgagcctaccttagatctattaatagagctcattcagccaaggaaaaggatccaactaacccagatgactacatgagcctaggtcattcacatgtagctttggtgagtaatgagagatgcacgcatgatacccctgctcctgtcctttggtgccctgcacccctctcaggtgctctccagagtcagcccttctgactgcagggcagaccccaaaaggagatcagcttttcacctcgattacccctagtacttaagacatttgccttcatgagtttttggtaatcaatattgtacagccagtaatttaattttttcatggtatcaatctgatattaaagctctagwatctgggaagagcacagcaaagcttacctgactgactccactattatatttggaatggataattgagatataatttaaagggtagaatatattctttctataactgcaaaagtttgctataactcacaaaaggaaatacaaaattgagtaatagtgttggaggagaaggaagcaaatatttattttgtatctactatgtgccaaacactttatgtattgtattttgccctcagaaatcatatgcagatgattctattttacaagggaaagttgaggtttagagcaggtgagcaacatgccaagatggaacagaaggggcatagaacctggattcaagtcagagcagggtttacaccctcggtaccatttagatgtgggtcagataattctctgtggtggaggctgcatccctggcctctacccactagatgccagtggcatttcccccatttgtgacaacagaaaatgtctccaggccaggtgcggtggctcatgcctgtaatcccagcactttgggaggccgaggcgggcggatcacctgaggttgggagttcagagaccagcctgaccaacagggagaaaccctgtctctactaaaaatacaaaataagccggttgtggtggtgcatgcctgtaatcccagctactagggaggctgaggcaggagaatcacttgaacccgggaggcagaggttgcggtgagccgagattgcaccattacactccagcctgggcaacgagcgaaactctgtctcaacaaaaaaaaagagaagaaagaaaacatctccagacattgtcaaatgtcctctgagggtcaaaatcagacccgctgtggagacccatggctctagaggctttgttttttctgccatcacacactcggagggaaatttgggggtaactttaaggatgctatatggataacttatgtttcagtattttttcttatgaagataataaaagctgtcgtggatcatttcgaaaataaaataaagattgtttagaatcgtaccacctagagatacccactttcagcatttggctatgttttcttccagtctgttttctgtgcacacataggtagtttttaaaatcatacagtaaatcttttatctctttttatacttaatattatatcaagaacctatccctatattaaaatcagtgtaattatttttagtagctgcattatatcctattatatgtttatgcctcaatttactcaagcatttttgcaaatggccatttagagtttttccagtttatcccatcataaacacagcttcaatgaacatatttgtgcataaacgtttgtgtacagtcttgataaattctctggggtatatatttctatgaaaagaagaataattgggtcaagctctgtacctattgtttaggctgcatttcctacatactgtcaggttgctttctgtaagtgttggacttatatggctgtgctttctctctcacttgtttgtgggtgtcttgtctcacttgttaactataagtattaactttttaaagtattttaatttgataggcaaaaatggcatttcattgttttatttgtgtttatttgatgaccaatgaaacagaacatctcttcctattatatagctttttgcttttcttagkctctgaaatatttgttaatacgatgcattgcttctttattagatctaatttttgtctatccactttaagatttgtttctttccattttcacatgtagacttaaaactacagttctttaagctatttagcagcagtagaggaagacttgaggcaagttggaggagagatgaaggggagtgcttttgtataaattggagatcacctcaactatagaattaactgagccctgaagttggaagaagagggaagaatggcgagagaggaggtagtgcagaggtgtgcggtcaggatttcctgtaatggccaccaggtggtgccatctgcccgggacgattwgatgtctggtgcaggagagcggagagctggggagagtattaataaggtggtcacaagygaggtgattggagtgccattcatacatgtgggacattagttgggcctctgtaattaacctgtcaatgatcatgagttggtgcacgtgtgtttgtgtgtagagcggggaagagaagattagggctgttaaaaaaaaagaatatwtatatatatatatatatatatatatatatatatatatatataatatataatatgttatatatacacatatgtatacatatatacatatataacatatataatatatgaatggcagctttattgagatataattcacatactatacaattcaacaatttaaagtatacaatgtaatggtttttggtatattcacatagtagtatcaattttagattttttattgccccaaaagaaactccattccccttagccattccccccatctctgcctccttactccttccctcagtctcctttccccagaccctggaaaccactactctactttctatgtctgtgaatttgcctcttctggacatttcatataaatggaatcagaataggtggtcttttgtggctgtcactgcttgtcctagccaatgctataccagcttgactttgtggcaggaggcatcagggtatccagatagacttactgttttaaaagaaacagcatttccaggctggctaggacagagaaaactacstagaacaatacttttcctacctggtggatcatcagaattacctgggaagcttaaaatgaaagattcctggcccctaatctctccaggaattcaaatatggtagttccagggagtctgagctgcttgggatttttttcagtgccaccagtgattctaatgattgtctagctgtaagcagtgggactcaagttttgaacagaggcatgagaagaaaatggcatttccctgcagatgggctgtaccagctgcagcttcaagtccagtgcctcttgtgggaaaggagccactcccttgtcattcgccacatctacactgcaacgctggttyatgtcagactatcatctttgactcggcatgacaacagtgcatatttgaaggccatcaaaccaatgatattagccttgtttackgtttagctggaaaatatctcccatgtggtatagtaagaagagcactgaatttgaattctgaagctcaccagagtgttccactgactagtctcagggctactgtgagcacccagtgagagtggccatgagaggtgacacactgcacaagtcagggcactggaatcatgggacaagatgggaccttagagaatgtcttgtctgcctgcctcatttcatagtagagaaaatgaggccctgagaggtaaagttcttcactgaaggtcatacgccagctattagtagtgtagccagcaccagggtgtcctagcctttgcctccttctgtttctcactgtgccctccttccctacattgctctcttttgggatctgaggaatcatattcaatcacctttcattttcagaaatgaggaaacccaggcctcgtttgtccatggctacaaaactaattgatttatatttgctttggatgactaggagttaaaataatgacaggtgaaaaatccaagatggcgtttgtataccgcttttaagagcaatccacagcagattcaagttttgtgaggcctgaaactcatgcaatttgaaaacttttttcaagaaaaataacacacaattgcaaatgaaaagttaggttccaggccttggaagcagtctgcgcccatgaggggccctcattcacttcactataaatccacctccaggagcagtaataaagagatccctactcatgtttgtgctgctaggttcttctgtttgtataaatagcatgtgtcctgctaagtcacctccactcttataaaatggaggccattctgccaacacatgtgtattgaacatctctttatctgtaaggaatacagaagggaaccaagaaaggaaactaagctaccatctctaactcaggagatgaggcacaaaggcagaatggaggaattccctccctgctgtggtctgggccagggtgcctatgggagcccagcctctaggaggtctccagttttaatctcagataatcttcctcttgtagtcattcttctccctctgcctatcaaatgcagatgttgagatgagtaaaccctttggggtttttggatgaaaaacttttcaagatttacatgacatttttggggttgtgcctacccaaaaaagtcttatatctcacatcactgccttagaaatgaattaaaggtgcatttatccatcagggccacattcccctaaaatgcacctaatagcactgaaacaattagaataacacagggatcctgaataatccatgcctcttgtcaagaaatttttttctatttttatttttgtaaaacagcttccttatccagttgtgtttagtttatttaaacgatcacatcagcattaggttctggtttggggtttttttttttatttgtttgtttaagtytcgtttctgacactttctgaaagatgcaacatggagataggccaggagggaaactagttttagggtgttctcattacattcattttatgtcattttttattattaggtttacattattgaattcctgtggagaagaggagtcagagctgtgaataagtcataagtccctataggtaaaatcaagtactatttgtctctgatcaaaattgccctttccattgataggagaaatgactgggcctccttgtcatccagagttcattttgtttttcgtggcagtttcactgtctttgggaattgagctttttgaaatgttaaagcacgagaagcatgaacaccttggcagggtttgcagtatctccttctagtgcaggatggagggctccagagctggcaatttgaggaatggctggtggcttctgatgtcacctgccactcatgtgtccctccctgttttgaatcatggatctcaaacatcctcaaaagctcttccctggtaatttcaaaactctgaacaaatcaatcctaagaaaaaataaacaaacatgcagaagagcagaaggatatttaggatatggttctaattaaaatttttaagttttcctttttcaaaatcctgtatgagctattaaatagggaaaaacaaacttctgagtaggaaagaaataaaggccattacccttagagattttgaatcttacaataaacaaataggtcttcttttccccgaatgtttcttcttatcaacacaagggagttgagtgatggctacagctctaaaatactgaacatggctgcctactgaattcagcatacatacgtagggatatgttacataagatgcacatacatactttatttctattagcctgtgaaacagtgaacatgcctgctcttataaagcttctagtaaaggaactacaaaagaaacacatctactgggcattctcacactggctgaggtaggttggaaccatctggattcttgcctgtggcatagttaacctcgtgactatccagttttccaattatccaggcccatttacctctgctcccactcagcgagccctttggctatttctctgttcattggcacctaaagtcaaggagaaagaaaygaacatttattaagtgctatgtttgtaccagttaatcttctcaatgaagtattattatcacccctgttttacagagaaggaaactaatattcaaagaggtaagataacttgttcaggaccacatatgtttttaagtatagagctcatgcattataaagtgaccaccctagctaacatttattaagcacaatatttgccagaattcttgcaaaaagccttacaaggactattttattttatcctyataccaacggcttaaggatggtattacttaagtattcttgttttacagatgaggtcatacagctaaggtgatgaggccaatattcaaactcaagcatctggattgcaggctgcacttttgatcgccatgtctagcctcctctatacacctgctctgaccgatttggtattcaccacgcccaagaggctactgaacacctgaaatatggctggctggagttgtgatgtactctaagtataaactacacaccctatttggaagacagtatgcaaaaaagaatataaaaagtctctttggcaattctttatatcaattacatgttgaaatgataatttggatatattgggattaaaaattattaaatttaatttcactatttctttttactttttgaagtgagaagactagacaatttaaaattacaaatgtagttcatattctatttctatagaacagcactgctatatactattttaaaataatatataaaggggactagaactgactcaggccaacattatttttcatcaatagttctagttaaaaatttggttggaagtgggtggatgggaaggttgaagcccatttttaaagataagtttggtgtttttatgaatttgagttatgtgtgctttcttcacccgttttaccatgtgtgggtaagagacttgccatttttaagaatcagaagaatyctgtgaggtgtatttccagtgtctgtgtgtagtgctgcagctgtctgagcgtattgccggaggcacctcctttggactttaaggcacgaattgctcatcactgtccacacagctttgtggccgcctttgagtctatctcttttaacataacattgagttctggctccaggtctggcacaaagttgataataactagtgaatactgttttgtttggtttgttgtagttttattctttttttttttttttgagacagagtctcactgtgtcgcccaggctggagtgcagtggcacagtctcggctcactgcagcctccgcctcctgggtgcaagtgattctcctgcctcagcctttcgagtaactgggactacaggcacacaccagcatgcctggataacttttttgtatttttattacagatggggtttcaccatgttggccaggctggtctcaaactcctgacctcaagtgatccacccgcttcggcctcccaaacttctgggattataggcatgagccaccggacccactttattcttaatacctattgccaggcagaggttacatggatataaaagagagaaattgggaatatttgtatgagatgggaaaccacaggccaggaaagcattaccaaagggttgtagaggatttagtctgggcccctccccaacgtacacaccacgtgccttctcctctcgaggctagaattaaccctcaccccaccaccagctgccaaaaaatagtagtagctgctgggaactcagaaacagaaaagaattttctatgagattactgtctaaaacaaatgtttattctagccatttataaagaacacttatggatttacagcagcttaggatagtgaaaaagaagtagaggaatggtaattaattcaggtaygaatttgtaaggccaagtgagaatcacgttccttgtcgtggcccaaaaggccttgtcagactcagatggagtctcctcrttttagtctacagacatatgggtggaagtgacatgatggaataattacattcccaagccgtgtacccaaaatctgtgctaggaccactcccctggccagtgcggaaccaggtcagctggtggaaggggctctgaatgggcacagcgctgccaggccctgccactcccacctcatcccatccagaatgggtccaacacagttcctgctaacccttatccacacctcctcaaccatagtccccagtgacctgcttcctctgtgaagcccaggctgactggaaggtgaccctcaacagaaaccatcagagagctttgggtctggggcggagggtcacctccactctcacggtggtgtcttggtgttaatgtcatctgttggctcagccattcattgcttctctcttccctaagctcctgcagatctcctttactcgtttcttaagtgtaggaagctatctccttggatgctgggtcactaattataaacttcctatgcatttacctggctctggtttggcccctaatgtctttatttctgcctgcaggattgtcattgccattgccccttttccttacctgggaacccgacatactctgcttatcccttgagctggcacaccagggggcctggaattcctgttggtgaagtcactactttaagagaattatcccagaaatcctctaagttgcaaatcctacaggagcagagtactacatgttaattagcactcattatcatgttagtagagaagcttacccaaaggaatgatacataggacctgctatgtcattgagaacagagaggtggggctcaggttctggacaaatgatgtcataagtaagtgtagtttcagaaaggaagatgaagtgggagctttagataattggaggcggtaggcctgtatatggaaccagatgctagagagcccaagtccatatttttactttttcacagttttgtgtccatatcctcaccgaatcccaaccaccaccaccacagttctatatcccgttattttttcaataataactgatacctcaacttaagctccactctgaccctcagctaagccatataatttcagcaagaattataaaataaagtttttaaaggacaaacatgagccttaaccttagtataaagacatgcttagccttcatacaaattgccaagttgagacttcatttcagacggcaaataaaagttacatgaaggagctaaaagtgctattgcaaattacctatttgaaacggctttttcaaaacctgctaaattcacacctctcctaaaaatgcttcacttccagattattttattttggggttttgtgtgtatgtgttagagggggtggggtttgtggtgactacagaaaaattagttaaattcataggataaaatttgaacttttgcaaatgagtaaacagccaaaacaaacaccgcttcagaaaaaaaaaaaaatacacgttttctccttttgraaagcaagcaatgcttaagcaaaataccttaaaagttaactaaaaagcttttctaaaataaacaactctgcttgtgatcctaaattgggaccacatgtagatgtgaaagctacaaatgcagtgcactcagaatttgcgtctctgccttcactgtttgcgtgcctctgagtagatgatgataatgttggctttggtccccaaggagcctgagttttttagatcctagtatgagggggaaaagcagaagaagaaagagaaggaatgaaaacaaatgcctttcaagacaaaatatccgaatgggtttcattttgcttatctgccaacaggctcaacccaatttagatctstcctacaaggacaggatagtgccagccagggtgtctgcccttgccggctatgtggggcagtccctgtgagggaccaggctcgaattcagagcagaaggatcactctagcaaactgccagggccagccctctgccctgaggcaagtcaatgaattagccaattcagcacagatagaatcattcctttgttttyctcaattaccaaatgctgtgtgctttgggggtcacttgtcatgtgagtttagagaatgtggatattgcaacataaaccctcaccattctaaacagcttaaactaaattctgttactrgggaggagagctgaggtgataatatccatctctaagtataaactattgtgtgttcattttcccattatgggagacaaatttctcttctccgctagtgctcatgatctcttccaccaggcacaaacatcagatgtgtgtttatgtggacatattttgtcccctattattggagagcaagctccttgagagaagggattatgctgcctggatttgtaactttgttaggcaaagcatgactttatttagttttgaattgatgaggaggcactgatgttagtaaaaagctcaaatgtcctgagccctgttgctcaatacctcaaacacaggaccatgatcaccacaatgaaaaatatgcaggatcattaatttcggctctgttaattgtgctgttaggaaatgttgactagataggaaaagcagctaacgttcatggagtgcttattacataccaggtactgaggtaagcattttacatacagtatccgatttgtatcctcccacaagcatgttatccccrggttaaaaggggaggaattggggtccagtgagattgggaggttatgagaatcccacagtgtgtggcagaatgtggacttgaactcagggccctaacaacaggaagctataaaagcctctttgtataaaaagtgctctctttctgtgggtcctcagtaaatgaaaatatttgcttttcataaataggtttgaatgttgggaccctcatttctcaccaggagtcaaggccaaaaggtcttataaataagagtgaattttgagaaaggatgtgtgaaaatgactctgttcttttcttttatctcacttcagttacttgggatggaggaagcagaaactgggagtcagacatctaaaatatgaagttccaccctcatgttggccatttctttcagcctcctttccccattcctaggggccaatctgtttctccctctcctgctctttctctttgcctctgtcttcttctttcctgtggagacaatagcgtgtggtggaactgcctgagtgcttactgagaaggagaaaccaagcgcagattgtayagaagctgacgaatgagtcctctgattgtggacaagtgatggcgctttttgtaaaattgtgtatgtgtttacctcaagtagtgaaaaaaaaaaaagaaaaaacaacttttggggcaagttggaccttaggaaggagatttctgggtctcggggtttctcttagcccccagtgcctggtgcctgcggccggtgtcgcctcagggagtcccaggctgttctgtggcctccagaaggagccaccccgccccttcctcgccccactccgctttgccttcccttagcctggggagccttgccgcctctccaccttctctcctggtctcctcgggcgctctcgcgctggcaccttcagctctgtcagagtctgaggggaaaccaaaggaggccaggcggtgtctggaatgccccatccgactgcttcaggctcccagaccgctgacaaaaggaaaactggtccgtcgctttctgaatgatgtatcgagaccgcagtgtatttttagcatctgctgtttgtggtaacataagtgaaaactgctggacccgttcccttcagctgaatggctggtattcaggggcctgtgcccgctccctgccagacgctcctcacagaactccctttttacgaggtgggcgactggctccctggcaccaggctgccccaccacaattctttattgcccagcgccagtgcccaattgcatgaatccccagggctgcaggcagcgtgaggggtgcgaatgggacgatgctggctgcgggcttgtcagggtgttcccaagttgtgtggcagagtctggagggcaggggttgtccggatgttccaaacctccagcgtgaggtgggcactcaggtgcgaaggaaccatggtggcgaggcccacaggtggcgtcccatcccagagccattttgccggggcctggctctgcagtagtcactgacaccggagatcccctgagtgacctggaaactatgagagaccccaggtaccccgacaggtcattctactaactgtggctgtggagctccagctcatctttggaagacggaaacgcactggaaagggtatgaatggacgcagaaggcctcgtgggggctctctcagtgccactgtagagtgaacacagggctggaatccaaaatagcaccaacttgctgagtggctttaggcaagaaacctttccccaggtctcactttctcacttagaatgatgaatagtgattcttgtcctactgacctcactaggacgtttttaataaggatgaaagcactttgaaactgttgaaaccataacatcmcaaaaaaaaaaaaaaaaaaaagagasagagtgacgaagtaacgcaggtcccatttatgttcttaatttctgaccaaccttaacttccatcaaaactgcttccactagccccagccaggagagccgttgcatcgtggtgggacatcatcaggctctccaacggacatcgcttatactatgagaactcacgttcaagggaggtgtttacctctaattcccacagaactagcgtaagtaaaaaatgrggcagcaggatcctttccttgcaaagtgtgagcaagtgcctctgtagagtaaaactttaagtaaaaggactacaacggcagtgacagctcctttatctgaaactgcagacttttaagaaggttcttagcagccacaccgatgtcacaaattccataaagcaagatcacctaggcactctctcggagctaattttatctcattttatatataattttaataagcctggctctctcattttctagccccttattactgaaaatgtggctcatggrccagcagcatctgcactatctgggagcttgtgaggaatgcagaatctcaggccccacccttcaccttgaatcagaatccacatttggataagatccccgtgtgtgtgtgtgtgtgtgtgtgtgtgtgtgtgtgtgtgtgtgtgtgttgtgcgggggagggtaaaattagaagagacttgcagggcctaggcgcactctcaatttattgtatttcattatggaaaggatttgggatgactagaattaataacttagaaggagtgaggtgacaaagaacattaaaaactattgcatctgggaccatttaatataggtttgtttgtttgtttgttttgagacggagtctcactttgccgcccaggctggagtgcagtggcatgatctcggttcactgcaacctctactccccaagttcaagtgattctcctgcctcagcctcctgagtagttgggattacaggcgcctgcctgtaattgtatttttagtagaaatggggtttcaccatcttggccaggctggtcttgaactcctaaccttgtgatccacccgcctctgcctcccaaagtgctggcattataggtgtgagccaccgcacccggcccatttaatayagttttatatccgaatgccctttaatactctgagaatacactgttacaacactgtatagtcattgatattcccagtaatagtcccaaattatcaagaacaggcaaagtcatattctcctgctgtttaaagtatttacctaatgttcatagtggaaaattctcctttaaaatggttaaataaatcttgatcttaaaccgatgcttcagtgatctgaatactacatgaaacagcacgttctctctaaagagataagtgagatggtactataatcggaaacctctgttaattcggattttgttttttatgcacattttagagagtcaaattatatcaagataaaatatgataacagagatttactctaaaattaaacaatgaaaaaaaccctaccagtgcaacaaaaaggccatggctgttcagagccaagtaaaactttgggggtcagaaggtatttaattttcatatttctgtttactaggtactaacaactgatcttcaaaatcatagagacaggaaaatggatttgaaacccaagggagtttttaagtaaccagaaaagttagtgccctcttctggacaagcgatcattggagttgttagaggttgtccttgggagtgctgttgggggctttgttaacaccgaacaagaccatgagtggcaaaacttggagctgaggttgatcaggtctccaaggccagggagagactcaaaccaaccaggtcaacttcccagctgaattgccaacctcaaagggatacgtacagaagggagaattggaggcacatagcagagggtgagaatgcagagaagagcaggatgcggtcaaaagattggcagatttttatggagggttccagcacaggccaagaaagagatttaagggttctgactcaaataagaccaactgtccttctttctcattcccttgacaattacatctgagtgcaactttattgccatggcaatacaaagaaagtctaccaatgatttgatatctagagcttagaaataaacagctgcatggtaccaattttattatataaagcaaagtttatataaacgcaactgggcttaaaactcatttggcaagaattaaatattttccatttattctagagacatttttagagtgccatggctgtggtggaaacataaataaagcatcatcacaggacaggattaattaattgcctgaaataatttcaaagctgtaagtgaaagatcctatctttattaatggtattcttttctcaaatcagattttgaaacctcacaagcttttgactcatctctctcctgtgcactgctagaaatcttatttaactcatgttgcagccaccctaattccaatccttgtcacttcactcctgagtttcagcaacactcttagagaagaacttcttaatttctctccaacctagctttgtacaatggtctgttctctataccaccatctattgtctatactacaatacattatgttgggaatatatcttattatgtactactggcttattgtgttagtcatgggtaaccaactagaatgaagaacgaactagagaacaggaactatgtctttcacatttatgtcgtctatagcacctaacrtaattattgctacacagtatgttgctacagggagtcttccrtggcctagatctgggctagatacttctcctctacacaactgtgacacactgccgtatcctggttacattatcagtgcattacaactggctgtattacrtttgtttctttttgtttctctatgaactatgagagcagagcctacatttatctggttcatcactgaccctctagtacctagcccaggttttgattatatattatgtgctcaatgcatatttttagattatttgttgttggttagtgcagtaagatagttaaggaggctgggatgaatagaccaaatggcatccatagcatcatattattttgtttgacttggcttcaggtacaatagatcaatataacctaaatattataatgaaccagataactgcatttggccctttgcaactgtataatattaaaattattatattttctatacctgtttaattgtctataaaattctagctcctggagtgcaaaggacagcattttttacttctgcatatctccctcagttcctacctcagtgagtgtttcttgatctgacatcattaaatgcagtttaaaaagagtctgtgttctaatctgtctgcttagtgctaaacatctgttgcttcctaacaagtgctgcattcattttaatggcactggtgcacagaggtaaacggagctttggcaggccttccataagagaaactgtttgcttccttcattaattactaatggagcattaagacacgcattctgccttgagccaagttggataattcctggcacttaatgctagggtgctttcaaaagttgagacatgtactgacacaccagagagcctgccctatagcaagcacagtggtgtctatagtgccaacattatataaagcttcaaatatatcaataccaagtgtactgatatgtctaacctttgcatctattgggttaatgtggaatcataggtatccctacastagctctgaaggtagctatcacaaatgagctggatgaatcatcagaaagatacagaaaggttaaaaataaaaggataatcaaagatttaccmattaaacacaaatcaacagagtgagagtggcaagctaatagaactataaatcaacatctgatttatcaatttatrtttagcagccaattgccaacacaattaaaatgaaacatttatacccttggatatgctaactagtacagcatcaaaatgataaaaacagtaagaaataagagaatgacagtcacttattgttagtagtagattttaacatatagccatcagattaygatagactagagataaaatatgaatatggatataaaaagaatataattataaatgttgataaattggctatatttagatgtttatgggttatataaaataccttatattacatattcacatggaaattttacaaaaataatatggtagtttacaaaagaaatagcattttttttaaatgcagatattttacagtttctctcattacaaagcagtgacctagatctgggctagatacttctcatcattctcattacaaagcaatgaaatataatataaatgtaaacaaaacaagcgaacaaccamtcgatgttgcctgaatgcgggggctagaggaatcagcagaggtaagattgtccttttaaggttaaactttaatcaacacagcacacaaagccagagtgatgcaatgtcacttcagagagaaaatatgatccccaggacactgagatctagtcatgattctactgaatatattaacatttccaatgggggaaaaaagtgtgaatccaacgaagagctggctcagccaaaacaaacaaaggcaagtgctagtgttcatccagggacaagggagcctcattcaactagacttaactaatccagcctgtggcaggatcctccttcatgagaagatggaagcatggtgttgtttttgcctggttttgctcaaatgtcatgcacaccaaggcaccttttgattgtaaaccagcctttcctgtattggtctgcgtacaccatgattgtcccttaggggagctgtgagtgtggggctcctctgtcctcatggagttggtaagtatgaaatccttctaagaaatgatctgctgtggtcctggaaaaggaagcttcatgagccttatagaatgttaaggctacaaggaaagaaagtccagaaattaacatrcattggtatgttaacttggtaacttagtaaaacaagttatggagtagaagttgttcttattcactgctgtgttttggtgctcagartaggttttcgtaygtatgagacacttaagtatttggtagagacatgaaacaagtaggaaaggacagaattatttagcaaatgctggtgggataattgattaactgtttgacatacactraaataaataacatggattaaagagttaacttacaaatagaaaattaaaagaatgatccaaatgtcagtagtacttctgaaggggcaacgattttgtgcatttagaaggataagaagaaatcacaaggggaataaaaatgacaaatctgactacataaatattaaaaacgtatgttagcaaaatactataatagtaaccagaattcaaactcagacaacatgggaaaatattttcagaaaatgcgacagccaaaggccttgcatctttattatgtaaaatgttcatacraattgataagaaaaacactgaaattccaagagcataaacaaacagctcacataaaagaaattaaaattagtaaatatatgggaagatatttgacccagctggtaatcaaagacattcaaaataaaacagtaattttaaaaaatttgaattagcaaagaaaatctaaaaattgattttcataaaacccaatgcttgtgagaatgttgcaaaagttgtatttcatattttgctgctgatggcttataaattggtacctcgtttttggaaaacagtttggcaatacaatatcaagagtcattaaaatgttttatagcctttgacctagtaatttgacttctgggaatctatcctgaggaaaattaatccaaaatatggaaaacattaaatgtctaaaatgaattgggaaacactaaatgtctcacaataggggattggttaatatgttgtagtacagccattggactaaaaactacatagccatttataattacaggaatagagaccatgcagccaaawggaaagatgcttgtgcttcaatattaaatagaaatgaatatatacttagtataaaaagatacgtagcaacaattggagtcartacaccaaattttaagtggttgarctaaaatagcaggataacagtgaccttatcttttttcataatgtgctttcagcctgtatttctggatggcaattgccttcctttcttgacccaagtcctgcccaagctccacgcccagcttccagagccctacccatctgtgttgatgccacttagtttccarcttttccaagaagccctcccatcccatcagccaaatggaactctccctttcccatgctctttttttttttctttttttgagacagagttttgctctgtcrctcaggctggagtgcagtggcatgatcttggctcactgcaacctccacttctcgggttcaagtgattctcctgcctcagcctcttgagtagctgggattacaggcacctgccaccatgcctggctagtttttgtatttttgttttttagtagagccggggtttcattatgttggccaggctggtcttgcacttagacctcaggtgattcgcctacctcggcttcgcaaagtgctgcaatgacaggcatgagccaccaggcctggcccctttcccatgctcttgtgatgctgtattaacatttcttttacaggataatatacartttgccttgtatggaaataatatgtgtacagtatgtgtctgtttctgcaactaaatttctaaacccctagagggcaagaaccatttcatttatttttctctccccacagcagaaggcacagggcttttcctgtgtgatatgcctgaataaatattggttgaaattaattgaattgyactgcaatgaactacttctgattccctcgcaggtggagctcatgaaggacttcagcatttgggtccttttggcaacatccccaacatcgtggcagagttgactggagacaacattcctaaggactttagtgaggatcaggggtacccagaccctccaaatccctgtcctgttggaaaaacaggtaacagatatgcctttgggttcccatgaaaagttggggctttggaaggaaatcagaaattctaacatcagctacaaatattcccagaaattgttatttccattctgatgagcccatgtgtatttgtaagtagatgggaaggggaaatttattctagaatttttatatgagctctgtgttcagacacacccacataggattttcccttgccaaggctttactttctttctgtgtctccccttctttgggaattgatgcacttttctgcacttgctactcttttttttttttttttttgagacaaagtctcgctgtgtcacccmggctggagtgcagtggtgtgatcttggtgcactgcacgctccgcctcccaggttcatgccattctcctgcctcagcctcccgagtasctgggactacaggcgcctgccaccactcctggctaatttttttttgtatttttagtagagacggggattcagcgtgttagccaggatggtctcaatctcctgacctcatgatccaccctcctcggcctcccaaagtgctgggattacagtcgtgagccactgcgcccggcctgcacttgctactcttttaatgaaaggggaaacacttttttttccttttccatgatacaacttctgctgagttttaatgtctttggaactagttagtttgtggattatccatgcctgtttgttctcctcgttgatcatgacagtcaacattctaacagtgtcatgcatcaacaccgagttagcatctatcctaaaatcctgtttatttgggggccaggaggtggcatgggagagaagaggwtcaggaagaagctggttaaggaagaaggttgaaattttccatgttgttcatgcatccmacccactttcctacccactaatgccatagagaatggtgagtgggcttcacttacatccggctttgagcagctgaccttggtggttaagagtagtggctctagactctgactacctgagttcaaactccaggtcaacctgtgtgaccttaaacaagttaattaaccacttcgtacctcaatttccttatttgcaaaatggaggtcattgtgggaattaaataaaattatccatgtaaagcattttagcacagcacctagcacagagtaaggactctttaaatgtcatcctgattataattagctttgctgcccctagtaaataatgcacctcttaccttgggcttgtgttagcttctagcaccagagtagtcttttcctgcaagcctaataataataatagttggtatttatcaggttggtgcaaaagtaattgcactttttactattgctttcaataggaaaaactgcaatacttttgcaccaatctaatattatttctactttatattaagaaaacagaagcttagagagtagcttgcataaggttatccaggtaacaagtagctgaaccaagactcaaacccaagtctacctgattaaggactgtgtactcaaccaccaggacatactgccttgctctgaaaattgtgataacattgactactcaactttttttctttttctttttcttttttttttttttttgagatagggtcttactttgttgcccaggtgggagtgtagtggcacaattatagtaattctgtgcctcagccttccaagtagctgggacaacaggtgtgtgccaccatgcccagctaatttttaaattttttgtagaggtggggtctcattatgttgcccaggctaaactcaaacttcagagctcaaacgatcctcccaccttggccttccaaggtgctgggattatgggtgtgagctaccacaccgagacttttttttcttatgatacccataactagtctgacatcagcttttcttaaacacaatgcaggctgtctctgaaagagactgtcttagaaaatatgctcctcctttcatttaggatgaggcctctgttttccgtggggcacaaagcttccatcttgaggcagaacaaccaaagtagttggatgtgaccaagccaatgtgtggctgctgggccaggaaggcaggaaaacctgaatccctgcctggctctaatcatttcagccaccttctacttgtttgtagggttttggatgggtaggaagaaagactagttcagagtttagagagcgacagtctccattgttaagtccattggatgtggtacagtgcagtggttcttaaagtgtgattccaggaccaccagcagcagcagcacctgaaaacttgctaaaaatgcaacttctcagtccctaccctgattcaacctattgaatcagaagattctgggggtgggacccaggaatttgttgcaaccagtcctcctcatggttctagtgcacactgaacttagagaatattataggagaatggaaagaggtccagagtttgagccaagagatctgacctctagtgttgactgtagtatgccactttcactttcttgagccttaatgtcttcacctatggaaggaagacataggcaatgcctccaaagagcatacagtgtagttctagcttgtctgaaaacaaaaacaataaaaacacaaaatcatacagacctgtggaatcaagctctagtctgtgcacttaggagctctgagaggacagcaatcaagctggcctggtagaattggacaaaatcccaaatccagacactttcttgtcacaggttgtctgccatttcctttgctgttcttccatgaaactaacatattccctcattctttgttctgccacaatctgcattccaagaatgaaatcgcttgctaaatttagccattatttgtgaggaattgcttgaattatgacacaacacagcacagttgagcaatccaagaataaaaccttgatttctcctttcatgccatgctgtcctctgaatcatggcccactcaccctggatagagcagcagagctcaaagagtccatctcagcctcagagataggatgtgaattctagggcacatttttaagcccggagacaccttcggttcccagagcaggctttatctgcatctcagtcagggcccactcagaggtacaccagaaacaattatgaaaggttataaaggtgccatatgcagattgcctgaactctcttgaattggtatattttcctacatgttaattgctatatattgtgtaagttagataaatagctcactgaaaagtggagagccgcattagggatttgttcagaatgctgatgacttccacactagctgtatactgctaagagctgagagactgtgtactgaaagcttaagagcagtgtcaagaactagacaacctggctaattgtaaatggcccccctttcagcattgactttgatgtctcattatgtctttcaaatgagaccctccttcytccccctaaccctgcacaaaattcacaatccctcctctgtccccctttttattgctgttgtctaaaatatattagacatgggaaaaatgactcatttttagagcatcatgcctagtaataatagaatttacataaaagcagcatctgagagagatagccttctttctttggtttsaatggaaaacttgcttgatttcaaagggmagtcatagtataaactgtcagtcaaagggagataatgggaagggaactaaaacatattgcaaacctattatgtgccgggtgttctaaatgtaatcatctctattcctcacagcaatcccgtaggtaagtatttgattatttgcatctcacacatacatgaacaaacttggagagaccaagttaactttccaaaggaactaagcctatctatatcttaggagctgggatttgatccttgagctctgctcttgtctgactccaaagcttaagctgttatcacaataaaacacaacatcaagtgctgtgtggagattgttgttgttgtgtaatgtactttctccaagaagccaaagtagtttctaaactgcttgctcaggagaaaacagagtgggtcatgtgcaacagaagtatgttacctaaggaaacacttgctcttgtaacaaataaaaacattgtatggctcaacgcaatagaagtttatttttcacccgtgtgaagtcctgccagaggcgcgtgaggctgtagtgcggtggatggttcggcaccccagactgccatctttacacttgacccccacagttgccctggcaacatgtaacaagctgaccaggagatgggggtggggaatgaggagaagtggagcatggtatgagaggtttttatgcttttaggtgatgtatttcaattccaggcctgggaatggaatacattacttgtgcccacattctgttggcctccactcaggcaaatgactccacgtgattgcaaagcaaggctgggaaattagtctagctgggtgctaaggaggaaagggaagtgggtttggtgaacagccagtgagtctctgcacaggagtgggagtttgagatgagtaatcctatctaactggatcctagagggaaggtggctgctagtgttctaagttactactgatgtgaacagattctgacctttggctgcctagttgtttttgataaattaactcttagaataatgatgaatgtcttggccgttcctcaaaaacctttggctgtttgcagcagatgatggatgtctagaaaacacccctgacactgcagagttcagtcgagagttccagttgcaccagcatctctttgatccrgaacatgactatccaggcttgggcaagtgggtaagtcctatctcaattgttagtagattttgcactttggtactctgaaggtgctgatggcagggatgagcaatatgggcagaaggagagaagaaaaattatttagaagctaatttttcagaaatctctggttgacagagcttcaagtcatgactactcaaaaccacacttatgtgtccaggcagcactataccaaatccaactaaagagacagcaayctaayattgaccrtagtctccagagtcttctactctggtctgcttcacagcctgtgtcatacacatcctaaatttcaccagtgtttcatgcatctctatagggttttatcaaaggatatgattttttttaattgacacagaaaatttgcaaatgtgatctctaaactaagggagatgatctctgcagaatcaagggaataaagatgccagagcttagaaacagatatatataattctgctttatagaaagagaaaaaatattccgtgatgtgtagcagtgagattgctgtcagtcctaggtaagtgcatatagctgtcagttaagggagttgtttataagcacttggaaagataaatcatgaccatttggcatcagtgtgctaaaaacaagtcttgccaatctaattatattcttccatttgccagcattattcatttatttgccagcttgawgagggaaatgcagtgggcatggtgcatttggacttttgcaaagcatttgacaagatcgttttatgttcccctattggaagaggtggaaagatacagcctaggcaacagaatgtcaccaaaatggggcttgttaaagagtccatgtaaatagggagggagatttcacatggtattctgtgtgtcttagcactaccccactccacatttttatcaatgtttgtaataatatagaacttgtacttatcagattcccagaggatgacatgaagttggaagagataccatcagatgacagagttgggattcaaraagatcccagcagactagaacaatgagccaaacaagatcagaactgagtggggatatgtctgtgtttctgtggttgggccagatgctgaagccatgggagaaaagtggggaaatacctaggagtgttccttcacatgtaacagtaggtggccagtacgtctgtggaatgaatgagtgagtgaatgagcaaatattccaactccctcagcccttctaaagtcctcatctcttcttagctcattattggcagatggccttgcttactgctttactgggaacactgaaatttcaaaactaaactccctcctttcctcctacattgttttagagaaatcttcattaatgaccacttttatttttttcagcgtcttgctttaacatgcattgtcagttccctctgtcttcaacrtacacacatttcctgtcttaaaacaacaaagcaacaacattcctaagttaattttgcttcttccaatttgcattattccatttccttctttttcataaacagttctgtttggaagaattggtttgtggagccactttcaagcctagtagtagagcttaaacatgttgaattaaatagaaaaacatctataggttctcgaataggagactgaaataataaaagccttctataaaagaagttattttgatggcatattaaaggatgaagtaaaaggagaagagactaaccctagacaggaagaaaatatggggagtcatttcagttatgatgactgtgaacaccgtgaagaagggtgagaatccaagacattttaaagggggaaaaactarctagaattggtatacggaataaatataacatgaagaagaaagaagagatatgtcaggttcatatgaaatggacaatatgaactttttctttgaatgcattttagaaagaaagaaaagagargaatagagggaggaaggacataaaaaagagaagagagagtgagggaaagagtagattgcggaggagtactgggaagagatccacaagaggtgatcgaagcattgccaaacagaagcaaaagccaggttcgataaggcacaaagagaacacattgagcctgctgtgttccaggcactgtgctagatgctcagtatgcaggagtcatcaggacatggtgctggtcttcagagagcttatagtcccacggttgagatgaattgcatgaaaatgaaatgaacccaacttagcaccgctccacttcatgtttcgtctgtattctgagggccaggggcaattattagggaagatggaagacaagggtagaggaagatccagaactgaggactggtgtggctgattggggtagtagccacagaggaagtcaaaggcactaaggagggcagcactgaagtttcaggtgggaaagtcttcagcttcaccagtaggctaggaatgagagaaagaaaggagggagactgagtcaaggtgtgagtgaaggcaaggagcccagttggtggcatgatgaggtgggagggatgaaaacatctcttttcagctctcttcatctcttcttgaaaatcttcacagatttctctcatcaaattccactcacttccagtgccccagtatgaggccaaccacggtccttcattctctgtgcttccttctcgaaacactgacttgagtttctctcagtgtttcctattctttgtccacattagagctaaagactagaatctaggatcaaatgtaaaaggaaaatattagagatcaatgaccaggaacaatgtttagataccttttatcatctgcaattatgtgtttacttaaacttaggtctccttgtttattttctcattactacctaccagtaaaacattgtttccttggttttcacatggaagtgggaattgwgtatgtcttgcttttctaaactgggaaccacaaaccttcctcagtgcttatatggaatgacagtctcaagcttgtcttcagcccagccatcctttaagttaacagagtcatcatctttcatgatagaacagcacaaagaccctgcttccttatctgctaataacgcttccttgtttttgacagtagctggagctgagctgcatctttaacagtgattcacatattacacatttcagtgtctgtcttgtttcctgcatttctctcttcgttagtgcatcaagacacatttattaaygacacatcatatgccttccgggccccgtgttaggtaatgggaatacaaagatgaatgataatagtaattgtattacataatacataatactatataatacaatagtaaatagtaatatttattgaccacatactatatgccagactcctttctaaatactcagtaatcttattcaatctgcccatccttgtcattctcactttccagatgagaaaatgcaggcttggggagctgaggagcctgctcagcccacagagctgggatttgaaccccatcatctgactccagagtactttacaagctgaatacattccctatcttttcatggctcattgctcctaacctgtcctgtgtggtagtcctattgagtcctaccgagggctggctgccttccagacaatgtgtgtgactacaccagtggtgaccacaccaatggctggctcctgtacatgccagctacccactccccctttacacattaactgctgagtgttatttacttaagaaaaagttgtctcaaaaagcaaatatttttcctttccaaatgctttcacaccttttcatcagtagctgatcacagccagagcctgagccacggggatatgagggaccagacccctccctgacttgctttgtcattcctgaccttaacatgtttgatgagttgaatgctcttcaatgtggatttgactcaggtttccatgtgattagacctgcttagtattttatgtcctacttagtattttacatcagcaagcacatgatgtcagggaagtttgtctcatgactggcagtgttcactttgttaaggtgctgccctccaggtttctctggtgtaaaattcccttagaaattaataggccgggcacagtggctcacacctgtaatcccagcactttgggaggccgaggcaggcggatcatgaggtcaggagatcgagaccatcctggctaacacagtgaaaccccgtctctactaaaaatacaaaaaaattagccgggcgcggtggcgggtgcctgtagtcccagctacttgggaggctgaggcaggagaatggcgtgaacccrggaggcggagcttgcagcgagccgagatagtgccactgcagtccggcctgggcaaaagagcaagactccgtctcaaaaraaaaaagaaaaaaraaaagaaattaatagttactctgtgggaagaagttttggggctgtgtaaatattctgctcctcgttcaacttttaaccaacaaatataacatccattgatgatgcttaccagattcaataatgatgatagctgcaaaatgatgattttcttactccrctattctttctgcatttactagttgacattctattctaagcaagagtttcccctgctgttctatttatttatttatttataaatgtgtttatttatatagtataagtatggattcatggattccataatgcatattattatgtattctggtgttcaaactgtcctaaatttggccagtgcgagtctcctcaagctttcttttctttccttttgacaggacctcatcatttttttgagcacttctttattttctgacctaattagctattccatcttcacccatccttgcactttccttcctagccctggaattaracttttctccaggaagctccctggctgtatttaggagtgtaatttgaaaccaggatctggacagttgtccaaaatcttgatggcactatggaaagcccttttaatgmacttgaacctgctactcacakggaaaacaggctcaccactccccaaggaatcaacaaggaatgggcgtgaggagagatagctgatttcttttcattcaatttgtatgcttctcttacccataccatacctgccaatgccttcaagtccatacaataatagggctaattaagaatgtcccagacactttcatgcaggggtagggaagcattatcctgctaatcctaaccctagctcttaaggagacacagggaccatctttgagaggaagattagccaggccttttgcatttcttttttttttttttttttgagacggagtctcgctctgtcccccaggctggagtgcagtggcgcaatctcagctcactgcaagctctgcctcctgggttcatgccattctcctgcctcagcctcctgagtagctgggactacaggcgcccgccaccacgcccggctaattttttgtagttttagtagagacggggtttcaccgtgttagccgggatggtctcgatctcctgacctcgtgatcctcccacctcggcctcccaaagtgctggggcacatttctttttgaatgaagactcttatgggtaggatctgcccccaagatctcctaaagaattaaatgatgctggctttacctggctgatggcacagtggaactctgccagagctggctgacagtcccaccccatggtagtagctctcaggttcttccacactccatccagctcaggcagctgaaaacaatggtacacatgaagaagacatgtcctcaccccttcccggccttcccagctctaacaccagctcttcggatattctctgcctcaggagtttttacgttcacagaaaggcaaccacagactgtagagaatgagcctcacagcaatatcctcattcctcaaggaaatgatctgcaagtctgccttttctcccttccgatattaaattgatttattccccaagtgagcaggagatagaggctgtagccagtactggtgtttttggtagtagaggctccttcactctggcaccgcctccttgcatagttgaggttgggcaagagatatgcattgtaaattgcaggtggggtagattttaatgaacgtgaaaaatgatgaagctcattcttggcatttgtcattttcaattccaaatctatcactaaaaataagtctttataagtggacagctcagaggatacatgttgtataaacttgttccttaccagaactctgtggttgtctttgttttttttttttcttaatgtcagagtattttatttagaacaaaacgaatcacctcttttatacatcattttcctccagataaaaaaaatcaaataaataaaacaacacaagtaaagcccccccccaccgccaccaaatccccttctccctttctgccttcaggttaagtgttctgtcttttataatctcaatagaagggaaatctgttgagcatgtgtctgatattctagagctcattgaagcccactatgtgtttgaaatacagcaatgtgtggaaacacttacacaaactgtggtaacagagccctgccccccgacccaacataactttcctttctgccaagaagttttttggcagtttttaaaaggttcactctattaaaaatgttatagaccaaatggttttccaattgtcttgactgggggcactgacttaacgccacagacaaaatggttgcagaagtcagaatgtctcgtttatttacacaggggattgttgttaatagtcagacgctactctagagagcagtttataaaaagggagttagatacaaaaataaatgagataaaatcatttgttttaaacaaaggctgttcaaagtgaggagatgggtttccagcacccttcatgttttaaaatgtcgtatttccctgtttatgtgattgttgatgacactggtgtgcctcagggcattgcagaggactttattaaaagccgaaccaccaccagctttactcttgtggtctatctttctgacacgacattcctttcatctagttttgtttccaaaatatgcgtatgcaaatatctaggggacacaccaagtattgcttttaaaatagacattcaccaaatttgatccatacttctgcattttttgttttcttttctccccattctagaacaagaaactcctttacgagaagatgaagggaggagagagacgaaagcggagggtaacacgtgcctggctggattgttgcggggatgcttggagctttctgagtggggcagtgaacaggctgaaaccctcgcttgttgggaagtcacagaatcctcccttgtgtagtcctgagaaacactggtccatgtgacaagggccacacccagaaagtctgtccttggtttctgcgatggcttccccaggctttagcagatgatttttagtggaacgcgcagtctgtagcrattctagcaactccattccgttcaggaaatgtgtattgcttcccccatcagtgtgggacatatctggggggacatgagggtctgtctgccctcccagggtctgtaggccagtggggaaaaactgatcacacatctgcatcaattctataaaaacacaggacagaaacagggaagtgctgaactgcatgctccaggaaataactttgaaggaattcgggagcaaaagatgagatgaacaaacttaatttctcctatgtatctttttttcttggcctagccagactgatgtaaaatctactagatctgtaatatttgtttgctgtctgttgaatttactgcaggcttagtttttaaccatcccagggctgcccaaggtaggaacttggtctagatactccacatttagctacttcatatacagtgttgcctcaygtaaaactcaatgtcacatttgctttggctttccagggtattttatagcatcaagacttgataagtgatcaaggtccattctgctaatccactggtaccttactagtcagaagggcctggccacctacctccttctttatctgatcagatgaaagtgggagaaaaaacaaccccactgttacatggtaaaatgctatgagatagtgaccattttagttaaaacatacaaacctaagcacgtactcaaagccactgactatttattcagaagagcaagtgcctggatcctcacaaaatttgggaatctgggcagtggtaattgtggccattctgaagggttttgccaaatccggtcagagagagcttcaagaggtgtggattttctggcctcagcatcagtcctcaggcccccacaacagaaggttccaagcccctgtactgcctgacaaaacacagaagacatacagcaattttctacgcgagaagtagaaaatttttacctctggaaacaaatcttttttgaggagagttaacagagttattaggggtttttcttggtgattacagcttccaatagcagatggtgacagaaagggtccaaagggtataatgtggtcttgagggaacatcaagaaattctattctaggaactcaaaatacacataatttaccagtaacacggcttgaatatctccctacaacacaacaagaacatttccaaataagagcaatgactgacccaaaatcaataacttagcttgaaactttaattgtctctacttcctggcccaccattccttctgccctgactcagtgaatgaccatggtcacgatttaggtcatttttccstgagactagtgattaccaaaactcagaatgctggctaagacacatgctataaaggattttactttagcctcaatttcctccacataggaaaggcttagaatttaggaaaagaagggtcactttgacccagagatatcaagttcttcctgttcttgggcatctacaaagacccattctcatgccataaaccatgggcctctctggattgataaggaagcacgttggccctgcccatcatgaggtctcagatgatgttcccatcttgattaaagacattaacactgccccaccaccacccccagtacatgaatsaatataaagaaactatacgctttcttttttgaacaatgaagtcttccttcagtgaagctcagcatctgctgtgagtttccagaggacattgtaagcaaagatccaatcccagtggttcttccagttgtgaaatgggaatcatgttctctgtgtgccctacccartctcttgcccaagtgagagaagacaaatatagmagtgccttgagtttttcagagcacaattaaagccaaggctcagctaggcatggtggctcacgcctgtaatcccagcactttgggaggccgaggagggtggatcacctgaggycagtagttcaagaccagcctggccaacatggtgaaaccccatctctactaaaagtacaaaaattagccgggcgtggtggtatgctcctgttatctcaggtactcgggaggctgaggcaggagaatcgtttgaacctgggaggtggagtttgcagtgagccgagatcataccactgcactccagcctgggtaatggagtgagactccatctcaaaacaaagcaaaacaaaacaaaaacaaacccaaagctcattattattattcctaagtgctggattcaatactcagttaaatatttatcaaaaaagttcacctgattcctctttttacctcctcattaatttttcccctcccctccaacctttgcatgttgtaggtctgggcaggacttctcccatgagagatagattctcctcaaagttgcaaccaagccccatatggctttgaacaactttttgtactcacccaaatccaattgaattcctcattgcttcacaaatgaaatgtcaatctacctttaaatgactgtgaacttttaaactcttaagctgtatcttgttaatatttgagctctactattgatcttatttaaacagtttatgaaccttttaatctcatatttgataaacttgaacctctcatatcctcctttaacatattagaatttttggaataaatattactaaacaaaattctgatatgatcccctggggtaggccaaaccactgtaattgataaaaggaatttttattattttaaatatttctaagatgaattctcagcaaggtgttgtcttgtggcatgtcacttttcaartgtctgaggacattgctcactttgtaattctcacctactttgtgatgcatctttgtagagtgagtcggacctttcacgattcatgcgtttagcagtcagaatgtgaaagaacatttgtaaatgctaaactcaggtttcattccttctcttttgaagaatgtctgctcacctttcaagagtcatggcaggttatttcatgggcaagagagctccacctgtgaacagactccattcatacatggggattgagcatgcaacagggattgctgatcgtttgtaactacagcttctttctttcttttttttttttttcttttttgagatggagtctcgctctgtcgcccaggctggactgcagtggcgcaatctcggctcactgcaagctccgcctcccaggttcctgccattctcctgcctcaacctcccaagtagctgggactacaggggcccaccaccacgactggctaattttttgtatttttagtagagacggggtttcaccgtgttagccaggatggtctcgatctcctgaccttgtgatccgcccacctaggcctcccaaagtgctgggattacaggcgtgagccaccgcgcctggctacagcttctttcttatatttttgttccattattggaaggcaacttcaatgaacaaacatcttccaaaacttttgaatttttcttctgcttgctaaatactattttgtaaagtttcaattactagttcgaatccacacctcaataaatagatatgtattagagaaggaatggaaaaatatttactcattaagaataccaacacatgaaagtgatttcagagtatggagtcttgagtcaaaaacaaaggacccttcccggaagcttccttttttgcttcagtttttgaatttgactgaaggaaggtggaaatgatcactcgagcccctaatgaattctccttagtaaaatactggcgaggaagaatcaatcccagcaacaggatgatctgggaccagtcttcagatgttaattcccacttggccctactcttctcctttagaacgtttttcttgcaaaatataatttaatgcatttcagattccccttcctacctaaatagggccatagaataataattatctttcttatgggtcttggtatctaaattagtagcaaggacttatgagstggtttactgcacwtctttgcaccaaaaataataatttttaaaaagaccacattgyatctgataaagagctctatagttgtgtgaaaaacacaattagagacatctatcagtcagaaaatgtttcataggccactgaggtattaattagtacactggagtaattgtttggtagttggtaggtgccactggttacattgttgttaacctaataggccagaaacaattcttttcttttcttttttcttttttttttgagacaaaatcttgctctgtcgcccaggctggagtgcagtggcatgacgtctgctcactgcaagctccgcctcccgggttcacgccattctcctgcctcagcctcccaagtagctgggactacaggcacccaccaccacgcccggctaattttttgtatttttagtacagacggggtttcaccgtgttagccaggatggtctcgatctcctgacctcgtgatctgcccacctcggcctcccaaagtgctgggattacagrcgtgagccaccgcgcccggccccagaaacgattcttgttcatttcttttctgagatgtctgtatctgatgttcacatataacaccaaaccacatggtttttgtttgtttgtttttcagagtgtcaatccatatctacaaggacagagactggataatgttgttgcaaagaagtctgtcccccatttttcagatgaggataaggatccagagtaaagagaagatgctagacgaaaacccacattacctgttaggcctcagcatggcttatgtgcacgtgtaaatggagtccctgtgaatgacagcatgtttcttacatagataattatggatacaaagcagctgtatgtagatagtgtattgtcttcacaccgatgattctgctttttgctaaattagaataagagcttttttktttcttgggkttttaaaatgtgaatctgcaatgatcataaaaattaaaatgtgaatgtcaacaataaaaagcaagactatgaaaggctcagatttcttgcagtttaaaatggtgtctgaggttgtactattttggccaagtctgtagaaagctgtcatttgattttgattatgtagttcatccagcccttgggcattgttatacaccagtaaagaaggctgtactcaagaggaggagctgacacatttcacttggctgcgtcttaataaacatgaatgcaagcattggcatatggagttttctttttaaagcattataaagaacaatttctttgtttaatagaacaacctgatctacatatatgatagtatatgatccaaacaataatgctgtgaacttaatgggtctggtattatccccattttacagatggtagaactgagatgcattcaacacactgagatacgttcaacacaccattgggaatcatcagcaaaatccagcatgaagagtctctacaggataagtagcctagatttttccaacaaataaatgataggagggaaaaatggtggggtactatcatagattttaaaaggcttaagagacatacgagccaaatataatgtgtgtgggtcttatttgcatcctgactcaaagaaaagcattgatcagacagtcagggaagtttgagtagtaaytgaatattttggtatgattcaagtgttacacagtattatattatggctatttttttaaaagagcccttatatcttagggataaatattgaattatttacagatgatatgatgtcttggatttctttaaaataatccagtggtagtgatgaggtggagggccaggagggaatggggatatagataatcaagactggccatacactgataactgttgaagctgggtcaagggtacttgggagttmattgtacttcttatatctttttttttgttgctttttttttkgtttttgagacagagtcttgatgtatcacccaggctggagtgcactggtgtgatctcagctcaccgcaacctccacctcctgggttcaagcgattctcctgcctcagcctccggaatagctgggattacaggtatccaccaccacaccctctaattttcgtatttttagtagcgacttggtgtcatcatgttggccaggctgctctcaaaactcctgacctcaagtgatccgcccaccccggcctcccaaagtgctgggattacaggcatgagccctcgcatctggcttgcacttcttatttctatgtttgtatgtatttgaaaaattcaacaatagaaccacagttaatggttaaaaagtaagagtagatcatggtaagaactggcctggagtccaggtgtggtgcctcatgcctgtaatcccagcactttgggaggccaaggcaggcggatcacctgaggtcgagagttcgagaccagcctgaccaacatggagaaaccctgtctctgctaaaaatacaaaattagctgggtgtggtggcgcatgcctgtaatcccagctacttcgaaggctgaggaaggagaattgcttgaacccaggaggcagaggttgcagtgagctgagatggcaccactgcactgcagcctaagtgacaagagtgagactccgtctcaaaaaaaaaaaaacaacaaaaaactggcctggaaatagcaatgttggacaaggtagaataaggctacataaggctgtggacaatgtgaggaagccaaaaaggaaggtgaatgaagagttgtcccaaggtgctagggaagtagcagagggatccacgggagagaaaatctggctggggctagtggtgatgaactagatagtgaagtcagagtggctggaaggagaagggattttcctggaaaaaaaaataggaaacttagaggcaggagacaaggagaacctccattagacagactcagaaaggccctttctttctgaatggagtcagctgggcatctgcagcacagacagagggatttgcctgtgggctggagagggtcattactcctatctcagtcttcccacaatgctccagctgaggatctttgaaaccagaaaggtggttatagtcaccccagagacatgtggagaacaaaagaagaggatggtgctagcaccacagccattcatcctgattgaactcccactgtggacacagccagctggagcctcagagcagtcacacagcatgaggaggggtttacaatggrgtcattctagaagagaatttcctccgttcttgctactgggagagagaaaatagattgttgagtgtttcctacagcgtttgtgcaaagccatcctcccctcccactgccttcaaagtgagtcacgtgccaggtcaccaggctgagtcttctagggatggctcttccaaatgtgtttacacccaaagatgcagtgttccggaacacacctggaggtcctgaagggagcaattcagagttggaagtgtttctgccagtgagttgggggtctgtctgggttgggcagctacctggaggtgatatgagcttggaaaactgagtcatccactcgatccacagttccacagtcactgccacacaatgaggagcagcatgaccctgactccacacttcccaagactcctggaacagaattctatttctttggcaaggctgcgacgaggacctttcctatttactcagctaggcacaaaggaatagcagaaacatcttttctcctcctctttcctttgaaacctttgagagataccaggcttcacatataaatctcacagataccagccacagggttaggkcctggagaacgaaaccctccagatcccctatctgtcacaggatcacatggtgatcactaaagtgccactgccttggccagggggacaggagagccaggaaaatgggaacatttattaaaaataaattgtcggccaggcacagtggctcacgcctgtaatcccagcacttttgtgatccagccaaggtgggcagatcacctgtgctcaggagttcaagaccagcctgaccaacatggtgaaactccatctctactaaaagtacaaaaaaaaaaaaaaaattatccaggcctggtggcgcatgcctgtaatcccagctacttgggaggctgagtcaggagaatcacttgaacccggaaggtggaagttgcagtgagccgtgatggcgccattgcactccagcctgggcaataagagcgaaactccgtctcaaaaataaataaataaataaaatagattgtcagctagaggaactcattcttctagctgcgagtgggtaggggaggacatggttaattacttctctcttatgatccctttttgtgttcctgtgggaccccacgcatactttcatacagtccctgaaacggggcataatgataagagttactctatatacataacaagctctgtatacattgttcatttaaacatccckccctacattttatagatgaagccattgaggcagacggattccatgacttaaccaaaactcctcaactagtaagtggcagagttggaacttgaatttaggcctctgggactccacagtagacactctcccctgtaccacactaccacctgttaaaagagaaaccttagacagattaaactgaacagactttgagtaaagagcaatttgcaaaacaggttcagagagactctgcactgccgtgtggttgaagacaaccratggacagcaaaaggaaagtgaggtacacgaaaagtgagggacagaaacagccgtattggttacatttcagtgtttgccttatctgaacatrgtttgaacagttggccacctttggccgaatctcagtgattggcacaagagtaggttacagcctgtttacacatccagctaggttacagtttgctatgtacagagaaaactttaggccgagctttcactatgtaaggaggcagctttgggctgaacttaatttggcacacctaatacttgtttacttattatatatgtgcctcattcaactgggttataagctccttgaagccataggctgtgtctcatttttctttttatcttgatatcttgcacgcggcctaacaaaggcaataataactgctgaatgaatgagcatgatggaatgttttaaagacgtcataaaaggtaaatcatcttagactgtgtacagagggaaaggtggaattacctctcactttggtgggatttacagattgatgtgaagttgtgaacatggttctcaagtctttcttttctttttttagacggagtctcgctctgtcgcccagactggagtgcagtggcacgatctcggctcactgcaagctccgcctcctgggttcacgccattctcctgcctcagcctcctgagtagctgggactacaggctcccaccaccacacctggctaattttttttgtatttttaatagagacggggtttcaccacgtttggcaggatggtctcgaactcctgaccttgtgatccgcccgcctcggcctcccaaagtgctgggattacaggcgtgagccactgcgcccggccctcaagtctttcatagaatcagccagtagaactacccgcttcttttctgagtcactgctcaagtgtcggtagttcaggaagtgtcaaggcacagagttcctgccaaatatctcagtttgctgcacaccatgacggttgtgcatgattcatttattagggagacagaccagatgcgtgggacggccctgctcaccatcaaggcagatctgtgggcagacagagcattgggttctgctgtgggttttcatcgaccagtgttccctctctgaccatgggaaagccacatgggcagtgcagaaggcatatcccagcccttcactggtatcatgtgctgtggcaacagccttggggattagaacagagaaacctggggaaacattggccactcaatgagaagcaaacttggagggtaggaggaaagtcctaaggaggggtcagggaagtatccaggccatcaactttcaaagtgctccrggacataatttagaaagtcaattggcacacctagccaggagtatatcttgagaaagtagtattctttgaagcctcctgaagcctgggttttaccaacagccyagtcctggcaagattcggggagcttgtacttcacatactcaactttctgtttctaaagggaaaggagactctaccaagcctttttggccatcaggctgctcttccaaaattgtctggtgacttaagtgtaggtgaatcagaaacatgtggatcaaatttcctgctaaaatacacatgkgtttggcaattaaaagaaaatgtgtagaatatggcagatttggtggccagaaagccccgtgagaaggcaagggccrctgaaaattatcrtaactatatagtaaaagaaaacttgattccaaatgggcacagaggaatccatggagaaagttggtaagacatttatgggtgtcacacatcggcttctgaaggccacaagtaaaggcagggtgtttgcaaagattcttgtagaaccatgtccttgaatttgggtttaaaaacttattaacttataagttgcaaaagaaagkctcttttagaaaagagctgctataagatgggctgagttagaaaaacctaacagcccatcctaatagactgaatgttctattgtttgatgaatgttatgtgccagtagaacttgttgataagccattcttcygaacagaaaccataactatayacacaggaaacaaaaatatttgtaatggcttttagcagtggcaactgaacacctgaggagtgagaygcatcttaataaagcccatttggaaactatagtgacttccccacaagrtgtcaccttccttgwtaggactcatcacgataccattcatttattcattcagcagtaacttatcaaggatctattctatgtgccaaatactgagctatattctgggactggggagtcttactaaagaggtataagatataggctcttccttcatggagtttaaagcacatttgcaaccataaatattcagctatttgtacactattattacacacttgawcccatggcatcacagtttaacagagtagttagatacaaaaactttgtaattagatttgcatytgacgggttctgtgacttacaagttgtgtggccttgagcaaataattccatctcactaaaccttagttctttcatgtaaccaatgggaamggtaatacttaccttatcatattgatgtgaagatcctgtgatgtgaaattccctgcaatatggcacctgtgttaaacctckatttagatgycaaattcagaattcatcagatttcagsgcaagaaacaaactctttactctggatatttccatatgaaagggatttaatgcaaggaattatgtgcttacaaaattatttaaagamgtggaggagcatgaggcagggatccacagttsrgtttaaccagttcaaggtcacgcacatagctggaatccagaggtcaggaaatagtggttggtgtcactgccaccaccacatcactaccaatgatgtgtgatactcccaaagtcattgtcttgacacaa
